United States Patent Application Publication US 2008/0039413 A1 - sequence listing, part 3

SEQ ID NO: 221 - DNA, 43914 bp, Mus musculus
  misc_feature (1)...(43914): n = A, C, G or T/U
agaaaaaagagaactaaatgttttttctcagagctgagaatatgtcttagttccatatagcatctctcgagcttttttctttctttgtttttgtttttgttttgttttgtttgtaagagtaggctacagttaaactaacctgaatgcattatcttttgagaaaccaggtgggtcctgctctcctggaaatagagcctaattttggtcacttatgggggaaatttctagaagaaaattaaatttgaaggagataatcctctgatcttcatttcaagagcgacgctgtgacggaagcttgagaatagtaaggtagggtgagagagaggtggacagacagttggggaattagcaaggatgaatggcccctgcatgtacagtgcgctcaaggagtgtgctactgcagttcagaaatcctgtttcctaggtgtctgagagtcaaattaaaacaggaagcttcttcaggttgactgcagttaggccagaggacattgctttatcgcgttggaaatttctcttagtttagcgcagaagctctcttgcttggcttgcataggcgtgttttctctgtccactgcagaacctttctgtcctgccatctctgttggacattgtttcagtcacccagcctgatttgtcagtagtgccttgtgtttggaaagagtggttatatttgtcagctcagccccaccctgtgtttcagcaggaagtgggtgtgtgccttagcctttgaggaagttttcttccttgtcctcacttcacagtgtgggggactgctgtagtctacattgtgctttttgagagaaagggagaagcaggctcacagttaaacacaggtgtgagtcacctgtgggtgctgggtatcaaactcaggtcctttggaagaacagcaaatgctcttcaccacaaagccacctctcctgtccactgtcacaccttaaatgttttattgcaccagtttggactatgctgctaagactgtgtagtcttgccgccaggtggttatttaacttcagtgaacattggtttgtggagggaatgagtgggtattgagaacaaagtcttgggtagccaaggatggccttggattctctgtcttctgtgttacaggcctgtgcccatacttagctattaaaaatattaaatctgatgaaatgcacaattttaagtaaggaaatttgaaatttgccttttgcaagaggaaactgcagagtgaacttgtttaccccctttcaaagcactggtaactgagcagtgaggaaagttgaagtgaaagcagaagttgccattgcccagacccagcgtccccacatgttcctgtcccttcttctgctgatcgttttaaagaggaactacctcgggaagcattttccttgtgagggttatggctgtggctcctgtatgcttgccttttgaatgtgatcatagaaatctgcaggtgtcatcaattgtttgtttattataaacagctcaaaatgactatccttgccattctgggcaggcatatacttttctcagtatgaacaggactgcggaatgtgcagnnnnnnnnnnnnnnnnnnnnnnnnnnnnnnnnnnnnnnnnnnnnnnnnnnnnnnnnnnnnnnnnnnnnnnnnnnnnnnnnnnnnnnnnnnnnnnnnnnnnnnnnnnnnnnnnnnnnnnnnnnnnnnnnnnnnnnnnnnnnnnnnnnnnnnnnnnnnnnnnnnnnnnnnnnnnnnnnnnnnnnnnnnnnnnnnnnnnnnnnnnnnnnnnnnnnnnnnnnnnnnnnnnnnnnnnnnnnnnnnnnnnnnnnnnnnnnnnnnnnnnnnnnnnnnnnnnnnnnnnnnnnnnnnnnnnnnnnnnnnnnnnnnnnnnnnnnnnnnnnnnnnnnnnnnnnnnnnnnnnnnnnnnnnnnnnnnnnnnnnnnnnnnnnnnnnnnnnnnnnnnnnnnnnnnnnnnnnnnnnnnnnnnnnnnnnnnnnnnnnnnnnnnnnnnnnnnnnnnnnnnnnnnnnnnnnnnnnnnnnnnnnnnnnnnnnnnnnnnnnnnnnnnnnnnnnnnnnnnnnnnnnnnnnnnnnnnnnnnnnnnnnnnnnnnnnnnnnnnnnnnnnnnnnnnnnnnnnnnnnnnnnnnnnnnnnnnnnnnnnnnnnnnnnnnnnnnnnnnnnnnnnnnnnnnnnnnnnnnnnnnnnnnnnnnnnnnnnnnnnnnnnnnnnnnnnnnnnnnnnnnnnnnnnnnnnnnnnnnnnnnnnnnnnnnnnnnnnnnnnnnnnnnnnnnnnnnnnnnnnnnnnnnnnnnnnnnnnnnnnnnnnnnnnnnnnnnnnnnnnnnnnnnnnnnnnnnnnnnnnnnnnnnnnnnnnnnnnnnnnnnnnnnnnnnnnnnnnnnnnnnnnnnnnnnnnnnnnnnnnnnnnnnnnnnnnnnnnnnnnnnnnnnnnnnnnnnnnnnnnnnnnnnnnnnnnnnnnnnnnnnnnnnnnnnnnnnnnnnnnnnnnnnnnnnnnnnnnnnnnnnnnnnnnnnnnnnnnnnnnnnnnnnnnnnnnnnnnnnnnnnnnnnnnnnnnnnnnnnnnnnnnnnnnnnnnnnnnnnnnnnnnnnnnnnnnnnnnnnnnnnnnnnnnnnnnnnnnnnnnnnnnnnnnnnnnnnnnnnnnnnnnnnnnnnnnnnnnnnnnnnnnnnnnnnnnnnnnnnnnnnnnnnnnnnnnnnnnnnnnnnnnnnnnnnnnnnnnnnnnnnnnnnnnnnnnnnnnnnnnnnnnnnnnnnnnnnnnnnnnnnnnnnnnnnnnnnnnnnnnnnnnnnnnnnnnnnnnnnnnnnnnnnnnnnnnnnnnnnnnnnnnnnnnnnnnnnnnnnnnnnnnnnnnnnnnnnnnnnnnnnnnnnnnnnnnnnnnnnnnnnnnnnnnnnnnnnnnnnnnnnnnnnnnnnnnnnnnnnnnnnnnnnnnnnnnnnnnnnnnnnnnnnnnnnnnnnnnnnnnnnnnnnnnnnnnnnnnnnnnnnnnnnnnnnnnnnnnnnnnnnnnnnnnnnnnnnnnnnnnnnnnnnnnnnnnnnnnnnnnnnnnnnnnnnnnnnnnnnnnnnnnnnnnnnnnnnnnnnnnnnnnnnnnnnnnnnnnnnnnnnnnnnnnnnnnnnnnnnnnnnnnnnnnnnnnnnnnnnnnnnnnnnnnnnnnnnnnnnnnnnnnnnnnnnnnnnnnnnnnnnnnnnnnnnnnnnnnnnnnnnnnnnnnnnnnnnnnnnnnnnnnnnnnnnnnnnnntaatgtcacggggcacctgttgtgtgtgagagactaacttctccagggcatccacagtggcactccttatgtacagtctggaaggaaattgaggaaatagtcgctctaatcattccctttgttccatggttcagatgaggagcacagttgggagactagaggagggaggattgtatttcaggaggtctgagcgtatagctaggggcaacttcgggtggaaaacccatcaaattcattgaagtccagggtttcatctttaaattttttatgtgaatgttgcattcaactatgtaatatgtccacggcttaaagtgtttttaaatatttatcaatgaatagagttcattcaacaggaagctttgcctatgacctgtggaactacaaatacctatcccttcccttccagctctgtagagggagttttggatatattttttagtgtctataggaaaattgttgaagataacaattatgaggtatcagaggcaagagaccaactcatgtgtcctgactccgcaagccatgtatttctgcagttagaaatgacatggagagtctaaaggctgcagtctgctggctatttctaagtttatcattcaaatgtagggttttttttcttttgtcaaattacaagtgtgtttcaggttatgcataatttcatacttctcccatagaagacaaccagtccttggttacctaaaaaaaaggagcatttggtacaagtacttctgtactgcagggtgtcttgtctctctttggtgtctgaaaaaaatctcctttctacccctcatatttattttacttttatctttattttctgtatgtgggtgtttggcctgcatatgtgtctgtgcactgtgtgagtacaattccctcagaggccagaagaaggtgggttctgggactcgaacccctgtctgttctgaggtttttctccagctccagaaatgttttttgtttgtattgaagcagggtttctctatctagccttggctgtctccgatcttgttatgtagaccaggctggcctctaacacacagagagagactactgccttgcctcccaagtgctgagattaaaggcataggcctccatacctggtcaaaacaaaaacaacaaaatcttttgaaaagaaatagcacatctgtttttcttgatgggtattaacattttttcccattctctctgtcttttgttgttgttgttgttgttgttttgtttgtttgttttttgtttttttcgagacagggtttctctgtgtagccctggctgtcctgaaactcacgctgtacaccaggctggcctcgaactcagaaatctgcctgcctctgcctcccgagtgctgggattaaaggcgtgcgccaccacgcctggccttagactctttacaccatgttgtagattcactaatcacagtgtgctgttaagtgtagctgtgcatcgagtacctannnnnnnnnnnnnnnnnnnntttgaaaagaaatagcacatctgtttttcttgatgggtattaacattttttcccattctctctgtcttttgttgttgttgttgttgttgttttgtttgtttgttttttgtttttttcgagacagggtttctctgtgtagccctggctgtcctgaaactcacgctgtacaccaggctggcctcgaactcagaaatctgcctgcctctgcctcccgagtgctgggattaaaggcgtgcgccaccacgcctggccttagactctttacaccatgttgtagattcactaatcacagtgtgctgttaagtgtagctgtgcatcgagtacctagtgctgtttgctttaagtagaagagttaagctggaaagtctggagggagggagttagtgttaaaaacctgtggggtcaaaggaggatcctagcagagaaatggaatgggagtcatttcctaagacaacggacaagtatttaggaaacacctctgcatcccaaagataggcacagctgcctcacagcgaccgaccgttagagaggttcaaagttagaagcaaacagctggttcttttagttcctatgttgttactcttggtgacaggaaatcttgttccccaggctgctggcttcctgttttatttttacttgtagcagatcagaatgtccataacaaggagcagcctgttccaaaaggttccactgcctctctgtgtatttgttagtttggggtttttgtttcattttggtgcaacaatgttggtttgcctttaatctctgtagtgatgagcttgtagtaagcgttttggatttgcaggcagcttgtctggtgataagctgatgttttaggatttgatgtgagtaaacttgatgatgatgatgacgatcgtttcttccttcccctcctccttttctttctcttcttcctcctcctcctcttctttggaatttatagttgagtttactgtagttgcttctgtgccttttcatttgatgtaaggtagcacaaaggcttttatgacattttannnnnnnnnnnnnnnnnnnntacttgtactcagatctgtggtacatgtatctcagaacccaaaagcagaggcgggtggctctttctgagtctgaggccagacaaagctacatagacattacagagtaggactcttttaattcttttattggagaggagggtttgttttttcaagacagagtttctctggataaccctggctgtcctggaattctctgtagaccaggctggcctctaactctgatctgcctcccaagtgctgggattaaagttgcgtgccaccagtgcccagccaacacttacagttcttagaccaaagtttggtttcctacacctgcatagtggcttacaacttcctgtaactccagtttcacaggatctggcaccctcatctgtcctctgtgggcaatcacacacacacatgtgcatactaacaaacaaaaacacgcatttatgtagataggaataaatataagaagtactccggcataatagaaagagctgcagccttggctgggtacagtgatacacaagtcatctcagtggtgaggaagagaaggatgagatcatggcgagtttgaggccagcctggtctactaagtgaatttgaaaccagccaggggacgaagtgaggcagtgtctaaaaataaagatctgagctctaacagtctgaggcttctgatttgaggtctgctgctctttccattttccatagtgtgattctgagtcgcccagggcctgacctgacatggcaaggaagaggccaggcagtgctggtgcacgcctttactccagcctggtctacagagcacagcgagggccacacagagaagccctgcctcagaaaggagaaaggaaagctgagcacaggcctttaatcccagcacttggagggcagaggcaggcggatctctgggttcaaaggctccttgtccggtggctctggagagcagcttgggagtgatgaggaacaagcagggatccatgaccctcacactgtatgagaaattacttcagtagaacatcaaaccaagatgaagatatctctaacttatctatctctgacgcaggaatgtaggacttctcctnnnnnnnnnnnnnnnnnnnnaatttgtttgttcattgatacaaagtttcctgtaccttgggttgccttttatccagttgtatagccaaggataacctagacagttttaaaaagatgccattagtttgtcagcaacgttttcctgctcctcctctgtcactaccaccgagctatagccacacaccttttatttttacctttttaatttggagacagggtcctgctaaattgccctggcttaccttggtctcagcctcccaaatagctaggattgtagatgtatgccactggcctagcttaataaatgtttgaaaagcacattaaaaaaaaatcctatggaataatataagctctttggcctagtgtaaggtcctttctgctcttaccgtctgtaatccattttttcccattttataatactcaaataaaaattcttttaaaatagagacaagagggccagtgagatgacctagtgagtaaggttgctgttgccaagccaagcagcctgagtccagccctggagctcacttggtagagagaaccaactctcaaaggctatcttgtgacctccgcgggcgggcaggactcctgcctttgcctcctagtgctgggattgaaggcttagactaccatgcctgtcttctagaccttcttctttaatgcttctactccattgtcatcagtgtggggtgttgccctggatcctacggctaacagttccagctctgggataattgtccatgaacctggttattacttgcctatattcctgcaaacccccataacacaaattatctgtgttctttttactaaattgcatttaattactagaatgtgttttatttatttcttgacaattttatacatgtatacagtgtatcttgatcatctcaaccatgccccagattcctccttcccctctccccagggacccctagcacatcccacagatcaagctggcctcagactcacagagactgtcctgctcctgcctcccaagggctgggattaaagacattcgccaccatggcccagtctcagcttgcattttagtccagtattgggcccatccaggagggtggaacccaacttgaacctgtaggaaatggtgtttataggtttctggcattgagtagagggtgggactgtctctgcagagccctggaactctcactcagatttcagcaagaacagannnnnnnnnnnnnnnnnnnntatttaggaaacacctctgcatcccaaatataggcacagctgcctcacagcgaccgaccgttagagaggttcaaagttagaagcaaacagctggttcttttagttcctatgttgttactcttggtgacaggaaatcttgttccccaggctgctggcttcctgttttatttttacttgtagcagatcagaatgtccataacaaggagcagcctgttccaaaaggttccactgcctctctgtgtatttgttagtttggggtttttgtttcattttggtgcaacaatgttggtttgcctttaatctctgtagtgatgagcttgtagtaagcgttttggatttgcaggcagcttgtctggtgataagctgatgttttaggatttgatgtgagtaaacttgatgatgatgatgacgatcgtttcttccttcccctcctccttttctttctcttcttcctcctcctcctcttctttggaatttatagttgagtttctgtagttgcttctgtgccttttcatttgatgtaaggtagcacaaaggcttttatgacattttaaatttctttatggttttccttttttttaaaaaaaagatttatttatttattttatatataagtacactgtaactgtcttcagatgcaccagaagagtgcgtcatatctcattacaggtggttgtgagctaccatgtgattgctgggatttgaactcaggacctctggaagagcagtcagtactcttacctgctgagccatctctccagccctctttatggttttctaagaaataaaaatatggcctgtccactgtgacttgactgttctagtcatacccaccttgttgagaataaaaccttctcccaatgtttgggggtggtggcactcgaggggcagaggtaggcagatctccgagttcaagaccagccttgtctacagagtgagttccaggacagccagggctacacagagaaacctggtctgggaggaggaggacttctcctaaacgagtaatgtaggaatttggtaatcaaaatctaaaatgatagctccatataagcctgaggagctggtgtgtctggggaagggccaccaggataaaaagcagcaataggagggtgtctgcgtctgtcccagacacaccctgctgctgctcccggcctttgactccaggagaggagcactgggtagaagcaagggctgcgatctgaaagcacagttggcttagcgctccgtttgacatattgaacatgtaaatttttccttgattttccttcattctgtcaatttacagactaaactttggtagtgttaatagatcctggcagctagtatttagttgtacattaacagtcacccatccaggaagacctagagagagaaagtatagccaggaacttaccagtgggatggatcactgttggcagctgacttcattgtggagattaccagacaaaggcaaatctgctcagcctgacctcacactctgtttagctgagaatggccataaacttgtcatactcctgcctcctctgtcctccaaatgctgggattacatagtgtcctcaaatggtgtatcaccatgtccagtttatgacatgttaggggcggggtgtcagacctatatctgtgtatgccaggcaagtgccataccagctgggttgcatccccttgccacagaggtcatcttttgtttttgagccttgtagctgttggcctagaatctgatttctgttgttgtggatacctgtggatgctattttctctgatcatgcttcctttcccggagggttcttgctggttagagcagcaattgctgctttaaggttccacgctgccttcatgacgtcaccagttcagaatttctaaactttaagcaagacttcttagtaagccttgagaagatcatgagctgcctcaactagaacatgggggtggggtcagaggggaaggtttttaaaaacctgtttcagatcagagcaacagcacaagagaaaagaaggagactcacatagccctgtgtgcctgggatctgtggttgagtactgttttcctgctctttcccttttaggtttttttcatcattgagaacctcgcctgaagcaggtccactatgccgttagtaaccaggaacatcgagccaaggcacctgtgccgtcagacgttgcctagcgatacaagcgagctggaatgcaggaccaacatcaccctggcaaatgtcatccgacagctgggcagcctgagtgagtgcctcggagagcctgtgctttgccctcaggggtcgttggtgctctttatttagtttccctctcctccatgttcctatttctcccccatctgctttccctaggtaatgcaaaaatatatcccctgttccctgctccgagaagggctccgtttttggtgcctcttcttcccttctaccctctcttcatctaccaccaccctctagcttcaaaaggaatctgcaggacggatggcaggaagggctgcagcagaaactgcagacgcagtgacagagcagaattctctgtgtgtgaagtgggaggttcacagagcagtgtcttgggtcgaggaatgctcctgtaattagacgatctgttccgtgtggaagcctcacgtgcgccaatagtctagctacccagcaccccaccgcgctcttcccaaagggaagcaaagtaagcatgttctcagagacgctggctgacgcgtcatccctgatacacatttaattgtgctgcaagcccccaggtccaagatcagggcacacattacttctgcagtctccagagtattgggagatttgcgagctttgtgagcacacggtgtgagctcacggtgtgagcacacggtgtgaacgtacagtgacacaaatggtagctggagccgttcttatatatatgtaaaatttctttaattggctatattagggagactgccttgggaaggtgatttgcatgtggtttggattccattctgaatcaagctgactgtttccttgaagctgaggtgtgggagaggcagatgttaggaccagccctgcctttgcctagtgctgccccagctcccataagcacctctgtggcaatgccactttagtgatcctccttagcaaaggcacttggtataaattatttctgacactcacccctgctgtcacatcactgcccctagaaaaggcagaggactatccgaagcttgcattcccctccggcgtgataggccctaccttgagccaaggaggcagagctgtgtgaccaggtgatgtatggagtctgagactcctaagccttcacctagcataggccctgtctcagttgatccagggcttagtgagcctggatggggcatcacagagagtaaacccattggcagtgcctgtcgcacacaaagaccctgacggcagcacagcagcagagctgtagctggcagtgagtgcagcacgaggaagctgcagaggcgttctgcttctgtcaccccagaaggccaagtgcatagaagccagccatacactggttccttctccacaggacaaagaacgtccagctgctgctgctgctgctgcagctcctgccccctccaaggtgttctcagctttaatggaggctgttgtggactttgtctgcttgtgagcaaaccccttctttcatgacgctgatctgagagccagtgttcacgttgacctaaggactgagttgctcgtgtcagggcaataacttacccttcactcaccaccagtgacagggacctgggatgagtcttacatgtggatannnnnnnnnnnnnnnnnnnnggcttagtgagcctggatggggcatcacagagagtaaacccattggcagtgcctgtcgcacacaaagaccctgacggcagcacagcagcagagctgtagctggcagtgagtgcagcacgaggaagctgcagaggcgttctgcttctgtcaccccagaaggccaagtgcatagaagccagccatacactggttccttctccacaggacaaagaacgtccagctgctgctgctgctgctgcagctcctgccccctccaaggtgttctcagctttaatggaggctgttgtggactttgtctgcttgtgagcaaaccccttctttcatgacgctgatctgagagccagtgttcacgttgacctaaggactgagttgctcgtgtcagggcaataacttacccttcactcaccaccagtgacagggactggatgagtcttacatgtggataatgctggaatgacacagaaatgagaggacaggaggtggcccctgacttctgggagctcagaacctaccaaaggagatcagaaaaaatacattttgagggcacaatggaaagagggtgagaggggaactcaaatatgttgattgcctgttttatgccagttttcaatgaggtgttgatagaactttatttaatcttgtcagtttttcagatgaacaaatgaaagcttaaagacatgaaataactttcctaacgagaggcctgtaagactcaagttcatttcttccttgtttctgtatttacttatcttgtcctaaggctccgccccagggccttgtgtgtgctaagcacacacccagcgtcaacatttaaacttagctaagagtttttttgctttatcaccagttctgtccatgccagtggtgccctagttgagatctttgttgacttacctaaaatatttttaattacattgaggtaataaattaacttgttttttaagacaggatctcattatatagctcagactggcctcaaatttgtgacccacctgcctcagctcacgagtgctaacgccttgattctcagaggatctggtgtccatgcctctctctggccttcgttctttcagtgtctacttagctctgtcctgtctaccagcagtggtgggcttaaaacacgtggctcacctttcctgcattccattctgagctttgaaactttgtgagacaggtgtcattgtgtagctcaggctggccagatgctagagtatcattcctgcttctaatttggaatttgtttgttcattgatacaaagtttcctgtaccttgggttgccttttatccagttgtatagccaaggataacctagacagttttaaaaagatgccattagtttgtcagcaacgttttcctgctcctcctctgtcactaccaccgagctatagccacacaccttttatttttacctttttaatttggagacagggtcctgctaaattgccctggcttaccttggtctcagcctcccaaatagctaggattgtagatgtatgccactggcctagcttaataaatgtttgaaaagcacattaaaaaaaaatcctatggaataatataagctctttggcctagtgtaaggtcctttctgctcttaccgtctgtaatccattttttcccattttataatactcaaataaaaattcttttaaaatagagacaagagggccagtgagatgacctagtgagtaaggttgctgttgccaagccaagcagcctgagtccagccctggagctcacttggtagagagaaccaactctcaaaggctatcttgtgacctccgcgggcgggcaggactcctgcctttgcctcctagtgctgggattgaaggcttagactaccatgcctgtcttctagaccttcttctttaatgcttctactccatcgtcatcagtgtggggtgttgccctggatcctacggctaacagttccagctctgggataattgtccatgaacctggttattacttgcctatattcctgcaaacccccataacacaaattatctgtgttctttttactaaattgcatttaattactagaatgtgttttatttatttcttgacaattttatacatgtatacagtgtatcttgattatctcaaccatgccccagattcccccttcccctctccccagggacccctagcacatcccacagatcaagctggcctcagactcacagagactgtcctgctcctgcctcccaagggctgggattaaagacattcgccaccatgcccagtctcagcttgcattttagtccagtattgggcccatccaggagggtggaacccaacttgaacctgtaggaaatggtgtttataggtttctggcattgagtagagggtgggactgtctctgcagagccctggaactctcactcagatttcagcaagaacagatgcactttttttttgttttttgttttgttgttgctgttttgttttgttttttgttttcgagacagggtttctctgtgtagccctggctgtcctggaactcactctgtagatcaggctggcctcgaactcagaaatccgcctgcctctgcctcccaagtgctgggattaaaggcgtgtgccaccaccgcccagccagatgcaccttttaaaaaatgagtttcactagtttttggttcctcataccatttcacttgaagaattttgctgagaggcagttgggggaacctcctgaagactattctgaaaccttttggcgaaatgtggtatctgttaatggctgtcctgatagatacggtctgtcctggtgccgtctggatgagtgagattcacctttggaccaggcactttcttttcctttccttttatttcctgttcttttaattacttaaattgatttattttaaattttattttatatgtatgtgtgttttgcctgcatgtgtgtctgtgcaccatgtgtgtacagtgctcatagaggtcatcaaaagatgtcagatcctctgggactgcagttacaaatggttgttatctgccacatgggtgctggagattaaacctgggtctctcagaagagcagccagggnnnnnnnnnnnnnnnnnnnnnnnnnnnnnnnnnnnnnnnnnnnnnnnnnnnnnnnnnnnnnnnnnnnnnnnnnnnnnnnnnnnnnnnnnnnnnnnnnnnnnnnnnnnnnnnnnnnnnnnnnnnnnnnnnnnnnnnnnnnnnnnnnnnnnnnnnnnnnnnnnnnnnnnnnnnnnnnnnnnnnnnnnnnnnnnnnnnnnnnnnnnnnnnnnnnnnnnnnnnnnnnnnnnnnnnnnnnnnnnnnnnnnnnnnnnnnnnnnnnnnnnnnnnnnnnnnnnnnnnnnnnnnnnnnnnnnnnnnnnnnnnnnnnnnnnnnnnnnnnnnnnnnnnnnnnnnnnnnnnnnnnnnnnnnnnnnnnnnnnnnnnnnnnnnnnnnnnnnnnnnnnnnnnnnnnnnnnnnnnnnnnnnnnnnnnnnnnnnnnnnnnnnnnnnnnnnnnnnnnnnnnnnnnnnnnnnnnnnnnnnnnnnnnnnnnnnnnnnnnnnnnnnnnnnnnnnnnnnnnnnnnnnnnnnnnnnnnnnnnnnnnnnnnnnnnnnnnnnnnnnnnnnnnnnnnnnnnnnnnnnnnnnnnnnnnnnnnnnnnnnnnnnnnnnnnnnnnnnnnnnnnnnnnnnnnnnnnnnnnnnnnnnnnnnnnnnnnnnnnnnnnnnnnnnnnnnnnnnnnnnnnnnnnnnnnnnnnnnnnnnnnnnnnnnnnnnnnnnnnnnnnnnnnnnnnnnnnnnnnnnnnnnnnnnnnnnnnnnnnnnnnnnnnnnnnnnnnnnnnnnnnnnnnnnnnnnnnnnnnnnnnnnnnnnnnnnnnnnnnnnnnnnnnnnnnnnnnnnnnnnnnnnnnnnnnnnnnnnnnnnnnnnnnnnnnnnnnnnnnnnnnnnnnnnnnnnnnnnnnnnnnnnnnnnnnnnnnnnnnnnnnnnnnnnnnnnnnnnnnnnnnnnnnnnnnnnnnnnnnnnnnnnnnnnnnnnnnnnnnnnnnnnnnnnnnnnnnnnnnnnnnnnnnnnnnnnnnnnnnnnnnnnnnnnnnnnnnnnnnnnnnnnnnnnnnnnnnnnnnnnnnnnnnnnnnnnnnnnnnnnnnnnnnnnnnnnnnnnnnnnnnnnnnnnnnnnnnnnnnnnnnnnnnnnnnnnnnnnnnnnnnnnnnnnnnnnnnnnnnnnnnnnnnnnnnnnnnnnnnnnnnnnnnnnnnnnnnnnnnnnnnnnnnnnnnnnnnnnnnnnnnnnnnnnnnnnnnnnnnnnnnnnnnnnnnnnnnnnnnnnnnnnnnnnnnnnnnnnnnnnnnnnnnnnnnnnnnnnnnnnnnnnnnnnnnnnnnnnnnnnnnnnnnnnnnnnnnnnnnnnnnnnnnnnnnnnnnnnnnnnnnnnnnnnnnnnnnnnnnnnnnnnnnnnnnnnnnnnnnnnnnnnnnnnnnnnnnnnnnnnnnnnnnnnnnnnnnnnnnnnnnnnnnnnnnnnnnnnnnnnnnnnnnnnnnnnnnnnnnnnnnnnnnnnnnnnnnnnnnnnnnnnnnnnnnnnnnnnnnnnnnnnnnnnnnnnnnnnnnnnnnnnnnnnnnnnnnnnnnnnnnnnnnnnnnnnnnnnnnnnnnnnnnnnnnnnnnnnnnnnnnnnnnnnnnnnnnnnnnnnnnnnnnnnnnnnnnnnnnnnnnnnnnnnnnnnnnnnnnnnnnnnnnnnnnnnnnnnnnnnnnnnnnnnnnnnnnnnnnnnnnnnnnnnnnnnnnnnnnnnnnnnnnnnnnnnnnnnnnnnnnnnnnnnnnnnnnnnnnnnnnnnnnnnnnnnnnnnnnnnnnnnnnnnnnnnnnnnnnnnnnnnnnnnnnnnnnnnnnnnnnnnnnnnnnnnnnnnnnnnnnnnnnnnnnnnnnnnnnnnnnnnnnnnnnnnnnnnnnnnnnnnnnnnnnnnnnnnnnnnnnnnnnnnnnnnnnnnnnnnnnnnnnnnnnnnnnnnnnnnnnnnnnnnnnnnnnnnnnnnnnnnnnnnnnnnnnnnnnnnnnnnctccagcctggtctacagagcacagcgagggccacacagagaagccctgcctcagaaaggagaaaggaaagctgagcacaggcctttaatcccagcacttggagggcagaggcaggcggatctctgggttcaaaggctccttgtccggtggctctggagagcagcttgggagtgatgaggaacaagcagggatccatgaccctcacactgtatgagaaattacttcagtagaacatcagaccaagatgaagatatctctaacttatctatctctgacgcaggaatgtaggacttctcctggtgaggaggtcactttatgttttctaactcacagttttcaaagatcttgtctgcacagaaagttccgagccagccagtgctccatagtgagaccctgtctcaaaataataataataaattttgtatattgagatcttttgtaagatttttacctgatgcccactgtcacaagcccttctactgtggaaccgaaaatctcagtcttctctgggagacagaaagatgggttaacttgtatttttctcttttccgccagagcagttgaatttttacatttgttatgagacagagtctcactatgtagtccaggctggccttgaacaaacagcctccccctcggcctcccaagtgctaagattacaggtgggagccaccaccattgggtgtttttaaggttggtccatttcccatgcataatcctgcgttatttctttgcttttgtttccaaacacaatttttctttacctggtggagcaggagcactgctgtattatcaacatatcaaacaggaccttctgcctgcagcagagcagggacgcagcatgttggcctctgagtcctttgagctcaggaattcctcttgactgttgctgcatggaagcgtgcagtatgcagaattgggagctcctccttgatttattaaatgcaccaggagctcccagtgcacaagttaactgcagtttaccccgagggtgtggttttgcccttccaggctaggttagcctaattcccccttaaatatgtactaagcttagaagctaaaggaaaaaaaatgagaccttactttaactaggtctcaaactctcgtcaggttgggcagtcgtttacgtctgccttccctttgtgcgtgagcatccgaggtgtggagacttactcctcatacctctcccatcccttgcggctcagaataacagtgtggaggtatttattccacatggctgtttctttggctacaaattctccttgcattcagggttgaaagtacagaactcttttcttattctaaaaagtgagaccttgtggaaaaagaccagtggtgtcttgtttttcagggagggcttgaatatctcagcttttcgcttgttccctggggtgtggatttgaaggattgtaacctggagcaaagactttgaaagctgtgggttagagaatgtgaggtgaccttttcacccttagaagaagtttggcatctctgtgtggggcgggaaaattcaggccccttagagatacccacatcttggttttcagtgggcttttgaaattcaactgaggacgtaatttagtgtattaagcatggacacctagctgttgctctaactttcaggctgctctcagagccgttttacaaggtgctttacagaacaggagggtgagagccaaggacaaatgtttgcatacactggctgcttttccgggactaacttgttgacattgcaccttttgattttgttgaacctgctttgaatttcatgtttgttcagaatttgccaaaggggttctattagttatggactatatacgcacagagtgaccaggctatggaaactgtctctttctccaagaacaagcatgtgtgtgtgtgtgtttggggtacgatatactctttagtctttgggctggttcctctcactcctgtgcactagtgacttgctctgtttgccctttctaggtaagtatgcagaggacattttcggagagatttgtactcaggcaagtgcctttgcctcccgagtaaactcccttgctgagcgggttgaccgagtacaagttaaagtcactcagctggatcccaaggaagaagaaggtaaggaggcttagccagagctgcaggctctgccgaggagtgcctcagaatcctgccctggtttgttacaaagcaagaggagagatcagagagactgatatacgtctacttggaagcgacataagcctaggtggtgtaaagaaacctttttccctttaccacacagcacactgccatccccccagtccccttgttctcacgtttccttccctcagtggtattttgctaccataaaagtacttggaagactcatttcacccatggagaggcctgcaagatctggccacatagtaaacctttgtgttgcttcatctgttcagtcatgaaatggctgggctgctgacagcctcgtggggcttccccagagggggaagggaaaaaaaacctggctgccaagaaaggcagcagctgaggcgtctccgacggtgtgactcagtgtttgctcaaatagcctgccgtccattttctaacgccttccatcttccttctctcagtgtcactacaaggaatcaatactcggaaggccttcagaagttctaccacccaagaccagaagctctttgacaggaactctctcccggtgcccgtcttagagacctataacagctgtgacgctcctccccctcttaacaatctcagtccttacaggtaaccgtgcgcgcgctcgctctctctctctctctctctctctctctctctctctctctgtgtgtgtgtgtgtgtgattaaagactgcattgtctaaaatctctaaagataatatctgtatcagagagagaatactgttgaactccctgcccaccccagcagagacctttagctcgctcttgtctggtctctgacggacatgccgcgtctcctatgtactgaaagtttgctgtaccattgatgctgcaaagtttaacttgggaaaagtaagtccatctggattccatccaaggaatttagttattacagaagcaagaggacttgttagcaggcagtcctgcacacggattcccaggggccacattctaaccggctttccactttctcagaaaactctaaattaccagatgtttgggcaagttaatgggaccagcctcatactggctgctggggagggggggatcacagtgtggggagtattggtgtccttccacgtgagtgccggtcccttcattttgagcacccgttggatggtttcttctgtaaggaccagccctggtgtaggtagacatgggaaaggaagatggtaggtttaaagacaacctagagtcctcccctctggcgatttgctaatgtcatcttgaacagaccaactgagcagaagtagaaagggaatatttatcttgcttgtatccataaaaagtagttacaggtagctagacgtgggtgctggcggtcaggcatgggtacactgaaaagcagagtgtgtgtgtgtgtgtgtgtgtgtgtgtgtgtgtgtgtgtgtgtgtgtgtgtgtacctcttgaattcaaggacactggtctgtccctcgagccccaaataggagcttggtagcgtctcacagagatcaagaagaatatctgcccttggtcctagtaaaggatatggagtcttgcttgccccagggctgtcactctttagtctgattgagtttggggatagtgtgtgatagaaagggttgacatacctcatagtactgaaaacgatatgagacagtgtttgtatggtgggataggattgacaaataatattgagatgtttcatctttctggaaactgtattattattttttttttgatactaatactgccagaatcagtatctccttcctctcagttatctggacttggcctaacagaaacaagcagtggttactataaacatgttgctgtcagggcctggagagacagttcaacccgtaagaacatctgctgctactgcaagttcagctcccagcacttagagcagaaactcacaaccgtcagtaactctagctgcatgtgctcttacacccccttctggcctttatggggacccacatacatatgtgcacagagacacgcatacacacacattaaataaaaataaaataaatctaaagcatgttttaaaaggaactaaaaacggttggtctagacacctgtgccctcagtggtggtggttgatatagatgtgcccttggagtttgaaaggcaaggggtagaattgtctttcagaagttttggttggttggttggttgattcgctgtgtgtgtgtttgtgtgtgtgtgtgtgtgtgtgtgtgtgtgtgtgtgtgtgtgtgtgtgtgtgtgtgtgtataaagaaagattgggtctctctatgtagtcctgggtgtcctagagcttatatatacaccaggctgtcttaagaccatccttttaaatgttttgtgtgtagttcttttttttttttttttaagatttatttattattatatctaagtacgctgtagctgtcttcagaagagggcgtcagatgtcattatggttggttgtgagccaccatgtggttgttggaatttgaactcaggaccttcggaaggccagtcggtgatcttacccactgagccatctctccagccccgtgtatagttctttttttgtgatccattctctccacatagtgtaggctggccttgaacctctgatgcttctctctgcttctcagtgccaggactacagacatgcaccgccacgcctggcttcctgccccctaaagcacatactttctgaacagtggaagtttcaccacaccaaagtagaagattctagtcaggcccatggagtatggcaaatagttgttactcagtagctcactctgtcctatgtattgccatacccactaagaccttgtggtcttttgttgtttgagacagagtttctttttttgtttttgttttttctgagacaggctttctctgtgtagctctggctgtcctggaactcactttgtagaccaggctggcctggaactcagaaatccgcctgcctctgcctcccaagtgctgggattaaaggtgtgcgccaccacgcccagctctgagacagagtttctttatgtagtcatggctgtcctgtctctgtctgtctgtctctgtctccccctccccccaccccacccccattgccttgaactcagagatttgtggccagcccctgcctcccgatggaccttgtggttttaaaacagctggccgtttgtgtcagtgggtctccttgcagtaatactgaacaagggagcaggaagtagctgctcccttgtatctgtgtggagaagagcaactgtacacagagacacttaggtagaaaagacctggggctggtgagatggctcagcaggtaagtgcaataactgctcttccgaaggtcctgagttcaaatgccagcacccacatggtggctcacaaccacccaataatgagatctgacaccctcttctggtgtatcagaagtcagctacagtatacttgtgtataataataaaatcttagaaaagaccagcagggcatggtggcatactcgggaggcagaggcaagtggatttctgagttcgaggccagcctggtctacaaagtgagttccaggacagccagggctatacagagaaaccctgtcccgaaaaaccagaaaacaaaacagaaaaacaaaaacaaaagaccttagtgctttctacagagtcctggggaatggatagggaagaggaaccaacagcagaagtctccttagagatagacagtatttagatatctctgtcagagtcaactgtgcaggtgattagaaataatcagaattctggccaatctagcctgttcttgcccctgaccatgcagattcctgcatgagaactgaagatatggccaaggtttgtaaggagttagggccattgagaatctggtgtggaagctgaaacatacaattgattcgaaggtgtcctgactccttaaaaactgttaagtggttggtgttgggatattgggtttggttgggaactcatctctctactgacagctactcgtcttcatttttatcccagggacgatggaaaagaggcactcaaattctacaccaacccctcatacttctttgatctttggaaggagaagatgctgcaggacaccaaggatatcatgaaagagaagagaaagcatagggtgaggggaagggacctctgtgctatacatcagtaggccccgttgtagaggagggataaaaaggaagcgggtcttatgtgaagtcattccaagtgaccgcttgctcgggtgcaaaagaatgtgtccacaccaaataccaccaagatgaaagtataaatcacaccaaaaatatgtatgttcccggcactgtgtaacaactgagaatatttgagctgagctttagaagtgggcttttctgttcaccacttatttttcttgcaatctgcacccgactctgcgggacacccagctagcctggtcccatccagcacagtcgttcctagacacgcaccaggtgaccccttcactgctgcgtgggcggggccaggactgccgggtttgtggcgctgcttctctctttaggctcctggtgctgtgtgacctgccagctttgacctagcaatcccattagcatggctgtcagcagacccaggagagtgccagaggctagtacagctgcaggaggtggaaaacccttcattggttgttgtgttttgtttttaactgtttccttctatctgctccagatctctggagctgtcagttttcacctgttgactgacctttgtggcatgacaaataacaaataactgtttactaacttcctaacaattagagccacttatagatgtgaaacaattcccccccccccccccccaggtagctactgtttcctgttagaggtgcttgtgtgtgagcctgagcaatgctctgcctgggaggtgctgtgaattggacggcctaggtcactgcaaacctggtagttctgtaaatcctgctgttatcctgtgttgtctaggcaaatcatctcacgagtgtgtgtccatgaggatgggtagaattttaatgaagcactttggaaaatgttttacaaaggcttttctgttccttttcattatagaaagaaaagaaagataatccaaatagagggaatgtgaacccacgtaaaatcaagacacgcaaggaagagtgggagaagatgaaaatgggacaagaatttgtagagtccaaggagaggctggggccttctgggtaggtgatgctgtgtagcattctctggagcagctgggaccctagggacaaaaggctctggcgtggtacctttcccaccatctcaagtctggctgtagggtttaggctaatacaccgttaatcaattacttttaaaagcatccatctggtgattaaaatttcttaataagtcaagagactgcgatttaaacgaggtgactaggctggtctgacagggaaggccatggtttctaatgatgatactctgccagaagccagtacacctgaaggtctcggaggaaagtggtcttggaagccctctccctccagagcacacatgaaggttgtgctgaagagctgggctgggcacggcacgggaggtgcagcgcaggcaagctctgcaggttcccagaacaaattctcagccaggcttggaagaggggtagccaaaggactgaatgcagacctcagagtcagtatgggaaaggttgctgggccactgtggagacagatatatctctctgaaaaagtgggagatggcatcctgacccatttcccaataccaaatcacgctggaggtttaaagaggcagaatggttttaaaacctagtttgatgcttatcctgatgtctgacccctgtgacattcaaagccaaatcaccatgactacctagtgtgagagtcaccctggcttttcctctaaattcattgctcctggcagtcagagatgtgcacagcccatactaggcactgagtactgataaaagggaagagctcttgactttagaataactaccatggaaatcttgatacatgtgacacttgttcttcctggattcagaggtttgtttcataagcataggaagatggtggaaatgaacctttctacagaaaaaccagtagtaaaggggccttcattgatctcactgtccagtagggggccattttgttccccagtcccatcctgttttgataggcacatggcataggattagtgactcctatggccataaatgccaactgtcaaaagtgtatnnnnnnnnnnnnnnnnnnnnnnnnnnnnnnnnnnnnnnnnnnnnnnnnnnnnnnnnnnnnnnnnnnnnnnnnnnnnnnnnnnnnnnnnnnnnnnnnnnnnnnnnnnnnnnnnnnnnnnnnnnnnnnnnnnnnnnnnnnnnnnnnnnnnnnnnnnnnnnnnnnnnnnnnnnnnnnnnnnnnnnnnnnnnnnnnnnnnnnnnnnnnnnnnnnnnnnnnnnnnnnnnnnnnnnnnnnnnnnnnnnnnnnnnnnnnnnnnnnnnnnnnnnnnnnnnnnnnnnnnnnnnnnnnnnnnnnnnnnnnnnnnnnnnnnnnnnnnnnnnnnnnnnnnnnnnnnnnnnnnnnnnnnnnnnnnnnnnnnnnnnnnnnnnnnnnnnnnnnnnnnnnnnnnnnnnnnnnnnnnnnnnnnnnnnnnnnnnnnnnnnnnnnnnnnnnnnnnnnnnnnnnnnnnnnnnnnnnnnnnnnnnnnnnnnnnnnnnnnnnnnnnnnnnnnnnnnnnnnnnnnnnnnnnnnnnnnnnnnnnnnnnnnnnnnnnnnnnnnnnnnnnnnnnnnnnnnnnnnnnnnnnnnnnnnnnnnnnnnnnnnnnnnnnnnnnnnnnnnnnnnnnnnnnnnnnnnnnnnnnnnnnnnnnnnnnnnnnnnnnnnnnnnnnnnnnnnnnnnnnnnnnnnnnnnnnnnnnnnnnnnnnnnnnnnnnnnnnnnnnnnnnnnnnnnnnnnnnnnnnnnnnnnnnnnnnnnnnnnnnnnnnnnnnnnnnnnnnnnnnnnnnnnnnnnnnnnnnnnnnnnnnnnnnnnnnnnnnnnnnnnnnnnnnnnnnnnnnnnnnnnnnnnnnnnnnnnnnnnnnnnnnnnnnnnnnnnnnnnnnnnnnnnnnnnnnnnnnnnnnnnnnnnnnnnnnnnnnnnnnnnnnnnnnnnnnnnnnnnnnnnnnnnnnnnnnnnnnnnnnnnnnnnnnnnnnnnnnnnnnnnnnnnnnnnnnnnnnnnnnnnnnnnnnnnnnnnnnnnnnnnnnnnnnnnnnnnnnnnnnnnnnnnnnnnnnnnnnnnnnnnnnnncataataacctttgtgtcagatgcacttatgtgatatctattaataagaaaaggagagcactcaagctctggatgtttaagcatgttttggcactttggatggacctcgagtctttaaaagacaactgacattggtatgtcgtcaggtattcgtccaccttggtgtaccagaatggcagcattggctctgttgaaaatgtggatgcggccagctacccgccaccaccacagtcggactctgcctcctcaccttccccttcattctctgaagacaacttgcctcccccgccagcagaattcaggtaaatggtagaacctcttccatccatcctgggtagtgaagcactcaagaacaaaggaagagccgggcatggtggcgcacgcctttaatcccagcactcgggaggcagaggcaggcggatctctgagttcaaggccagcctggtctacagagtgagttccagggctacacagagaaaccctgtgtcaaaaaaaaaaagaaaaagaaaaaaaaaaaagaacaaagtaagagttcactaaagtgacttgaggcaagagtgtgcagataggaataacatttatgaagtactggcagagttgttgttaccccatattaggtacacatcagctttcataaaggcgagaggtgggaggtggggagacctcgtagacggctgcttcagctcactcagtgtaccctaaagcatgagccaagtgtggtggccagcacaagtcagcacttgggggcagaaggataagagatttaaggccagcctggactacatagtggcaggcggtgggggacagcacacgaagggaaaggggaaatacagactatgtgacttccagtctgtcccttggaagtgtgtgcactggggtctttgacagatgtgtacaaaggattgccatggtggcgagaaggggtctgaggattggtcaggcttctctgtcctctgagttccttttccctctctgtgcctgacgagtgggccttccaggcgctcttttccccctgaacactgcctaattagtggctgatgatgaaggactcttgaatggaaactgagacagtgctggcctcttttctctcctcattcttggcccttaaattaccaatcccaagtcttctccctctaaaatcacttcttgctgatgcctcgtcaaggtgtagtgaggcttaaaggtaaaacttagggtgttccaacaccctaagttgggtgttgcttctgctgctgttgctgtttttcctcctcttgagatggggtctctttatgtagccctggctactatgtagagccctagaactctctatgtagggagactgagctagcctcaaactcatatagatccactgcctcggtctctggaatactgggattaaaggcttgagccaacactactgcgtagtaaggtgcttttctaagcagtagctctcagtgcagggcaggtgtgaaggttcacaagaaaacctcgcatcttcacattgtaacctgaggtcttgaagttggaacctcacagatctgatccctaaagtgagccttcgccctctttcaaacctgagtcaagagttagccaggagttgggagtcgtggttcatgcctttaatctcagcattcaggaggcagaagcaggccaatttctgtgagttgaggccagccagaactacatagtaagaccctgtctcaagcaaacaaagctgagtgtgttagttcaagcccataattttagtacttgggaggctaaggcaggaatgtcatgtgttctaggcccacctggactacataataaggccctgtctccaactccaagtggacatttgcccctaccaaattcagtagcattcatagagtaagaaacagagcccagtggatgacgagggcttgaattcttattctagctctttcttgtatgtatttaggtctagctagaggtttacactgacagccacccatgggacactctccaggagggttcaaggagccatctcctgaaaagattaaaggggacctgaactgctgtctctgccagtcttcctgacagggtgctcagtcgtctccttcagtctccagttgtccccttctcctggatgacggggtgctcagtcacctccttcagtctccagttgtccccttctcctagatgacagggtgctcagtcgcctccttcagtctccagttgtccccttctcctggaaggctgcccatagtgctgcttattccttggtgatctgttttggctgatctgtttctatcagtctgaggcagagcgaaatgggagtcaactaagaagggcctgagcttatagaagagcttgcctctgggcaggagttggcactgtggtcgtgatggtaaatcttgtccctctggcctttcagctaccctgcagacaaccaaagaggatctgtcttggctggacccaaaagaaccagcatggtcagcccaagccatccacccccagctcctcctctgagctctccgccaggtcccaagcctggcttcgctcctccacctgcccctccacctccacctcccatgagtgtgccacctccactaccatcgatgggattcgggtctcctgggacccctccacccccatcacctccatctttccctcctcaccctgattttgctgctcctccaccacctcccccaccaccagcagctgactacccaatgccaccacctcctttgtcccaaccgtctggaggtgctcctccgcctcctcctccccctccccctccagggcccccgcctctccccttcagcggtgctgatggccagcctgctgcaccaccaccaccaccaccttctgaggccaccaagcccaagtcttcattgcctgctgtgagtgacgcgcgcagtgacctgctttctgccatccgccaaggtaaagccagggttgggtctgaggacacgcacccttagctgagatgctggggcaggatcttgaccctttcaaggagacagctttcccagacaactgagagattagacctccaggtcagggtgggacttccctgaaagatactgggattgagagttcttcctctatttgttgattgtgaattactttttaagctgggaccctagaattccttgaagtaagcacgttatgtgtgtttacatacatcttcttgggaaaagatccccagatgaaaatgagtcactgtcccatcggccaacttttcagccagactcggttgcagctgtcttctctgctctctcatccctccctgcctgctcccatttcttcctatctttttctttcttttctctccttcccttctcttcttccagccacccatcttccccctccctcctctcccccctcccccctccccactctcctgtcactcattgagatcagatttggtcggagggttaggtgtggtttgttctgttggtaatcctccgagccccactgtagctagggctgagcacttgcctgatgggggtactctaacttcagaagcctcggtgctcacagccaggcaggacagcgggcttcctttcaggatgtccacaacccagagatgctgattccacaggacctgtctttccttttttttttcccttgcttcttcaggaatccatctttctctgtcctttataatcctgtcctgatgatactcagtcccagagggttgtgagactagggctgtgcttcctgcctaaccctgctcctctccctccaggctttcagctgcgaagggttgaagagcaacgggagcaagagaagcgtgatgtggtgggcaatgatgtggccaccatcctgtcccgtcggatcgctgttgagtacagcgactcggaagatgattcttctgaatttgatgaagacgactggtcggattaactccgcctgctgcccacattcctctttctagtcctcccacctgccttcctccatacaaactaacagtctcatggggggaagaaagcaagggacaaagaactgcaaggggccaaagccaaagatctatccgagtgcttccttcaaatgaccatatgcttcttcctcgtgtctgcctgcgggctcctgagggtccacagctgagctgatccatctttccctcaagtgaccgtatctagtgacaggaagggagaaccctacagtagatccctctgcttgggtttcaactggagatagtgccttcccctgataaccattttaacccatggccttcctcaaaaccctttcatttagctacttcaaataatgttatccacctcctgtctcacagcagtgggtacagcctgtgtgggcgcaggtggtcccttttctgtgccctgacaagtagactggcacacccctgccccacactcagccttctgcagcaggtaggcttgcttctgttagctctgcctggatgcctttgttccagaaggcatcaagcctctaaagactgtctcacaagtgatgcccttctggagactgagggtgtggccttcctcccatgctctctctgggtgagtgtggggtctgggtgtcctttgcattcccctcctcaccccaggtgccttaagacagcccagttctaacctgatattcatgaccaaactagccctgacactcagggacctgggcctctgctgactgtcaggagcaaaacttgaaggtgtggcaccgcaggactggaagagagtggaacaccttgggtcctgcctgttcagggtactgaggccaagatgagaagtgactctctcaaggtcacacagatagtgatagaacaagagcccaggcttcctgtttccaagtcacctgtgtttcctgggaccaaataatgagcacctgctggagtctgggcagagcagcctggctcccttctaccccagagctcccaaatgccggccttgcatttggagggttcatggcctgtgcggggaggtggggggggggggcctctccggtgcagctttaactgcagccgctctggtaaccgtttatttccccttctgtctgcagccagtcatgtggcatgggagctgtgctggggaggcagtgtagagaggagctgtggggcagccagccttggcaggtgcagtttgcagttcactgcagctccctcccccttttgtttcctcaatttaagcagaggttgtgccagctgtagaaacttcagtccctcaggctggcagccgctgcaggtacctgcctgggggggcctggcagccatagagaaggctgagaggcagaaggacacggggtcttcctgcctcaccaccttgctgtgcatgatgatgctgacccaccccctttacctcccttcccagaactgatacacgggtgctattattcaggaaaaaaactgagcagctctggccagcagcaaggtttcttctctactgccccaactattgtgtggcctcttgtgctgaaatcggcttctctggcttcagagcctgaaacaaagagaaacaggatctgtctctacccagcacagcaaatggttgtagtaattgccaaagccctcataaacccctccggcttgaggagagtgcaatcatggctctgctgcctgcacttgctgggttcctcccctctgcctcctttcttgaactcagaggtagggactaagcaccaggtgccagcaggccctcctgctgtggccactccagagtgctccgtgtctccatgtgtccgtggcctgccccccccaaccccccaaatccagtgtctggcaccgggtttggcagtcaactccatgctgtgcatgtttcccaccccgtgccttagaagctgaaggtgctttttcatcagaaccttaacatggctgttgatggtaccctggctgcagcccagcgggggctggagaggcaggggagggcagtggtccttccaaatagaagtcctggggcctggccaggccagggtttgggcctaatggtttttactaaattactcccctcctgctctccgagaaaggggagccagagccgctcactgtggttctgttccgaccttgaaggggcggtattggcctggcttctggaatggacagagtccaccaggaaagactgggggcgggaggagctggggaggggccctgtctgcggaaggtaggattagatcattagctcagtgacctcctagggtttcgatgtgctgtgttctcatcctacagctggtttggtaatgatctgcaagtcccggagagcaacagcacagctccgcctgacgctctcattaaaatccatgcagccaagctctgcgctttgtagcagccggccttgcagagcctcctcagcttggggggctggggacccagtcagctgagaggtcctctaggctctacttaggcatatgtgtacccaaaaaaaaaatttttttaagcatgcttcttttaaacccagagccctttaaaataataaagaacccaatgcaggtgggtgtgtttgtggaatcccgtaagcgtagaataccgagtttagtgactatttaaactgggctgaggctggtaagactataaagcagtggcccataaggactcttaagcatgaggccaaggagccacgtcccttcccagtctgcctggcccaggggggctgcccccattcctggagcccaggggcccagcttgcaattgctagtgtcaggagtgacttgtagctttgccttggttgtgagatgatttcattccaggggagggggcgggggatcccttggaggctcagagcagctggcccaagctgcagctcgtctccagtggaggcttgaatgccctcagaaacgaccctggccaatgtcaccgcagagctgaggcggtgttgtcagggctaatgtgaaatctcttcccgtggcgccgatcctctgactctatagcgccagcttggacagattgaggtctctgtggctttggtgaccctgcttaagcattcccaccgtgtccctgttctgcgctagcactgcctcctgctgcagcccctgacttgacctcagggcctggggagggaagcaccataccagggccaggagctccaactccgacgtgtcagcctctgggggaggggggattaagccttgagcttggctggtgcccattggacctgggaccaggtgttacccagagaggtgcttctgctgtgcttcctgcctccatcactttcctagggcctccatgagggctgagaacagctctgctctgctcctgtattattaacttgcttcagttaactgacttgagaaactaaccaatttttaccttctgcctagaatgatgtacacataggagagaaagctatcatgttcccgaagtgccttgttttctctgatagaaatatatttataaggacatattccaataggctcttggtgtttcccatatcaagatttctgctagctaatgcatagagggaatactgtctaaaaatagaccctttcctcccaaaggttgggaggtaggacctgagcagtggagtgaagccacaccccacaattttttatttatttttttatttttagatagggtttcaggtagatctgcaggccttgaccttactatatagttgaagatggccttgacctcctgacccctgcctcagccatgcctggctaggacagccaaattgttgttgtttcaagtctggtttcatttgcttccctgccgggtttattgtgtgtaccccatttgtactcccaataacctgaagattccatgtaactcttatgtacgcgcatgaatactttaaatgccaaccttttcaatcatttgataaagtctttgtagtcactcagtcacctttggtgtctgtgtgtgtgtgtgtgtgtgtttgtgtgtgtgtgtatgtgtttcgtgggagaaggtaagcaactctgcaggccacaggtgggtgagggactctgtaaggggtccagcatgggtgggcttcaaaggcaggaggcctctggctagtttgtaggcacaggtccccttctgtgaggacagccctagagctggctgcccacagctccttgcaccaggcaggagaggcgcacactgaatgctgatgccgccttccaacatctggccggcatcttgtctgcctcacagacccaagcaacttaccttaaatagaaccgttcacaatggaatccgataaaaaggttttggactgctccaagccccatctcttgcctgcctgaggaagactgagggggctgggtttgcattctgaccccccaaaatgacctacccaggaagcaacggttgttggaagcacagctgtgggttactgtccctaggggtaatttatgagcagacacccagatccaggcccagtagacacagtggggtggcccggggagacgacagggagcagaatcggggggggggtgaggggggcgccatgggccgtgggtcaccacgcctgctgttcacagagtcacccacgggcatcgcgggagagggggcagaagtttttgaattgtcagcaagtgctgcgccagccactctgagctcatcgctggaggtggggtgccggggagggggcacagaacccctcgctcccctcccgcgcggcctgtgtttagtcagcacttggccgccagagctggtgactgacaggcagccagacgcccgccctggcagaagacaaaatggtgtcggagccgcccttggaggaacgggagggaaggagtgtggttctgggaaactagaggcctgtgcctggatgctgtctccactgctgccacacagggaagaaagccctgacactgtgcgagtcggttcgcctcctggaactagggaaaaatggacatttaccggagtgcccactacctgctataggcagcacatgcgaagtgtgcgaggtccccagtggacaagagaggtgctttgagctgcctaaccctgcctgctgctatgccatttacgctgctcaacgatccaccccgcagcaggctgaggagtgccagtgtctaaggtttccgctctgagatcttacctgccgcacctaccctgccagtgctcagttttacagctgcactaacaggtgagggtatttttgttctttggagtcaagcaagcttgactgaggccccagccatctttgacctttggggcagaagaaacctgtgcccttgactacttgggaacaacacgggttccctacgtctgggctccaagcaggtacatcctgccctgttcacacatgcatgggttcacgtacacgtatttgtctaataagtagcccacagtccaggcccagaaagcacacttagacattgtgtacagagctctgctcttatgcaaaacaaggacacaagtcagcacacagctacaggagcaggcataattgcaagcacatctaagaggcctcctgagccatggtgctggctggctgcctcggccagctgctcactgccccctcctggccacctttccaccagggcaacctggcaccatttcctgaagttctgctcagggtgattggcaaccagttctcacctagattatggaatcgggagcaatttctgggcctcccttcccccaggcccagggtgtggggccccagaggaagctcttcagggcttaaggacacagacagtctgaacagcctgagcaatccaagtagaattgctctcctgtgtgacagcatggcgataccctcccactccactccagggagcagccacccccgccctgccctagtgtgtgccccacccagtactcaccctctctctctctctcttcctctctctctctctctctctgtctctctnnnnnnnnnnnnnnnnnnnnnnnnnnnnnnnnnnctctctctctcacacacacacacacacacacacacacacacacacacacacacacacacacaaggtttggaggtataggcttccacgctgcccaggcaggagctgctccagctcgaagctccctgctttcccgtctggacttcaactgcctttattcagcaaggcattgagcctgatactaggtgcagacattccactgtggtgttccagtcggtgtctttgcagctgataacgctcccagatgtacacccgggtagagcacatctgtaaaggggtcagtggcttcctcaggacagactttggttcctgttgtacagatgtggaaaggcacagaagggctttgcggcgtgcccagcaccacacagccaactggcatccgatgtcaaaatagaaacaccttagtgatgctcaagagaacacagcaccttatgaggttgggcccagagataaggagactggagccgagcggcaaagtcgggagctctttttcttcagaaaatactcacagggccaaatgaagacttgggggaagctctgaggaggttctagacttggaccctcagcagggaggctggggacaatgcatcttggaagctgtgtggattcctccattgcttcgtcctgcactgggtaaatccctgacttgcttttatgcagaggcatgagacaagtcaaaggagcctctccctagcccatggctgcttgcttgcccatctgtgtatgcacgcatgagtgaggtgtgcacataggcctggagtaccagtgtgtgcgctcacctgagttcgtttatgcttgcctcaagtagtgcatctgagttcacacacaggtttattatccatgactgtggttagttggtttatgtggatatttatttattttgagacagggtctctgtagtccaggctggcctcaaactactggtgagccttttgccccagcctcctaagtgttaaaattctaggtatcagccactgtgcgacaatgcctgcctctctctctctctctctctctgtcctttctttttttaagacagggtttctctgtgtagtcctggctgacctggaactcactctgtagatcaggctggcctggaattcagagatctgcctgcctctgcttcctgagtgctgggattaaaggagtgctgcaacaccacagcctgggctattaaaacaacaacaacaacagaaatggggattgaaccccaggctttgctgtagcctcaggccctgtgtgtgagcttacatacatgaacagtgtctgtgggctgggtgacaggactggagttgtgatgggcacctagcgcaatcacataattcagctgcagggaatctgagggcacccacactcccttggggaaagtgcttgcctagaacatcaatcccagttcaatccctaataccataataaaaccaggtttgctggtccacgcctgcaattccagcacttgggagatggagacgaggatccgaagtttaatgccatccttggctgtgtagtgagttcaagggcagcctggactaccctgagactccgtctaaaagtaaaaatcaatcaatgatttctacatgtctgaccgatgacttaatgaacaggtaaggttttgcttgagtgtgtgctcaatgcagttggcacattgaatccacttgggaatatacaagggttcccctgccttggtgtggagagctgggtggaacctgcctacatatgctcaccccgtggtttgtacatttgtgggtgtgtatgtgtgtgtacaggaatggctttgtgtggctgtccatgtaaagtggaaatgccctgtgagaaagtatgatgtcatcactcccccaccctggtatatgtggtgctctgatgggctgatgatgccctgtcttgtgtcccccctccccacagcgggtacacaattccctggacccatcctgctcagccaatttgcagccttgctttcagctcccaagaaggcctgcagcaaagtcaaggggctggtggccaattagtgagggggttaatcagggacctggggaccccccagggggtgggaggctgaaggcagccatggggttgcctgtcataaggttgctgcctgtcataaggttgggggaggggacgaagaggaggtgggggcctgtcggtgctacagaaccagaggtgtgcccatggattcctgattgctgaccactaacagcaggaagcgtgtgtgtgtgtgtgtgtgtgtgtactgtgtgtgaagtggtatgtagatgcatagatgcatgcaagtccttgattgtggccctgtatgcaattgtgttaaaatggctatgaatataacctatttacatttttgtaggtacatatatgtgtatttataagtgtgcagtggtatgcaaatgggtttgcttatacaaacaaacctgtgtgtatgtatgtactgtatacatatgtgtgcaagaatatatatatacattatacatatacatacatacatatatatacatatacatacatatatatatgtgagtgttccagcatgcacccctgtaacataaagttcatatgtataatgttgtatctagtgtgcagatcaagtgtgcctgtacaagtgtgcaaatgcacccagggatggatatatgcatggtttcatgtgtctctgaacagtcaggtgcctggttcccacatgtgtgcccatgtgtatgtgtctgtgtatgcagagatcttggcatggagtgagctggggaatggcaggctccaggctgcaggagggaatctgacagacgaggcttgctgcagcccccagccccgggagcctgttttccagcctgcggaagctgtgagcccgtgaactcatcttatattaatagctgctgtctcctcacttattgcaagggagaggcggtcatggcccctgcggggcgcagccctgagtgctgccccacctcccacaaggaccagggctcagcccagctagaagagagcccctggtttttccttcagttcagagagcccctctcctggccaggaagatggtaaactctaccatcaggataagaaaactagcggctgggaggcttagtaaccctctctagacacacaggcgcatggatacacacacacacacacacacacacacacacacacacacacacaccaggctgagcagcccagggcctagctccagaggagactgagggagacaggaggctcagtatgaaggggagactcggccctgctctcaagggctcttagaggccctctgcctaagaggaagctcagatttctgagttcctggtctgaggagagtcatgaccttgtctttaggagcctctagttctgaggaggagacaaagaaatgtactctgatgagtcttcagcttgaaaggacatgtgtgtccctgctgtcggggaccctctgttggagacaggatacagcactgccttcaggaggcctgctctgactttacctctcctttatatgcatacggtggctcggtgactccaggggaccagaaggaaggtttattgtataaattgtttcttcttaagctcaacaggacccaacaagggattccctggggaagattcctgggtggagggataactgacctgtctttggaaaggggaaaaaaaaaatccaaagaaactgggtggggatggtgcacgcctttaatcccagcactcggaggcagaggcaggcggatttctgagttcgaggccagcctgatctacaaaagtgagttcctgggcagccagggctatacagagaaaccctgtctttaaaaaaaaaaatccggagaaaaaaaagctggagagatggctcagtggttaagagcactgactgctcttccgaagatcctgagttcaaatcccagcaaccacgtggtggctcacaaccacccataatgagatctgacacccttgtctggtgcatctgaagacagctttatttataataataaatacatttatttataaaaaaaaaaatccaaagaaaggaagacnnnnnnnnnnnnnnnnnnnnnnnnnnnnnnnnnnnnnnnnnnnnnnnnnnnnnnnnnnnnnnnnnnnnnnnnnnnnnnnnnnnnnnnnnnnnnnnnnnnnnnnnnnnnnnnnnnnnnnnnnnnnnnnnnnnnnnnnnnnnnnnnnnnnnnnnnnnnnnnnnnnnnnnnnnnnnnnnnnnnnnnnnnnnnnnnnnnnnnnnnnnnnnnnnnnnnnnnnnnnnnnnnnnnnnnncacacacaggctctcccaaatgccacaggtgaggcccaacacagactcctagacaaaggataggagtaggttcctgtgagcccgagcagggagcgtggaatgaggatgcacagggtccagctgtacccacctagaacagaaaacgatctgggagaggcttcactgggatccaagggactcagcatgaagatgctttctgtacagcgccacctctgacagtaacgttcaacctggagaaaccagcttccccctagcatcggcacagggccttcctaccccacatgcctggccaacctttttttttttttttttgacttgctcccaaaacttacttcctaaatcagtaaagaaagagatttggaggcagatgtggcctgggttcaaatcccagctcaattgaccataaacgtgacctttctgggaggacgttctttccttcttaagttgttggagagtttcccgtagcacaggctggcctcaaacgccacatgtaacctcagatgacctggtgatcatctcgtctccacctcccagatcgttcaattacaaatatgtgtctccaaaccatttagtttgatggtagaaccaagcatggggtgagaaatcgggtagaggaagagcagctaggggccgactacccagacacagacacagaccagcaggagcacacacgagggattgaacctttgtgcatgtggggcaaagactctgccaacagaactataaccccagcctccaggaaggcttttgttttactctcatcttacaattactcatctattctctttcccaattttatttttattcaacgtttcagtcactaacactgcagggttggatttgtttttctttttaaaataactgtatataatttatttatttcatgtatgtgagtacactgtcactgtcttcagacacaccagaagagggcatcagatcccattacagaaggttgtgagccaccatgtggttgctgggaattgaactcaggacctctggaagagcagtcagtgcccttaaccgctgagccatctctccagcccactttatatttggaaatattttatttttaattgtttgtacgtatggctgtgtatgggcatgtggctgtgtgagcacagatgttggtggaggtcagaagagggcgttggatcccatgaagctggagtttctggcagttgagccctgtccaatgtgagtcctgagaagcaagctcagttcctttgtgagagcagtatgtgctcttaactgcttacgtcatctcgtcagctctaactgtaatgattggaaacctttttctagttcctctactagacattaagctatctgcaagaacatcagggagtaggtgatggcttgttactatcagagtttctgtagcccagagaaacctggaacttgcaatcctcctgccccagtaactggaattacatagcactttgggatttacaggtctgtgtcacggtgctcaacttattcacaaagccttctttcacctcttttgtgttttttgtttgtctgttttttgaaacagagtctctctctcttttttttaaagatttatttattatatgtaagtacactgtagctgtcttcagacgcaccagaagagggcatcatatgttattgatggttgtgagccaccatgtggttgctgggatttgaactcatgacctttggaagagcagtcagtgctcttacccgctgagccatctgtccagcccttttttttttttttttttttttttttcgagacagggtttctctatatagccctggctgtcctggaactcactttgtagaccaggttgccctcgaactcagaaatctgcctgcctctgcctcctgagtgctgggattaaaggcgtgcgccagagtctcatgttgcccagaatagccttgaacttacaatgtagttgcggccagccttgaacccctggccttctgctttaatgtctcagtgctgggaatagacacgccattacatccagcatccatcttcttcaagcatggagcatctgccctgctgcctatgctgaggcgctagtctatgaattgtttggcttccagtttggcttggagcaggagcttgcccagtgaagagctcctcccagggaccttccaaaaaaaaggtgaggagagaggacagtcaaggcttggcctgagctagtaggcatccctcactgtgtgcctgcgagttggaccctggagcctctgttagagaggagtcttgaactctaggaaaaagagcaggaacttggggaatggagatagaactgtggtcccagcagacctgatacaactgaatttgaccaagctgctcatcttgggacctcagtttctctagctgtgtgatggtagaactgtaacgtgggcagaaatgttctcatgagatggaccattccttcaggctgacctagtcagagcatgcatacgtaggtatgtacgggcgtacatatgtatgtatgtattcttgaaatagagctggctagcctcaaagttgctatgagctgaagctggccttttagggttgggattatagacacgtactgccaccgttgtttgcctttccattttatgtgaatgagtgtttggtctacatgtgtatctgtccccagcagagagtgctggatcccctggaactggagtaacaggcagttgtgagcccccatgtgggtagtgggaattgaacccaggtcctctgtagaagcagctcttaactcttgtttctccaccctcgctacggtgttgctagggtttaagtgccttaggctggaattgaacttaatgtgtagctgagggtggcctggtacctcatgttcctctggcttctgcctctccaacacagagaatgcaggcgtgtacggccccagctcagagcttcccttgacgctgctcttgcggtgagcttcctcccttcctaagcccctgcagttcaagtgtccagttgcgaacaccagctctccaatgtgaccacctcccaaatgtgggccactgatcccaaggacataatgcaaggtccagaagtttctgagctccagggtaggaaacaaacaaacaaacaaacaaacaggaaaagtcattgtccaggagcacaggttttggaaacagatgttccaggtttgaatactatcttgtatttctagctgtatgacctcagcagttttctcatacatttaaggtggagaccagatagcctgtgccatccatcctagctaggcatgtacccttagcacaatgtagcccagaggaaacacagtggaaggaagctattgctgtgaagggaacttgcatggtacaaacatgttctgcatgcctaagccctgatctggctactgtggacaagctgtggggaccttcaaactaagaggagtatcctggttctcgtccctggatagggaggttcttgcaagttgatgtccaggatttggtccaagggatactaatttcccagatgcattttgggtcccactattctggctcaactccacactatgcaaatgcacagacacaagcatttatccaaaaaaaaccattttttttttattgagtagggttggggactgaacaggaatgcactgggggccataacccgattggcagaggggtgggggtactggctcttgtcccgcctcctctcgggcacctcagggtaaggcctggcccccaggccatggctgtggcgctgaaagccaggctggagtgagagatgggggtgcattttacaatcccgactgccttgccgggttgcaattcccccaaatggccaccagagggaagccgggcctcagcgc

SEQ ID NO: 222 - DNA, 5486 bp, Mus musculus
ggagactcacatagccctgtgtgcctgggatctgtggttgagtactgttttcctgctctttcccttttaggtttttttcatcattgagaacctcgcctgaagcaggtccactatgccgttagtaaccaggaacatcgagccaaggcacctgtgccgtcagacgttgcctagcgatacaagcgagctggaatgcaggaccaacatcaccctggcaaatgtcatccgacagctgggcagcctgagtaagtatgcagaggacattttcggagagatttgtactcaggcaagtgcctttgcctcccgagtaaactcccttgctgagcgggttgaccgagtacaagttaaagtcactcagctggatcccaaggaagaagaagtgtcactacaaggaatcaatactcggaaggccttcagaagttctaccacccaagaccagaagctctttgacaggaactctctcccggtgcccgtcttagagacctataacagctgtgacgctcctccccctcttaacaatctcagtccttacagggacgatggaaaagaggcactcaaattctacaccaacccctcatacttctttgatctttggaaggagaagatgctgcaggacaccaaggatatcatgaaagagaagagaaagcataggaaagaaaagaaagataatccaaatagagggaatgtgaacccacgtaaaatcaagacacgcaaggaagagtgggagaagatgaaaatgggacaagaatttgtagagtccaaggagaggctggggccttctgggtattcgtccaccttggtgtaccagaatggcagcattggctctgttgaaaatgtggatgcggccagctacccgccaccaccacagtcggactctgcctcctcaccttccccttcattctctgaagacaacttgcctcccccgccagcagaattcagctaccctgcagacaaccaaagaggatctgtcttggctggacccaaaagaaccagcatggtcagcccaagccatccacccccagctcctcctctgagctctccgccaggtcccaagcctggcttcgctcctccacctgcccctccacctccacctcccatgagtgtgccacctccactaccatcgatgggattcgggtctcctgggacccctccacccccatcacctccatctttccctcctcaccctgattttgctgctcctccaccacctcccccaccaccagcagctgactacccaatgccaccacctcctttgtcccaaccgtctggaggtgctcctccgcctcctcctccccctccccctccagggcccccgcctctccccttcagcggtgctgatggccagcctgctgcaccaccaccaccaccaccttctgaggccaccaagcccaagtcttcattgcctgctgtgagtgacgcgcgcagtgacctgctttctgccatccgccaaggctttcagctgcgaagggttgaagagcaacgggagcaagagaagcgtgatgtggtgggcaatgatgtggccaccatcctgtcccgtcggatcgctgttgagtacagcgactcggaagatgattcttctgaatttgatgaagacgactggtcggattaactccgcctgctgcccacattcctctttctagtcctcccacctgccttcctccatacaaactaacagtctcatggggggaagaaagcaagggacaaagaactgcaaggggccaaagccaaagatctatccgagtgcttccttcaaatgaccatatgcttcttcctcgtgtctgcctgcgggctcctgagggtccacagctgagctgatccatctttccctcaagtgaccgtatctagtgacaggaagggagaaccctacagtagatccctctgcttgggtttcaactggagatagtgccttcccctgataaccattttaacccatggccttcctcaaaaccctttcatttagctacttcaaataatgttatccacctcctgtctcacagcagtgggtacagcctgtgtgggcgcaggtggtcccttttctgtgccctgacaagtagactggcacacccctgccccacactcagccttctgcagcaggtaggcttgcttctgttagctctgcctggatgcctttgttccagaaggcatcaagcctctaaagactgtctcacaagtgatgcccttctggagactgagggtgtggccttcctcccatgctctctctgggtgagtgtggggtctgggtgtcctttgcattcccctcctcaccccaggtgccttaagacagcccagttctaacctgatattcatgaccaaactagccctgacactcagggacctgggcctctgctgactgtcaggagcaaaacttgaaggtgtggcaccgcaggactggaagagagtggaacaccttgggtcctgcctgttcagggtactgaggccaagatgagaagtgactctctcaaggtcacacagatagtgatagaacaagagcccaggcttcctgtttccaagtcacctgtgtttcctgggaccaaataatgagcacctgctggagtctgggcagagcagcctggctcccttctaccccagagctcccaaatgccggccttgcatttggagggttcatggcctgtgcggggaggtggggggggggggcctctccggtgcagctttaactgcagccgctctggtaaccgtttatttccccttctgtctgcagccagtcatgtggcatgggagctgtgctggggaggcagtgtagagaggagctgtggggcagccagccttggcaggtgcagtttgcagttcactgcagctccctcccccttttgtttcctcaatttaagcagaggttgtgccagctgtagaaacttcagtccctcaggctggcagccgctgcaggtacctgcctgggggggcctggcagccatagagaaggctgagaggcagaaggacacggggtcttcctgcctcaccaccttgctgtgcatgatgatgctgacccaccccctttacctcccttcccagaactgatacacgggtgctattattcaggaaaaaaactgagcagctctggccagcagcaaggtttcttctctactgccccaactattgtgtggcctcttgtgctgaaatcggcttctctggcttcagagcctgaaacaaagagaaacaggatctgtctctacccagcacagcaaatggttgtagtaattgccaaagccctcataaacccctccggcttgaggagagtgcaatcatggctctgctgcctgcacttgctgggttcctcccctctgcctcctttcttgaactcagaggtagggactaagcaccaggtgccagcaggccctcctgctgtggccactccagagtgctccgtgtctccatgtgtccgtggcctgccccccccaaccccccaaatccagtgtctggcaccgggtttggcagtcaactccatgctgtgcatgtttcccaccccgtgccttagaagctgaaggtgctttttcatcagaaccttaacatggctgttgatggtaccctggctgcagcccagcgggggctggagaggcaggggagggcagtggtccttccaaatagaagtcctggggcctggccaggccagggtttgggcctaatggtttttactaaattactcccctcctgctctccgagaaaggggagccagagccgctcactgtggttctgttccgaccttgaaggggcggtattggcctggcttctggaatggacagagtccaccaggaaagactgggggcgggaggagctggggaggggccctgtctgcggaaggtaggattagatcattagctcagtgacctcctagggtttcgatgtgctgtgttctcatcctacagctggtttggtaatgatctgcaagtcccggagagcaacagcacagctccgcctgacgctctcattaaaatccatgcagccaagctctgcgctttgtagcagccggccttgcagagcctcctcagcttggggggctggggacccagtcagctgagaggtcctctaggctctacttaggcatatgtgtacccaaaaaaaaaatttttttaagcatgcttcttttaaacccagagccctttaaaataataaagaacccaatgcaggtgggtgtgtttgtggaatcccgtaagcgtagaataccgagtttagtgactatttaaactgggctgaggctggtaagactataaagcagtggcccataaggactcttaagcatgaggccaaggagccacgtcccttcccagtctgcctggcccaggggggctgcccccattcctggagcccaggggcccagcttgcaattgctagtgtcaggagtgacttgtagctttgccttggttgtgagatgatttcattccaggggagggggcgggggatcccttggaggctcagagcagctggcccaagctgcagctcgtctccagtggaggcttgaatgccctcagaaacgaccctggccaatgtcaccgcagagctgaggcggtgttgtcagggctaatgtgaaatctcttcccgtggcgccgatcctctgactctatagcgccagcttggacagattgaggtctctgtggctttggtgaccctgcttaagcattcccaccgtgtccctgttctgcgctagcactgcctcctgctgcagcccctgacttgacctcagggcctggggagggaagcaccataccagggccaggagctccaactccgacgtgtcagcctctgggggaggggggattaagccttgagcttggctggtgcccattggacctgggaccaggtgttacccagagaggtgcttctgctgtgcttcctgcctccatcactttcctagggcctccatgagggctgagaacagctctgctctgctcctgtattattaacttgcttcagttaactgacttgagaaactaaccaatttttaccttctgcctagaatgatgtacacataggagagaaagctatcatgttcccgaagtgccttgttttctctgatagaaatatatttataaggacatattccaataggctcttggtgtttcccatatcaagatttctgctagctaatgcatagagggaatactgtctaaaaatagaccctttcctcccaaaggttgggaggtaggacctgagcagtggagtgaagccacaccccacaattttttatttatttttttatttttagatagggtttcaggtagatctgcaggccttgaccttactatatagttgaagatggccttgacctcctgacccctgcctcagccatgcctggctaggacagccaaattgttgttgtttcaagtctggtttcatttgcttccctgccgggtttattgtgtgtaccccatttgtactcccaataacctgaagattccatgtaactcttatgtacgcgcatgaatactttaaatgccaaccttttcaatcatttgataaagtctttgtagtcactcagt

SEQ ID NO: 223 - protein, 497 aa, Mus musculus
MPLVTRNIEPRHLCRQTLPSDTSELECRTNITLANVIRQLGSLSKYAEDIFGEICTQASAFASRVNSLAERVDRVQVKVTQLDPKEEEVSLQGINTRKAFRSSTTQDQKLFDRNSLPVPVLETYNSCDAPPPLNNLSPYRDDGKEALKFYTNPSYFFDLWKEKMLQDTKDIMKEKRKHRKEKKDNPNRGNVNPRKIKTRKEEWEKMKMGQEFVESKERLGPSGYSSTLVYQNGSIGSVENVDAASYPPPPQSDSASSPSPSFSEDNLPPPPAEFSYPADNQRGSVLAGPKRTSMVSPSHPPPAPPLSSPPGPKPGFAPPPAPPPPPPMSVPPPLPSMGFGSPGTPPPPSPPSFPPHPDFAAPPPPPPPPAADYPMPPPPLSQPSGGAPPPPPPPPPPGPPPLPFSGADGQPAAPPPPPPSEATKPKSSLPAVSDARSDLLSAIRQGFQLRRVEEQREQEKRDVVGNDVATILSRRIAVEYSDSEDDSSEFDEDDWSD

SEQ ID NO: 224 - DNA, 105736 bp, Homo sapiens
  misc_feature (1)...(105736): n = A, C, G or T/U
tgtgtgcagtggtgtgatctcggctcactgcaagctccgcctcccgggttcacgccattctcctgcctcagcctcccgagtagttgggactacaggcacccgccaccacgcccagctaatttttttgtatttttagtagagatggggtttcactgtgttagccaggatggtctcaatctcctgacctcgtgatctgcccgtctcagcctcccaaagtgctgagattacaggcgtgagccgctgtgcccggccgataatagtttcttctgctgtgcagaagctctttagtttaattagatcccacttgtcaattttggcttttgttgcaattgcttttggtgtttttgcccatgcctatgtcctgaatggtgttgcctaggttttcttctagggtttttattcctcaggctttttttattcagtccactttgcagggtagatcatattctgttcctacttcctaattctgcctgaggaactcctactcacccttcaaaaccccttccaaatggcccttcctctgtaagcctgtcccaatctcccagttaagttctctacttctataagctcatagctcctactgcaatcagtgtcttccgcttttattgtaatttttatgtatatcttctccctcatcagattgggagccactcaagggcagagtctgagtggactgatccctccgtccccagtgccctgcacaagcctggccagggcaggcagcaatgtatccttattaaatgaatagactggaagatgtcatgaagggggtaaaactgaggcaggattttgggctgggtgccgtggctcatacctgtaatcccagcactttgggaggccaaggtgggcagattgcttgtgctcaggagttcaatacaagcctgggaggctgggccgggtggctcatgcttgtaatcctagcactttgggaggccaaggcaggaggattgcttgaggccaaaagttaaagaccaacctggccaacatagcaagacccccagccccacccccatctctatttaaaaaaagaagaagaagaagaccagcctgggcaacatggcaaaaccccgtctctacaaaaaataaataaataaataaaaatttgccgagcatggtggcacgcacctgtagtcccagctacttggaggctgaggtgggaaaatcacttgagtccaggaggtagaggctgcagtgagctgagatagcaccactgcactccagtctggcgacagagtgagaccttgtctcaaaaaaataaaaaacaaaaataaataaataattcaggccgggtgcggtggctcacacctgtaatcccagcactttgggaggctgaggtgggaggatcacctgaggtcgggagtttaagaccagcctgaccaacatggagaaacactgtctctactaaaaatttaaaattagccaggcgtggtggcacatgcctgtaatcccagctactcgggagcctgaggcaggagaattgcttgaaccctggaggcggaggttgtggtgagctgagatggcgccattgcactccagcctgggcaacaagagtgaaactctgtctcaaaaaaaaaaaaaaaaaaaaaaaaattcaagcaggattttgaaggtaggaggaaagagaataacaggtacttactgagggcatagtaccaataaaaacaggctgggcacggtggctcacgcctgtaatcccagcactttgggaggccgaggtgggcagatcacgaggtcgggagttcgagacgagcttggccaacatggtgaaaccccatcttcaaaaaatacaaaaattagctgggcatggtggtgggtgtctgcaatcttagctactcaggaggctgagacgtgagaatcacttaaacccaggaggcggagattgcagtgagctgagatcatgccactgcactccagcctgggtgacagagcgagactccatctcaaaaaaaaaaaaaaagaaaaatcataatcatcagcagcagcatcatcatcatgggaactatcactaaatgtgccatagtgtgatgagtaagagcacagattaagctctaccccttactggctgtgtgagcatgtgcaagttatagaaatctccttgtgcctcagtttcctcatctgcaaactggggttagtaataatatctaccgtatcaggagttaaataggtaaatatatgcaaggtgctgagaactatgccaggtacacatgggcactgtgtatttcctatcactgttattgctgaacactttggtcctgccaggcagttttatctgccatctcacttggtcctcacagcagcctgagagacagggattattgtccccttttacaaagaaatgaggcgtaaacaggccaggcagcttgctaaggtcacttgctgggtaagtggcaggaatgggatttgaacctaggcttcttctgcccctcccacccaccccatttccctgactgtggaacctgcctgaaggaggaggaggaggaggaggaggaggaggaggaggaagaggaggagatggcatagtgggaaggcaggnnnnnnnnnnnnnnnnnnnnaggaggagatggcatagtgggaaggcagggaggcttcaccgagctggggccttggaagcagagcagcaggcattttttccagagctttcatttccgtctgcttcttctaagcaggtgaaaaaccccacagaggacccttccctgagtacccccgcccccaccctatttcctcccccacccagcactgcctctgtcccccacactgggagcggggaggtcaggcatgcagcgtgggggatgcaggggaggggagtgaggaggtgggggagcatcattccagatccttcccctcagcaaccctctcttccccatcaaaggcgctcagggaggagagagcattccaggtggaaggaatggcaaatgcaaaggctgcagattaaggatgtggaggtggggaaagcctgcgagcttggctggaaccgaggttcgtggccccctgggattgctcagtgaagaacttgcttgacgagagaaagagagagagagagagagactgtggacctagcaagagctgaggatgccagagggaggggggtgacctggagatcattctgggctctgagtacagtgctctccacccttctcccctcagatgggggtcagggagaggggaggggtgattcttcctggtccctatgctttgttgctccccctggaattccttagctgactgcactctgtcagttccgtacccagtgctggctcatagctttttaacacattctctcattgcatttgtattttctcttcagctccatgagactagttttattcactccattttataggttagaaaactgaggctcagctaggttgtttttttgtttttttggttttttttgtgggggcggggcggggaacggagtttcactctgtttggctggagtgcagtggcgcgatctcggctcactgcaacctctgcctcccgggttcaagcaattctcttgcctcagcctcctgagtagctgggattacaggcgcccaccaccatgcccagctagtttttgtatttttatttttatttaagaaaaaatgttttttgagccggagtctcgctccgtcgcccaggctggagtgcagtggcatgatctccgctcactgcaaccttcgcctcccaggttcaagcgattctcctgcctcagcctcccgagtagctgggactacaggcgcgtgccaccacgtctggctaatttttttgtatttttagtagagacggggtttcaccatattggccaggatggtcttgatctcttgacctcgtgatccgcctgcagctgagattacaggtgcctgccaccacgcccagctaatttttgcatttttagtagagacaaggtttcaccatgtttgtcaggctggtctcgaactcctgacctcaggcaatccgcccgcctcggcctcccaaagtgctgggattacaggcatgagccactgtgcctagccctgttttttacatttttatctatttatttatttattttgagcctaggttaggaaactggctaattcttgtatttttgatagagatggggttttgtcatgtcacccaagctggtcttgaaccccaggctcaagcgatccccctgccttggcatcccaaattgttgggaatacaggtgtgagctaccatgcctggccctttcccctcatttgtaaaatgaggatgataataacaggacctaatttataggactgaggctgggcgcagtggctcacgcctgcaattccagtactttgggaggccgaggcggacagatcactggaggtctggagttcacgaccaacctggccaacatggtgaaacctcgtctctacaaaaaatacaaaaattagccaggcgtggtggtgcaagcttgtaatcccagctacttgggaggctgaggcaggagaattgcttgaactggggaggcagaagttgcagtgagccaagatcatgccactgcactgcagcctggacgacagagcaaaactgtgtctcaataaataaataaataatttataggactgatataaggattgacgagttaatgcatgtaaagcaatttgcacattcctggcatgtagcaaatgctcactaaatgttggtccttattaatattaccactaaatgcacaataccacctcccactctgaaagcaacttctttatctgcattgcctaaaaggaaaaattaaggctcctattttgggacaaccttcaagcaatcactgtgctaagtgtttcatatttatgatcacatttaatttgaacatatctggaaaataaaaacaattatggccaggcctgggtggctcacgcctgtaattccagcactttgggaggctgaggtgctgagtccaggagtcctagaccagcctgggcaacacagcaagaccccatttctattttttttttgagacaaagtctcactctgttgcccaggctggagtgtagtgctgcgatnnnnnnnnnnnnnnnnnnnnnnnnnnnnnnnnnnnnnnnnnnnnnnnnnnnnnnnnnnnnnnnnnnnnnnnnnnnnnnnnnnnnnnnnnnnnnnnnnnnnnnnnnnnnnnnnnnnnnnnnnnnnnnnnnnnnnnnnnnnnnnnnnnnnnnnnnnnnnntgttagccaggatgatctcgatctcctgacctcgtgatctgcccgcctcggcctcccaaagtgctgggattacaggtgtgagccactgcgcctggccgacccccctctctattttctaaaattattaaataaaaacaattatgattttcattttatcgataaggaaattgaggctcagagaggtgaagtcacctgcccaaagtcacacagctaggaagtggtataatagtgattcaaatccaggtttgtctggctccaaagtctcgtatgacaattcaggccgggcacagtggctcatgcctgtaatcctagtactttgggagactgaggtgggaggatcgtttgagcccaggagtttgagaccaagctgggcaacatagggagacttcatctctaaaaaacaaaacaaaaaaaatcagccgggcatagtggcatgcacctgtagtcccagctatttggggggctgaggtggaaggactgcttgagcccaggagttcaaggctgcaatgagccatgattgcaccactgcaagccagcctgggtgacagattaaaatcctgtccaaaaaaaaaaaaaaaaaattaagttcagatgacaacttgtccagttcatggatgtctgtatcagcttgaacccaaaccatctgctccaactgctgcctcaggctcacttccctccatgctgggaagaccaagcattgtttaccgagcgacttttatatgccagacaatttacatatatttcccattaaatcctcacccccaccttatgaccctctattgttatccccattccttagaagagtagctgagacacagtgaggtttgatgactgttcaggtcacacaatcctcggtgagttggcagagctaagattcaaacccaggtcggtctgcctcaaagcttgcattctttcagggactacgagaaaagtacagagacccttggtgaacagcactactttcttatctatttatttatttattacgtttttaaataaatgagatggggatcttactttgttgcccaggctggtctcaaactcctggcctcaagtgatcctcccaccttggcctcccaaagtgctgggattacaggccagcccccactttcaaagctgggtttcctcccctgtaacatcctcagtcattcatcaacaaccatgatacttttcctggtggcccacaggccctgagtgctccacccttcctccccactgccaccacccccatgggcttccatgcctttccacaccctttcccttggcctgcaacacttctcccaacctcttgctcattcaagaatggatgaaccccaggccaggtgtggtnnnnnnnnnnnnnnnnnnnnaccccaggccaggtgtggtggctcatgcctgtaatcccagcactttgggaggccaaggcaggtggatcacttgagatcaggagtttgagaccagcctgggcaacatggcgaaaccccatctctactcaacatacaaaaattagctgggtgtggtggcacacacctgtaatcccagctactcaggaggctgaggcacaagaatcgcttgaacctgggaagcggaggttgcagtgagccgagattgtcactgcactccagcgtgggttgcagcctgggtgacagagcgagactgtctccaaaaaaaaaaaaaaaaaaagagtaaatgaacccccattcatcaactcacctcagacatcatctcttcaggaaagtctcctttgaccccaccccatcccctgacattcactctcataaacacattgcactttaccttctgcttccttatctcagtttctgtttttgatttgtctgatcacttggttaacaactttcttccttcccagactttaagttccatgagggtctgagtctgttttgcttgctattgtagctacgccactgtcaggctgccctctatgtggtgggtgcttaataattttttattgaatggatgaatccatgaatgaataaatagctaccaggcactttatacacatgactcattaacgctacaattaactaattgaatcctcacaactgcccttttgtcatcatttcagagaagaggtaggtgaggctcagagagctagaaagtggtggtgctaggactcgatctcaggtctgcttaaccccaaagccactgctttctgcacagctgcctcccagcacccaacagccacagccaggatttaaatagtccttggttgtcagaccacatgtcccagtttgagcccggaggacaccaattcggatggcaccagggccctgctggcaccacccccttggctgtctctgcccttctgaagtcttaggctgcttcccctcccactcccttcttggcctccttcctttccagggagggaaaaggactaggaattacagccaagcagctcttctgggaaaaacaatcctgtggtgaaaagagccctgttctgagagcagagaaacctggatttaagtcctggcatggaggcggccctgctgagggctcacagtggcatcacggcccccctctgagcctctgcgtcctcgtttgagattctgtgtaggttctcaacccatctgtcacccccttttcacgtcctgactcctaggaccccagaaacagcctgggcacacccctagtgtcacttttcctcaggaaccctggtggttaacaatagctggggggtggtctgtgcccaagtctacattgatcagagagatgagggactgacctggcacccttaagacctttcctggaatgctaaggggatgggtgagggaagagtggaggggaggggagggaagtcattctcatatgataccaggcctgaaagggagaaatacaggaatggaaaccaaaagaaacaggtttgagttccggggctgtttcaaagtccctgaaggaccctgggtaagtcatgcaacttcagaaagactcagttttctcttctgcaaaaatgagggtaatacctgccatacagggttgccctagagaattaagtgaggtatctttgctaacatgttaatttgtcacatttctatctagctgtggcatttttttttttctttttgagactcgctctgtctcccaggctggagtgcagtggcatgatcttggctcactgcaacatccaccaaccaggttcaagcgattctcctgcctcccaagtagctgggattacaggcgcgcaccaccacgcccagctaatttttgtgtttttaatagaggcggggtttcttttttcttttttggagacagagttttgcccttgttgcccaggctagagtgcaatggcgcgatctcggctcaccgcaacctctgcctccgaggttgaagcgattctcttgcttcagcctctggagtagctgggattacaggcatgtgccaccatgcccggctaattttttgtatttttagtagagatggggtttcaccatgttggccaggctggtttcaaacacctgacctcaggtgatccgcctagaagcggggtttcacttggccagactggtcttcaactcctgacctcaagtaatccgcccgcctcgccttggcctcccaaagtgttgggattacaggcgtgagccaccgcgcctgggcgttttttttgtttttttgttttttttgaggtggggtttcgttcttgttgcccaagctggagtgcaatggcgtgacctcggctcactgcaacctccgcctcccgggttcaagcgattgtccgcctcagcctcctgagtagctgggattacaggcatgcgccaccacggctggctaattttgtatttttagtagagatgggggtttctccaagttggtcaggctggtctcgaactcctgacctcaggtgatccgcccgcctcaacctcccaaagtgctgggattacaggcatgagccaccgcgcccggacagctgcagccttttataatcaacaagacgagcatattccccactcatgcatgagtcctcaacaaccactcccgcatgtgaggcacagacgactgctcctattttgcagaaggacaaactgagacccagataaattctggaagttgtctgaggtcgcagagtgaagtggctgaaccagggttccgctcacttgaccatggcttttcagtactatcccccattcccaggacccgggccttgccccggatggactgtgcaggacgggatagagcttgtgactcactctccccaccctactttctgccctggctgagaccggagtgaagggacaacactatgcgcaacttgaggggtgtccacagaaagtttacgggcttggccccttcctttcactaaatctagcggttctttcaaggctaacaagaagaattcttctttcaacacactttgtacgagtttttacactttcttaggtgagctttccctactttgaacttaggagtcggtttaccttaatctccgccccccacttcacttggtttgcaccccgctgtttactccgattgcggaagtcgcccgggtggagctctggggagggtacccgtgagtacgtcttttgcgtagttatttaactggcgttttactcaggccaatggaatgccccgaagccccgggtgggtggggcagtgagccaatcagggccattggcggggtgtggctgccgcccagggcggggaatcgcgtaatggcggacacaggcagggcgagcgcggctgggggcgtagcgcgctgagggggtccggccgtttggcagcccgcgaggcggtccgcgggagcacactctgtgcggagactgggcggccggccgacccttcctgtcgctgacggcgactgcgggaggccaggtgagcaacaagtccccttgggtagaccccgctgggaggcgcgggccccggccgggccgctcttcccgagccgtgcagggtctcgggggactgggtgccgggactcctactgcggactggcagaggccgggcgagcggtcagcgcggggtggcgtcttagtccaccccaccccctcagggagggagggagtgacccgaagtccccttcggaaacttggaggggtccacaagtctgagggactatgagtgtcccggcctgacctggttctgccatcagctcgctgtgtgatcttgagcaagtcactttcctctctaggccttagtttaccccctgtgtaaaacgagggtttcgtcggcagatgtatgtacaggagttgggtcccagctgttgtctgagatcttggacaagttcttccccaggctgagcctcagtttccatctctggaccatgaagtaattgaggtgctcgttgaggccccggcctgctaaattgaggaggacactgtgtgtgtgtgtgtgtgtgtgtgtgtgtacgtaccatgaagtaattgaggtgctcgttgaggccccggcctgctaaattgaggaggacactgtgtgtgtgtgtgtgtgtgtgtgtgtgtgtgtgtgtgtgtgtaccatgaagtaattgaggtgctcgttgaggccccggcctgctaaattgaggaggacactgtgtgtgtgtgtgtgtgtgtgtgtgtgtgtgtgtgcgcgcgtacaggatagtctgcagagtaaggaggagagttgtctaaaggggctgttccaaggaggacgtgggtgctacccagaccatgatggggtgagctggggtcctcttggttctccaggaatcctagagcctctgagagggaaagttttaatatggttgtccatagaaccggagaagaggaaggactccttggagccccttggggctctgattggaatttaggtccagaattcaggagggttagaaggaagaggaagaacttttatggcagccctactaggtgtcaacccttgcttaggcatatgttcttatttttttacagtgactcttgagaatttacacataaggaaactgagtttcagaggagttaagtaatttgcccaaggtcgcacagtaaagggcagaggttacttaactaaattgtttcctctgagaatcactgggcaagggggaagtcactgcccactcaaaagatagtgttagggaagtttgccttgttacaaatgggggcagaggtctggcctcagatatgtgatttgacttctggcatggggacagtcttgatctctggaaggttaattataagtccagcccctttattcagtctgtaagttggaaagaactatttgtaagtcgtaaaagtccctttgaagtgtgtgtcaggacctcagagagctccatttgaatcctggtagggttgcctgtagaaaaagttcagcagctattggtgtatatagactagactttggttcagagtggtgccagcccattcgcttcttctcctccatcagagggccacattttcttgggatgggagaaatttcccatttgttcaaatttctttggatttcttgggtgaaaggttcaatagcccacctctgattaagcttaatatccctttctttgtgcaacctgttttttgacttctaatgagtgaagattgtggatttggggtaggcggtagttgggtgcaataacttgctgcccttaatttttccaaacctcagagcttttggttaatcagaatagtagggacggctatgggtattgttctcatatgtcagtagtggagaagaaaattggaagaggaagttactgagaaagagggcgtttcttagcagtggagccagtatgtatttctttgtttgaaattctaaaaccagaaaagcagcaactacaggaggaaggaaggaaagaactgtgaaactttttcctgttcagatatctttaagagctgttcctgtctctatccatgtcccaggctctactttcatagaaaaagtcaattgtaatttgttcagttttcttctagaatgaaataattttaaatcttaaaccctctgagaatagttgtttaaaaatcagagcattttattgagtaaattatttacaatggattattctttttctcagcatattactaatttggtcttatatataaaatatatgtataacataataagaatataaaataaatatataatatataatatacattatataatatgatatacattatataatataatgatatacattatatattgtataaaatatatattatatattatataaaatatatataatatatattatataatatataatatatattatatattgtataaaatatatataatatatattatatattatataaaatatatataatatatattatatattgtataaaatatatataatatatattatatattgtataaaatatatataatataacatatattataatattatataatatatatttatataaaatatatttatataaatatatatttatatttgtatatatattaaatatatatatttatataaaatatatattataggccgggcatggtgactcacgcctgtaatcccagcactctgggaggccgaggcgggtggatcacgaggtcgggagatcgagaccatcctggctaacacggtgaaactacgtctctattaaaaatacaaaaagtagccgggcgtggtggcgggtgcctgtagtcccggctactcgggaagctgaggcaggagaatggtgtgaacccgggaggcggagtttgcagtgaaccgagatcgcaccactgcactccagcatgggcgacagagcgagactccgtctcaaaaaaaaatctctctatatagattatattatatatataatctatattttatatatatgttatatataatatatgtaacagattatatataaaatttatatataatatataaatgtagattatatgtaaatatatagattatatataatatatatcatctataatgtatgagttatatatgtaaaatataatctatatattatatatatatcagtcacccaggctggagggcagtggcgtgatctcggcttactgcaacctccgcctcccaggttcgggcgattctcctgcctcagcctcccaagtatctgggactacaggcatgcaccgccacgcctggctaatttttgtatttttagtagagatagggttttgccatgttggccaggctggtctcaaactcctgacctcggttgatccacctgctgcggcctccggaagtgctgggattacaggcgtgagccaccacgcccagctgagtctttagctatattttaactgtgatttcaacctaaggaattgatctagatattagaggatgcaaatatcaccgtcacttgaaaaacacataataatgtgtttggcttttgacatgttaagtctttttatgcgttattttccaggattgtgtgtatgtgatagttgtgaagacactgaatttattgcacgtgaagctctattaatacattcattcccaatatgttatattttctgtaaaataattagtcttaattagtataccggtccacagtaccttattcaaaatccttggcaccaaaaaaaaagttcttgggaccaaatgtatatctgaatttaaaaatttttggattttggggttttagaaaagaaatatggtactatgtgttatgtaatacnnnnnnnnnnnnnnnnnnnnnnnnnnnnnnnnnnnnnnnnnnnnnnnnnnnnnnnnnnnnnnnnnnnnnnnnnnnnnnnnnnnnnnnccttatgtcatttcttgtcaggttttgcctccaaatgaataatgaaaaatttatttttcacagcctttgcattttgcagataaagtgaagggactgtagatctctataggtaaaacttacgtgataggccaggtgcggtggctcaagcctgtaatcccagcactctgggaggccgaggcgggcagatcacaaggtcaggagttcgagaccagcctgaccaacatggtgaaaccccgtctctactaaaaatacaaaaattagccgggtgtggtggtgcacgcctgtaatcccagctactcaggaggctgaagcaggagaatcgcttgaatccgggaggcggaggttgcagtgagctgagatcacgccactgcactccagcctgggagacagagcaagactctgtctcaaacaaacaaacaaaattacatgataacaagagcaattacaaggaaaaatattgtatagtccagttaatttcaaagtcatgtgtcctaaaaacaatattacatagaagacagacaccttttgttgtttctgtcatacagaaatcttactgtgattaaaatgtgcctgataagcatttttccttaagtaccacaatttatgctttaatatcttcactagtctctgaaattttagaatgacaccctccacctcttttgtttttaattttaaaaattttatttcttttattttctttttttctttttttaaacagtagagatgggctctcgaaatgttgccaggctggtctcaaacttctgccttcaagtgatcttcccgccttggcctccccaaagtgttgagattacaggtgtgagacttcatgccctgcccccacctcttctttaaatagtaatttgtagggtctttgctcatcattttttgtatagcatttaagagaattgtactttttgcatataattcagagaaaaacaaatcaaatgcagatctgtagattcatgtttgccaattttttttttttgagaccaagtttcgctcttattgcccagcctggagtacaatggcgcaatcttggctcactgctacctctgcctcctgggttcaaacaattctcctgcctcagcctcctgagtagctgggattacaggtgtctgccaccacgcccggctaagttttgtatttttagtagagacggggtttctccaagttggccagggtggtcttgaactcttgacctcaggtgatccacctgccttggcctcccaaagtgctgggattacaggcattagccaccacacccggccatgtttgccaaattttaaagctgatttttttcctttagagtattctttttttttttgagacagagtctcgctctgtcatccaggctggagtgcagtggcgtgatctcggctaactgcaacctccgcctcccgagttcacgccattctcctgcctcagcctcccgagtagctgggactacaggtgcccgccaccatgcctggctaattttttgttttgtatttttagtagagacagggtttcaccttgttagccaggatggtcttgatttcctgacctcatgatccacccacctcggcctcccaaagttctgggattacaagcatgaaccaccgcgcccggcctagagtattctttagaatgaggtaaaaactgtcaatgggatttgggtcaaaattttgtttatttttaatttatgaagcttccacaatttgcacatcttggtgtaaggagtttactaaaatacatttaattttgagtatttttattttaagtgtatgctatatgagaaacttctgtttaccagccatatgaatttgggtggtttctttaaatggccaagggcctctactagcacattttcaaaactcaggctactcttagttttctcggacatctctactgtagagtgaggtggactggtattgttggaggatgaagaattattttttctctttagaagaaagccccatgacagcatggatttgtggaattttgtcctttaagaaaccaagtagctgcctggtttgagggcctgaattcagccacctacttggggtggctccatagttcctaagaatggtaccttcactgttttggagatacaaagaataagaaactgtatcaagagttgcaggtggagtcagtgtgtgattggactagggaatgggaaaaattattgttattatttgagacagggtctcactctgttgccctggcttgagtgcaatggcagtatcacagctcactcactgcagcctcaacctcctaggctcaagcagtcctcctcttgccttagcctcccaaatagctgggactacatgtgagcgctaccatgcccacccaatttgttaaattttttagagacgaggtctaactatgttgcccaggctggtcttaaactgagctcaagccatcctgctgccttggccccctaaagtgctgagattacagggataagcataaaccaccatgcccagacccctcaccccctttttgttgttgttgtttgagatggagtctcactctgccgcccatgctggagtgcagtggcgtgatctcggctcactgtaacctctgcctcctgggttcaagggattctactgcctcagccttacctagtagcagctgggattacaggtgcgtgccaccatgcctggctaattttgtttttgttttccgagacagagttttgctcttgctgcccaggctagaacaatggcatggtctcggctcactgcaacttctgcctcccaggttcagggcgagtctcctgcctcagcctcctgagtaactgggattacaggcatgtgccaccatgcctggctaatttttgcatttttagtagagatggggtttcaccgtgttggtcaggctggtctaaaactcctgacctcaggtgatctacccgcctcagcctcccaaattgctgggattatgcatgtgagccaccacgcccggcctaattttgtatttttagtagagatggggtttcaccatgttggccaggctgatctcgaactcttgacctcaagtgatttgcccacctcggccttccaaagtactgggattacaggcgtgagatactaatactgctttaattatggcctttgtattctgcttcattcttgtgtgctcctcttccatttcatggtccgaccaggaatacttaagcagcatccctggttgccaatagcaccccctctgccccagttgtgataaccagaaatgtctccagatattgttacttttatcctggggggatagatttctccctgttgtgagctactgtatcaataggggtaggagtggtggagcaatagaggaaagtgattatagatgtcctcaggtgcatgttctcctttttctccttctttctggttatgcagttcctgtccctgactttggataagaaaatgagaaaaatcaggaggtgaccatttaaaaatagccccattatttttattctgttcaagttttattttatttggtttaaatatattagagcaggacagatagctgaattatttatgcagatctatgtaaatttaatttctaccactgattaagattacatagagtaaagaactactggactattactacctaccttgcatgaaagactgtttctaagaaaagctcatagctgaaaagtttaacacttaaaggataaccagcattgcttatataaagaacttgccagaacttgtcaggattcttgctaatttttgagcttcatggctaagatgtatctcttgatgtccccgcataaacacttcataactccaaaaaacatgtttagaatgggcatgcttttctaagctcagtattttttgtgacaggcggattggtcaaggcagtggtccttaattcctctgggcattcataaattaatgacaaggtagtggtaacatttgaagacttcattctcttttggccaactctgtacaatataacattataatcattcatgtcttagtcaccattaaggtaaagttgaatgagtgttttttcctgttctgtttgaagttatgaatggtactttacagaattcaaatgtatagttatgaatagtatctcagaatagttaccatttatgcaaatgaaacacacttcttaacttagaaaccaaacagaattgaattagaaaagagaagaatagaaacaagaattgttgaatgcttgctgaagaaataatgttcagatatagaagtatctcagaaaaatttgcttttcatgatgatttccagactaataaataatttgagattgataggagaggctattaaactttgcctgtgatatttcttttcaagctctgtttttctttctggtaaaatacagagaagtctgagatgtactctcagctgtaagattaattccatttgaacaaaatagtttctttttttttcttttttcttttttttgagatggagtcttgctctgtcgcccaggctggagtgcaatggcccgatgatgttggctcactgcagcctctgtgcacgccctccctgctcaccccaggctcaagccattctcctgcctcggcctcctgagctaagtagctgcgattacaggcgcccacccccatgcctggctaatttttgtatttttagtagagacggggttttgtcatgttggccaggctggtctcaaactcctggcctcaagtgatctgcccacctctgcttcccaaagtgctgggattacaggcgtgagccaccacgcctggccccaagtttcttattttgagaatacagaaggctttttgagaaaaagcagtggtttgactcatttccaatttgagtgaacatgtgtatgtgtatacacacatgcgttatttttttcatacggagtctccctctgtcgcccaggctggagtgcagtggcgtgatctcggctcactgcaacctccacctcccaggttcaagtgattctcctgcctcagcctcctgagtagctgggactacaggcgcgtgccaccacgcctggctaattttttttttttttgtatttttagtagagacggggtttcaccatgtaagctaggatggtcttgatctcctgacctccacacatgcattctttttttgtttttttgtttttgttttttgagacagactctcactctgtcacccaggctagagtgcagtggcgtgatctcggctcactgcaagctctgcctcccaggttcacgccattctcctgcctcagcctcccgagtaattgggactacagggaggagctgggagtagctgggactacaggcgcctgccaccacgcccggctaatttttttgtatttttagtagagacggggtttcaccgtgttagccaggatggtctcgatctcctgacctccacccgcctcggcctcccaaagtgctgggattacaggcgtgagccaccgcacctggcccaacacatgcattcttaaatatgtcgtgtggcttgtgtgaattttaagctttgtaattgacatagtaaagtaacaagagcagttcatttactctcaagtattttgatttgaaacctcctctccttcctccatacctggcttatgcctttgttctagcaagtactcagtttatttctattttattatattttattttatttttattttcttttttttttagatggagtctcattctgtttccaggctggagtgcagtggtgctatctaatctcactgcaacctctgcctcccgggtccaagcgattcttgtgccttagcctctcgagtagctgggattacaggtgcttgccaccatactcggctaatttttgtatttttagtagagatggggcttcaccatgttggccaggctgttctcgaactcctgacctcaagtgatctgcccaattcggcctcccaaagtgctgggattacagacatgagcctccacacccggccataagtactcagtttaaaaagtttgctcttaaatcaggtcttgagaaattttgtttaactgtgtagaagaaggttttgggtcatgcctattgatactccttttcattcacaattgggaactataagtgaatttccctttgtagaatattgatagtctttaaagaatagtattcctgaataccaacggcatctgtggaattatgagaattataagactaacttcttccctatctttacttttaaagttccttcagcattcattggatgataatttgcaaagcatagtgctccactttgttgtatactattacagacagtccccagcacttgagatatgttagtagctacttttttgtttgtttgtttttttgagacggagtcttgctctgtcacccaggctggaatgtagtggcgccatcttggctcactgcagcttctgcctccctggttccagtgattctcctgccccagcctcctgagtaactaggattataggcatgtgccaccacacccagctaatttttgtatttttagtagagacggggtttcaccatattggccaggctggtcttgaactcctgacctcaggtgatccacccgccttggcctcccaaagtgctgggattacaggcgtgagccaccgtgccaggccattagtagctgcattttatagataaagtaaactggttctgagagattaacttcctcaaaattattcaactaaataatggaacatttgaaattgaaatgtcttttttaagatgagatttatatttattttaaaattatttggaatttttaaataataaaatagagatgaggtgtgggtatgttgctaaggctggtctccagcccctggcttcaagtgatcctcccaccttagcctcgaaggtgctgccaagattacaggtgtaagccaccaagcctagccaagattttttttttttttgagatggagtctcactctgtcgcccacactggagtgcagtggcgcagtcttggctcactgcaacctccgcctcccgggttcaagcaattctcctgcctcagcctcccgagtagctgggattacaggtgcctgccaccacgcctggctaattttttgtatttttagtagagacggggtttcaccatgttgactagggtggtcttgaactcctgaccttgtgattcacccacctcggcctcccaaagctctgggattacaggcgtgagccaccacacccggccctaaccaagatttttaaaggtaaaacttatatacagtgagatggaagtatataattagacgagttttgacaaatgtaaacacctatgtagccaacacccacatcaagaaatagaacattttggctgggcgcagtggctcacgcctgtaatcccagcactttgtgaggtcgaggcgggtggatcacctgaggtcgggaattggagaccagcctgaccaacatggagaagccctgtctctactaaaaatacaaaaaattatctgggtgtggtgacggatgcctgtaatcccagctactctggaggctgaggcaggagactcgcttgaacnnnnnnnnnnnnnnnnnnnncgccattgcactccagcctgggcaacaagagtgaaactccatctcaaaaaaaggaaaaagaaatagaatatttttataaccctccaaagttccctccttccagttccccttccagtcaatctccaccattttataggcaaccaatgttctgatttctatccccacatattaaatttacctattcttgaatcatatagtatgcacacttttgtgtctgactttttctgttcaacataaagtttttcacatttgtccatgttaatgtgtatacgaacccaagtcctttgatgcatatctagagttctttccaacaaaccacagctactaatttgcttattcttacatcatatcctttttttttttttttttgctttgctatttgcatgaaatttattttctacttcttttctttctttccttttttattttttttggaggtagagtcttccctctgtcccccaggttagagtgcagtggcaggatctcggctcgctgcaacctctgcctcccgggttcaagcagttcttctgcctcagcctcccaagtctctttttagtagagacgggggtttcaccatgttggtcaggttggtcttgaactcctggtttcaagtgatccacctgcttcagcctcccaaagtgctaggattacaggcatgagccactacacccggcctgcctcccatttctaatatcctagatttatttatttttatttttttttttatttatttattttttttttttgagacggagtctcgctctgtagcccaggctggagtgcagtggcgggatctcggctcactgcaagctccgcctcccgggttcacgccattctcctgcctcagcctcccaagtagctgggactacaggcgcccgccactacgcccggctaattttttgtatttttagtagagacggggtttcaccgttttagccgggatggtctcgatctcctgacctcgtgatccgcccgcctcggcctcccaaagtgctgggattacaggcgtgagccaccgcgcccggccgatttatttatttttaaaatctctttgaagttacaaaagtaatacttgctcattgcaacagattattttttattttttgagacgaagtcttgctctgtcacccaggctggagtgcagtggcatgatctctgctcactgcaacttccacctgcctggttcaagtgattcttctgcctcagcctatcgagtagctgggattgtaggcatgtgtcaacacacccagctaatttttgtatttttagtagagatgggatttcgccatgttggccaggctggtgttggactcctggcctcacgtgatctgccagcatcagcctcccaaagtgctgggattacaggcgtgagccaccgcgcctggccttaaaaagacatttaaaaaaaatctgtactcatatagaagcccctctggtccctttggtcttctgtgatatctttctaggccttctctattttaccttttttgtgctatgatgactacaactacacattctattctaggtacaggtacactttggtttgtacaaggataggataatatgttctgtgtttccaaagctttcataatgacagccagtattttgttgcctttttgtagctgtattcagggtacagtctagggactttgaaacccctttcctatgttaaaacaggtagttttagagctcatcgtttgataattatagtttgaactatttttctgtcactgaattaccttatttttgtctacatggaagctgtttttcacattgctgaacacacagagccttgcaccattgtacttctatgtgttgctgtagagtcatctgcaaactgggaagatttcactattgttttttctagataatttctaaaaatgttaattgtggtacatttcagccttgatcccttggggaccctttgtttatacatctttagagaagggactgtgtcacaactctcttatttctgtttttaaatgaattctctgggggaaaaatagtctacttatttgctcttttcagaagcctctggaagaggtttttttttttttaaattttgtccacttaattctcattataccatgtgatgtagtttgaatatgtatcctctctaaatctcatgttgaaatgtaatacccagtgttggagatggggcctggtaggaggtgtttgggtcatgggggcaggtccctcatgaatggcttgggccatccccttggtgataagtgagctctcgctctgagttcacatgtgaagtgcctgcttgcgcttttccttctgccatgagtaaaagcttcctgaagcctccccaggagcacatgctggcactgtttcctgtacagcctgcagaactgtgagcagtgaaacctctttgcctataaattacccagtctcagatatttctttatagcaatgcaagaatggcctaagacaccatttaccttctcatcagatgtgtatatgtgttacctaaggcctcgtaaacagtaggttttctgtaagcctttgctatattaaacattcaacaataggataatgcctagtattgggttattagtttaacattcaacagatgtgttaagtgcctactgtgtgtcacgtactactaaggatacaactcagtgatcttgagaagaaacaaggtgcatgctctcatgcagtttgggaagccttggatagacagtaaagacataaataaggctgggtgtagtggctcacgcccacatggggaggcgtgaggccaagtattttgggaggctaacgtaggcagatcacttgagcccaggagtttgagaccagcctgggtaacatggtgaaaccccatccctacaaaaaatacaaaaattagctgggtgtgatggtgtgcacctgtagtaccagctgctcaggaggctgaagtgggaggatcacttgaacccaggaggcagaggttgcaatgagccaagattatgccactgcactccagcctgggcaacagaggcagacactctctcaaacaaaacagaacaaaacaaaaagacataaaaagttaaagattgtgatgtatgttagaaaataaaatagggtgctataatagagagtaatagaggaacttagataaggatggtcaggaaaggcttctctgagaaggtgatatactgaaagtgaagaatgaaaatgaaccattgaaatagagaaacgagggaagagagttccagggagaaggaactgttgatggcagaagccctgaatcaggaaaatccttagtgtatcctgagagtgatggaagcctaccatggctatgtattagtgaacggtggtaacaaaatatgtgattggagagatgggtaggagccagatatttcaaagctttttaggactgttaaggagttctgtttatttatattttgagacaaggtcttgctctgttgcccaggctagtggcacagtcttggctcgctgcagctttgaactcctgcctcagcctcctgcgtaactgggactacagttacataacaccacacctgcctaatttttaaattttatgtgtagagattgcatctcactgtgttgcccaggctggtcttgaacccctggcctcaagcagtcctcctgcctcagcctcccaaagtggtgggctttcagatgtgagccaccacatctggccaggagttttgtgtgtattttgttttgttttgttttgtttttgagacaagatcccactctgtcacctaggctggagtgcagtggtgcgatcatggctcactgcagccttaacctctgtggctcaagtgatcctcccacctcagcctcttgggtacttgggactacagatgcaggtcaccatgccaggctaattgttttattttttatttttattttttttttgaggcagagtctcgctctgttgcccaagctggagggcagtggcatgatctcggctcactgcaacctctgcctcctgggtttaggcgcgattctcctgcctcagcctcctgagtagctgggactataggctcatgccaccatgcgcagctaatttttgtatttttagtagaggcggggtttcatcatgttggccaggatggtctcgatcttgtgacctcgtgatccgcccacctcagcctcccaaagtgctgggattagaggtgtgagccaccatgcccagcctaattgttttattttttatggagatggagtctcactatgttgcctaggctattcttgaactcctgggctcaagtgatcctcagcttcagcctcccagagtgctgagattacaggcgtgtgagctactttgcctgggtgtgttttatttttaagtaaatgggaagtctggaagaagtgttttgtttttaaattgaggtgcttgaagatttaaaaaaaaaactttttaatgaaaaaatatcaagcatacatgtaagtaaagagaatgatgtaatgaactcctatgtatctatctcctagcctcaacaagtatcaactcatggccattacaacaggtctttgaataacattattttgttcaccttcattgcgttataatgttgatgagaaaaaaaatgtattcctggccggggctactgtctgtgtagtttgcacgttctccccacatctgtgtgggctttctccagtactttggtttccctccaggtactctggtttcctcccgcatcacagaattgttcgtgtttgatgaattggtgtctctaaatggtcccagtctgagtgagtgtgggtgcgtgtgtgattgatgggatggcatcctgcccagagttggttcccaccttgctccctgggctgttgggacaggctccggccacccatgaccctgaactggaataattaggtaaatacttatctttcttgtttttattaatctttcttaaatgtttgtgtagctcacatttgtttcagtgtttaatattggaagtgttttggtctttctttagaagtttggtgatgttttttgtgaccagaaatatgctataggaacttaactcttgtttacattagactgtggtaaaattggttttgttatacattgttttgcttaaaatagtaatatccaagaatctattgatgagttaagtgaggacttactgtgttgtttcttccaatacccctctttcctcctctgttacaattttttccatgattaacaatgtaactttttttttctttctttttttttttttttttttggccatggagtctggagtcttgctctgttacccagggtggagtgcagtggtgcagttttggctcactgcaacctcagcctcccgagtagctgggactacaggcacctgccaccacgcccggctaattttttgtatttttagtagagacggggtttcaccatgttagccaggatggtcttcatctcctgacctcgtgatccgcccgcctcggcctctgaaagtgctggaattagaggcatgagccaccgctcttggccatttattggctatttatatgtctatttaaatctgttgcttcttttaaaattgggttatttgtccttttattgtattttaatagttctttattccggatacaggttatcagataaattatttacaaagattttctcccattctgtgggttgtcttttcacttttcatgatcatgccctataaagcacaattttttttgttgtttgtttccttttttttttttttttttgagacaaggtcttgctgtgtctcccaggctggaatgcagtggtgccatcatggctcactgcagccttgaatttctgggctcaagggatcctcccacctcagcctcctaagtagctagggctacaggctcacatcttcatgccatactaattttcttcctttttttttttttttggtaaagatggggtcttgctttgttgcccagattggtcttgaactcctggcctcaagcaatccttgccttggcctcccaaggtgctggggttacaggcatgagccaccctggcctgatttccctttttttttttttttttttttttttggagacggggtttcactgtgtcacccaggctggagtgctggagtgctggagtgcagtcgtgaaatctcagctcactgcaacctctgcctcctgggctcaagcagtcctcccatctcagccttccaagtggctggaactataggtgctagccaccatgcctggctaatttttgtattttttgtagagatgggatttcaccatgttgcccaggctggtcctgaactcctgagctcaagtgatccacctgcctcagcctcccaaagtgctaggatcacaggcttgcatcactgcacccagttttgatttacatttttttttttttttttgagttggcgtcttgctctggcacacaggctggagtgcagtggcgtggtctcagcttaccaccacatcagtctcctgggctgaagcaattctcctgcctctcgagtagatgggattacaggcacccgccaccatgcccggctaatttttttatttttagtagagacagggtttcaccatgttgggcagggtggtctccatctcctgacctcgtgatctgcccgcctctgcctctgaaagtaccgcgattacaggcataagccaccgcgcctggccctgatttccatttttaaaagattaatccagttgctacaaagagagtggattatttgggggcaggacttgattgaggtgggttgaacaggctactgcagaaatctaggcagtgatgaaagtttgaactactaggtaggtcgctaaagagatggagagaaatggatgtgtttagtatatattttggaggtagagctgataaggcttgttgatgggttgaatttgtgggtcaaggaagaagataaggattgaacaggccttccttctggacattcttctcttagcttttatgacacaacattgttctggttctctttctgccttcctgatcctcctttgtcagtccctaagttgtctcaggccttgcttctcttttttttgcttttgtattgagaggtcatctactctttgtgtgtgtgtgtgtttgagacaggttcttgcgctgttggccaggctgcagtacagtggcgccatctcggctttctgcagcctcagcttcctgggctgaagtgagcctcccacctcagcctctcaagtagctgggaccacagatgtacaccaccatgcccagctaattttattttttgtggagccaagggtcttgaactcatggactcaagcgattcttccgtcacagcttctcagagtgctgggatcacaggtttgaggctctgtgcacagcctactctttttttttttttttttttttgagacagagtctcgctctgtcgcccaggctggagtgcagtggcgggatctcggctcactgcaagctccgcctcccgggttcacgccattctcctgcctcagcctcccaagtagctgggactacaggcgcccgccactacgcccggctaattttttgtatttttagtagagatggggtttcactgtttttagccgggatggtctcgatctcctgacctcgtgatccgcccgcctcggcctcccaaagtgctgggattacaggcgtgagccaccgcgcccggcccacagcctactcttatgtcttctgttacaaccttcatgcagtaactgccacatctatatttttgcctctcagctccagtaccagaattcctattggaccgcttcactgatatcctacttgcacctccagcttttcatgagctgtctgcttttgagaacctgtggtcagattgtacaggttgtctcctccttgcttgggaggcatgtttactggttttaaggatgggttttataccttttatgtaggttttaatgatgagtcctttgctttagagaagtgcattcccaagaaaatgcatagcactcctgggcagcattttgttcttcagaaccttgtgaggaacacaggttcaatgagaaggttcagcttatctcctgcccaccccactccccagccccccaaatcccctgacttactgctcttcattttgactcacatatttctatttatttattcagtcagtcagtcatttattgaacactattcagggctggtataggtctgccaacatgctaaacattggccccaccattctcccagttcatccagttgtaaaatcttagttactgttgacttctcaactcctgcttgttttcatgcccagacactctcagatccctccctgtcttttcctcccactactgcattttaggtcctgtgttaccttttgccttgattatttatccttattttcatccccctccccagctccattcttttctactaaacttaggtgaggtgtatagtttcttcctaaatattctatcatctagaactccaaatgtgtgactcccaatgcttattgactaaagtacaaactcagcctgatatttaagattctgtggtctagcccctacttgtctttccagctctgtttcccactacaggcgcaataatgcgctcatcttcatttcccaaaaatgtttcattatattctgcctttgtgcttctgctgacactgtctgtacacttcagatataatactccctgtcactacatgtccaaatcctgcctatttttcatgcccagttatatgacactcttctatgatggcttctgatatacttaaaaactaccttgcttatgatacttaaaccgtaacttcacctttttttttttgacacagagtctcattctgtcgcccactctggagtgtggtggtgcgatctctgctcactgcaacctttctgcctctcgggatcaagtgattctcctgcctcagcctcccgagtagctgggactacaggtgcacaccaccacacctggctaatttttgtatttttagtagagatggggtttcaccatgttggccaggctggtctctaattcctgacctcaggtgatctgccagccttggcctcccgaagtgctgggattacagacatgagccactgcgcttggtcaacttcatcactttttaccttgttttatgtttaggtacttttctgatttctcctatatgactaaagtcctgaaacagaaactggttcttgtatttctgtgcatcttctacaatgttagcgcctttgtgctcaatagttactcaataaatatttgctgaatgtgataatgttgtagtgtgtcctggaggcggtacactagatcgaatgatctcttgaagtattagccaactctgtgacttattttcatacatttttgtagattcaaaagctacaagaagtttttatagataaacttgtctgctcatctcgttctttagaaaagtatagaaaatttcaaacatatacagatgtggagagggtgatatagtgaggccttacatgcccaacactcagcttcaacaattattagctcatggtcagtcttgtttcatccatacccctattcgttccctcatcccccttagatcattttgaaacaagtcccagacatcatatcatttaaatgctaatttctgtgtatagctgtaaaaaataaagagactgtttttaaaaaacataaccacactgcatcctgttaatgttcaaatttccacaattaatttctctttctgctctcccttcatccctgccaccccttctctctgaacatttggtttatttgaatcaggtttcagacaaggttgatacattgatttggtttacatagcttctatgtctcctttttttttttttnnnnnnnnnnnnnnnnnnnnnnnnnnnnnnnnnnnnnnnnnnnnnnnnnnnnnnnnnnnnnnnnnnnnnnnnnnnnnnnnnnnnnnnnnnnnnnnnnnnnnnnnnnnnnnnnnnnnnnnnnnnnnnnnnnnnnnnnnnnnnnnnnnnnnnnnnnnnnnnnnnnnnnnnnnnnnnnnnnnnnnnnnnnnnnnnnnnnnnnnnnnnnnnnnnnnnnnnnnnnnnnnnnnnnnnnnnnnnnnnnnnnnnnnnnnnnnnnnnnnnnnnnnnnnnnnnnnnnnnnnnnnnnnnnnnnnnnnnnnnnnnnnnnnnnnnnnnnnnnnnnnnnnnnnnnnnnnnnnnnnnnnnnnnnnnnnnnnnnnnnnnnnnnnnnnnnnnnnnnnnnnnnnnnnnnnnnnnnnnnnnnnnnnnnnnnnnnnnnnnnnnnnnnnnnnnnnnnnnnnnnnnnnnnnnnnnnnnnnnnnnnnnnnnnnnnnnnnnnnnnnnnnnnnnnnnnnnnnnnnnnnnnnnnnnnnnnnnnnnnnnnnnnnnnnnnnnnnnnnnnnnnnnnnnnnnnnnnnnnnnnnnnnnnnnnnnnnnnnnnnnnnnnnnnnnnnnnnnnnnnnnnnnnnnnnnnnnnnnnnnnnnnnnnnnnnnnnnnnnnnnnnnnnnnnnnnnnnnnnnnnnnnnnnnnnnnnnnnnnnnnnnnnnnnnnnnnnnnnnnnnnnnnnnnnnnnnnnnnnnnnnnnnnnnnnnnnnnnnnnnnnnnnnnnnnnnnnnnnnnnnnnnnnnnnnnnnnnnnnnnnnnnnnnnnnnnnnnnnnnnnnnnnnnnnnnnnnnnnnnnnnnnnnnnnnnnnnnnnnnnnnnnnnnnnnnnnnnnnnnnnnnnnnnnnnnnnnnnnnnnnnnnnnnnnnnnnnnnnnnnnnnnnnnnnnnnnnnnnnnnnnnnnnnnnnnnnnnnnnnnnnnnnnnnnnnnnnnnnnnnnnnnnnnnnnnnnnnnnnnnnnnnnnnnnnnnnnnnnnnnnnnnnnnnnnnnnnnnnnnnnnnnnnnnnnnnnnnnnnnnnnnnnnnnnnnnnnnnnnnnnnnnnnnnnnnnnnnnnnnnnnnnnnnnnnnnnnnnnnnnnnnnnnnnnnnnnnnnnnnnnnntggcacattaaaaagataagaagaaacaggaaattgctctgtcacccaggctggagtgcagtggcgtgatctcgatgtactgcaacctccgcctcctgggttcaagcgattctcctgcctcagcctccccagtagctgggactacagtcgcgtgccaccacgcctggctagttttttatatttttagtagagatagagtctcaccgtgtcagccaggctggtctacatctcctgacnnnnnnnnnnnnnnnnnnnnnnnnnnnnnnnnnnnnnnnnnnnnnnnnnnnnnnnnnnnnnnnnnnnnnnnnnnnnnnnnnnnnnnnnnnnnnnnnnnnnnnnnnnnnnnnnnnnnnnnnnnnnnnnnnnnnnnnnnnnnnnnnnnnnnnnnnnnnnnnnnnnnnnnnnnnnnnnnnnnnnnnnnnnnnnnnnnnnnnnnnnnnnnnnntcgggaggctgaggcaggggaatggcatgaacccgggaggcggagcttgcagtgagctgagattgcaccactgcattccagcctggacaccatctcaaaaaaaaaaaacagaaaacaaacaaacgaaaaactttattttacccaatagttgcaaactattatttttttctttgtgtgtgtgtgtgtgtgttttggtttttttttttttttttgagacaaggtctcactctgacacccaggctgtagtgcagtgtggcattatctcgactcactgcaacctccacttctcaggctcaagtgaccctcccacctcagcttcccaagtagctgggactataggcgtgcaccaccaacccagctaatttttatattttttatagggatggggtttctccatgttgcccaggctgatctcaaactcctgggctcaaacaatctgcctgccccggtctcccaaagtgctaggattaccagtgtgagccaccgcaccccagcctgaaaagtcttattattttaacattaatataatgacatataatcaataaaaaattattgtgatttgtttttttcttgagctgagctctcactctgtttttcaggctggagtacagtggcatgatttcagctcattgcagcctcaaccacctgggctcccacctcagcctcccaagtagctaggactacaggcatgcaccaccacacccagctaacttttaaattatttgtagagacgggcttcattatgttgcccaggcttatcttgaactcctggcctcaagccatcctctcacctcagcttcccaaaggctggaatttcaggtatgcaccactgcgcccagcagcatccttttttaatattaaatctttgaaagttggtgctttgcacttacggcacatatcggtttggagtggccctggttttggtgctccatagctgcatgtatgcagtggctcctgttgtgcagtgctcctctagaggcttgaactgaatccggttgcttttttggcaataatacttcataagtggtggtgtattattctgtgaggaggctcataatgtccagatgtctctttttctgttgtacgtggtcatggatgatgattacctagatccatgatttcattaaatgtgtgaaaaatgattagattttaattctatcattcttttttgttgttgtttatcatctggaatacttcaaaaaagaaaaagtttactttatcaactctttggttaccctggggtttgatatgtacaaggaaggcaaggtaaatacttaattcattccctttattctttcatttactagttttcaaaataatgagttggttttcagatatactccagagaggaccagtgactttttagggttttttagggcatgatcaggaacttttaggtgttaacatatttgatgtgttttaatccattgcagttattcttattgatgttaactttgtttcatattggaccagtgggaagttcttcaagctagctcctgattccttttgacataatttcagcagtctttgatagtgttccttgctttctagcacgataatgtgttcccaactcatcttgtacattttctgccctttcccctaagctctggatcctcttattgcgatattgtgtttagagaccacattattagctccctcattttgtaaaagaggcagctgaaggcaagagaagttgagtgatttaactaaggtagcacagatttagtaccgtaatctgccctagaaccgtagccttccttagccattgccattttgtcttgcttcctctgcctagtctctaggacaggtggtttaactacattttagcttatactgtaggggtcatcaggggaagataggttttgtgggtcatcatggaggtagtattaaacctcattaatttgggctaattgggggaaaacctagtgagagtgttgtaggttatttttctttagatgcagctgttactttgagttcatacagtaattgaaactaggctaatagtgttaccaggttattttgttagatagagatccttgtacctggtttaatgaatagctgagaatggtgtgcaaattaactttaattgtatgtaaattagacttgaaatgcttaaaaacagctcattaaacatttctccctgcaatcttatttacactgttttcttagtctttattagagtgcagaggtaaacttcagctcagttctgaatatatctcaactttcatgtgtggagtctatattaataaagtgtggctgtagcgttcagagaattttagaaagatatttgagaagtaaagaggaacagcatctgaaagtcagacatctggcagtctcagccagtcagaatgtgtttccttgcgtctttaaaagtaagctgtttttctcctgctgctttcggaaataaaaaataaaagtaaaggctgtaatcccagcactttgggaggccaaggcgggtggatcacaaagtcaggagttcaagaccagcctggccaacatggtgaaaccctgtctctactaaaaatacaataattagccgggcgtggtggcacgcgcctgtaatcccagctacttgggaagctgaggcaggagaattgcttgaacccaggaggcacaggttgcagtaagccaagatcgtgccactgcactccagtctgggcgacagagcgagactctgtctcaaaatgaataaacaaataaataaatataaaagtaagctggaagtgcttctaagtggtaaagattgttcattttacttcaacagtagcatcagctcaggacctcactcagataattgtgtatattgacacacagaggacccaggtgtatgagggctgactgtgtggcctattgactctgtggcccaaagtgtcatttgacctctttgagctttaatttatttgtctataattaggtagttaaaattgggagtagtaatatatgtttttttttaacctcacagactaattgtaagattcatatcagctaattaatcaaatgatatttattgaattaatgaaagatatgaaagtacttttttttttgagaccgttttcctcttttgcccaggctagagtgcaatggtgtgatcttggctcactgtaacctaacctctacctcctgggttcaaatgattctcctgccttagcctcctgaatagctgggattacaggcacccaccaccatgcccagctaattttttttatttttagtagagatggggtttcaccatgttggtcaggttggtctctaactgctgacctcaggcaatccacccgcctcggcctcccaaaagtgcttggattacatgcgtgagtcaccatgcccagctgaaagtactgtttaaactagaagctttgtatgaccaaaattattattagaataatatagatgaggctgggaggctgaggtgggcggatcacctgaggtcaggagttccagaccagcctgaccaacatggagaaaccctgtctctactaagaatacataattagccgggcgtggtggcacatgcctttaatcccagctaactcgggaggctgaggttgcggtgagccaagatcctgccattgtactccagcctgggcaacaagagtgaaactctgtctcaaaaaaaaaaaaaaataataataataatataaaggaggcatgttaatatatactaatgatcagaagcaggacagcagacaagagattcaagttgtctgtccagaactttgcagacattttactatataggcatatgtaaacctcacacctcaggtgcctctgacagtatcatagtttttttttttttttttttttttgagacagagtctcactctgtcgcccaggctagagtgcagtggcgctatctcggctcactgcaagctccacctcccgggctaactccattctcctgcctcagcctcctgagtagctgggactacaggcacccgccaccactcggctgattttttgtattttttctagagacggggttttaccgtgttagccaggatggtctcgatttcctgacctcaagatccgcctgcctcagcctcccaaagtgctgggattacaggtgtcaccgcatccggccagtatcacagttttatagcagtaccactgcagatgtgaagaccctgagtttctaagaaaaagttaaaatatctataatatattctgttcagaaaataattgatatgcacaatatattttacagattttcattaaaataccttcaaaaagcatagtctctaaataattatttccattatctgacagttttaccttatatgaagtctgccattctctaaaagcagctaacggccaggcatagtggcccatgcctgtacttccagcaatttgggaggtccaggcaggcggatcacttgaggtcaggagttcaagaccagcctggccaacatggtgaaatcctgtcactactaaaaatactaaaattagccaggcatggtggcgcgcacctgtaatcccagctacttgggaggctgaggcacaagaaatgcttgaacgcaggaggcgaaggttgccgtgagtctagatcgcaccattgcgacagagtgagactccatctaaaaaaaaaaattaaaataataaaaataaaagcagctaacacctgcactgaatatcagcaactgttctaaattccttattatatttactctttcatttttctcaataatcttatgaagtaggtgctattattaatctccaatttatagatggggaaactgatatacagagaggttaagaaatctacccaagattctttattgggattctgggttgagggaaaaattttccataaagagcattagtagggaagggtatggtggctcatgcctgtcataccagctctttggaaggccaagatgggaggatcgcttgagcccaggaatttgagaccagcctgggcaacatagagagaccccatctctctctctctttttttgtttttcttcaagagcattagtgagacaacgggtaaaagatacgaactttacattagataataatagtgtgttattgttaaatttcctaatgtgataattgaactgtagtttgtttttagaaaataacccattgaagtatttggagaaaggacatgatgtctacaacctattatcaaatggttaaaaaattaataatagggccaggcacggtggctcacacctgtaattccagcactttgggaggccaaggtgggcagatcacgaggtcaagagtttgagaccagcctggccagcatggagaaaccccatctctattaaaaatacaaaaattcgccgggaacggtggcatgtgcctttagtcccagctacttgggaggctgaggcaggagaattgcttcaacctggcaggcagaggttgcagtgatccgagatcgcaccactgcactccagcctgggtgacagagcgagactccatctcaaaaaaaaaaaaaaaaagtaataaaatagtgagtggccgtgtgtggtagctcagacctgtaatctccacactttgggaggccaaggtgggaggatcacttgatcccaagagtttgagactgcctgggcaacatggtgaaaccctgtctctaccaaaaatacaaaaaataaccaggcctattggtgtgtacctgtagtcccagctacttgaaaggctgaggtgggccaggcgcggtggctcacgcctgtaatcccagcactttgggaggccgaggcgggtggattacgaggtcaggagatcgagaccatcctggctaacacggtgaaaccccgactctacgaaaaataagaaatttaaaaaaaaaaattagctgggcgtggtggcgggcgcctgtagtcccagctgctcgggaggctgaggcaggagaatggagtgagcccgggaggcggagcttgcagtgagccaagatccgtcgtcactgcactccagccggggagacagagcgagactccgtctcaaaaaaaaaaaaaaaaaatgctgaagtgggaggatcgcctgagcctgggaggtcaaggctgtattgagtcatggtagcgccactgcactccagcctgggcgacagagtgagaccctgtcttaattaattcattaattaattaattctgtgtgtgtatgtgaatgtgtgtggagagatgtgtaaagtaaatgtggcaaaatgttagcagttagtgaacctaagtgaagggtatatgagaattctttgtaatattcttgcaacttttctccaagtttgcaattatttcaaaataaaaagtaaaaaccttttttttgttgtttgtttttgtgttttgagacggagtcttgctctgtcacccaggctggagtgcagtggcgtgatctctgctccctgcaagctccgcctcccgggttcacgccattctcctgcctcagcctgccgagtagttgggactacaggcgcccacaaacacccccagataattttttgtatatttaatagagacgggatttcagagtttcactgtgttagccaggatggtctcgatctcctgacctcgtaatccacccacctcggcctcccaaagtgctgggattacaggcgtgagccactgcgcctggccaaaaacttttctaaggttatacagctgaagagtatatttagcagagctgagatttgaacccaggtcatttggtttcagaattcatgttctgaattataggactattttgctctattcacagtgttagataaatgaggtatatctgtactccattttggctatgggactatgattggacgctgaacatggggctatgttaatagctctgcctcctggttcttcaaggatagggtgatcatataatgtgtaaactggttcacttttaagagtgagagaaaatacttttaataatcactctgggatgattgatgtaaaccaaggtgaatggacaccctgaaaggatacctcttggcagagtttagttttcacaaatgtgacaggacatgataattgcttcattataattgaatcttgtttaccatggattcttatttacataatacaagtgcattttttctttcgccaacagaactcaggcctttacctgattcattttcatattctctcgattttgctaattcttttacttccctccagaccactcaggaaatattttttgtcaaacttcatttcctccaagtctgaaaaataccagcaggaatttctataacacttgtcccattaaaaaaaaaattggcatttaaaaccataaatcccaaaatatctttattaacatgatttctacaaggagaggagctggtaaatgcatctgcattactggactggcagagaaatattactgtcatcaacttcctatagatacttggaaataaccttattgtatggtactagaggctgtgttaatgtttgttaaaaaggattataccagtctagaatcaaagcatatgtgttatctcattgatctgttatacttatttgcagtaacactgttctgaagctgcgtccaattagaggttgtccttcattgatagagggctagtatttgtagtcaaatcgctaaactttcaaaattattctaatataatctattgtggatttttaaagatcaaactacctttttgcttccttatacagtatgtatttaaccaagtatgtatccactagggtgatagggggtgggacaggcaaggacactgaaatttatatcagatagccttcctaccagttaactactgtggtataaagtttggaggaagaatggataaaacacatgtgaacataagttttttttaaaccactaaaatgactttccccttaaattatgagatgtacttttatagtaataatagtcttgattacatttttattttttaaaaataatgtatattttatagttcaaagctgtttaaatttcctattcttggtggctgttttctttaaattcagtgaattcctatatttaaaaggatagatgttttatttatgtcagatttatgaatgtggcccagcaggatggctcaatgcctgtaaatcctagcactttaggaggctggatcacttgagctcaggagttggagaccagcctggataacatagccagaccttgtccctactaaaaattttaaaaattagccaggtatgatggcacatacccatattcctagctacttgggaggctgaggcaggaggatcacttgagtccgagagattgaagctacagtgaggtatgatcacaccactgcactgcagactgcatgacaggcacggccaggtctcaacaacaacaaaaaattcacaaatgagaatggcctctgaaacttttttttttttttagatggagtctcgctcttgttgcccagtggagtgcaatggtgtgatctcggctcactgcaacctccgcttcctgggttgaagtgattccccttcctcagcctcctgagtagctgggattacaggcgcctgccacctcacctggctaatttttgtatttttagtagagacagggttttaccatgttggccaggctggtctcaaactcctgacttcaggtgatccgcctgcctcagcctcccaaagtgctaggattacaggcatgagcctctgcgctcggctgccaatttttacaattttttaaaaaaaattttttaattttttattttttttgaggcagaatctcgctctgtcaccgaggctggagtgcagaggcgtgatctcggctcactgcaacctccacctcccagtttcaagcaattctcctgcctcagcaccccgtgcagctgggattacaggcatgcaccaccacgcccaactaatttttgtatttttagtagacggtttttcaccatgttggccaggctggtctcaaactcctggcctcaagtgatccacctgctttgatctcccaaagcactggaattacagtgagccactgcccccgacctaatttttacttaatttttaaaaatctttatttttgaggaaaactacaaatatttgttatctttaactgggatcaaccatgcattaatgaaaatgaactattaaaataataaaataaatacctatttgccttgaattaccaattttatgttttttatttgacataggaaatcaacaaggcctttttttttttttttttttttttttaagaatctcgctctgtcacccaggctggagggcagtgacgcgatcttggctcattgcaacctccgccgcccgagtttaagcacttctcctgcctcagcctcccaaggagctgggactacaggtgcaggccaccatgcctggctaatttttttttgtattttagtagcgacagagtttcgctgtgttacccaagctggtcacgaactcctgagctcaggcaatccgcctgtctcggcctcccaaagtgctgggattacaggcatgagccaccgcgcccggccaacaaatacttttgacaacacagtgtgtgcaaaagacacaatctcctgtccaaaagaaacctatattctgagaacacagagatacgttaaaatattgaaatattaggctgggtgtggtggcttatgcctgtaaccctagcactttgggaagtaaaggtgggaggattgcttgaggcccaggaatttgagaccagcctgggcaaaatagtgatacctaatttctacaaaaatttttaaaaattagccaggagaggtagctcacacctatagtcttaactactcaggaggctgaggcaagagggtcacttgagcccaggagtttgaggctgcagtgagctatgattaagccacagccctctagcctgggcaacagagtaagaccccgtctcttaaaaaaaaaaaaaaaggtcacaatattgttgaatcccagatctttatgtctggattatactctgccattattccattcttccattcttctatccgttttgtcttaataacaataatttttactaatccacctcctgggcccaagtgatcctcccaccttagtctgctgagtagctgggactacaggcgtcagccaccatgcctgactaagttttgtaagtttttgtagaggcagagttatatcatgttgtccaggctggtcttgaactcctgagctcaggggatccacctgcctcagcctcccaaagtgctaggattataggcatgagccactgctcccgaccctactaatcaatttaataaatactgtgccagttaatttgaggacttacataaaaatggacaagctcctaggaaaagataacttaccaagatgatgtaagaaaaaaatagaaaacctggtctggcgtggtggctcatgcctataatcccagcatattcggaggccgaggcaggtggatcacttgagttcaggagttcaagatcagcctagccaatatggtgaaacaccccatctctactagaaaaaaatacaggcaggacacggtggctcacgcctgtaaatcccagcactttggggggccgagacgggcagatcacctgaggtcaggagtttgagaccagcctggccaacatgacaaaacaccatctctactaaaaatacaaaaaaaattgccgggcgtggcggcggacggacgcctatattcccagctacttgggaggctgaggcaggagaatcacttgaacccgtgaggcggaggttgcagtggagctgagatcgcaccattgcattccagcctgggtgacagaatgagactctgtctccaaaaaaaaaaaaaaaaaagagaaaacctttaactattaaataaatggaagttttacttaacttcttccagaggaaagcaccatgaccaaattatgtatttatttatttattcctaaccactagggaatatccaaataattttccagttaaatttgatcactttcaagatacagcctatagttttaaaatcagttctaaatttcactttccatgttgttgtcccctacattaaaatggtgaactatggtttacatttttacttcctggcctatctgatatggacctctactaaggggacccagttgtcctgttttctttttcattagctcctactccttatctccttccttgctttttctctgattttttttcttcatagtctgcaagagtcagaaagaacctttccattgttgttttttttttttttttttttagagtctcgctctgtagcccaggatagagtgcagtggtgcagtctcagcccactgcaagctctgcctcctgggttcacgccattctcctgcctcagcctcccgagtagctgggactacaggtgcccgccaccacgcctggctaattttttgtatttttagtagcgatggggttttattgtgttagccaggatggtctcgatcttctgacctcgtgatccgcctgcctcggcctcccaaagtgctgggattacaggtgtgagccactgcacccatcctaaccttttcactgtttagagatttgtttcccagtagatttatgttcatctttctgtccatttatcaggaattttatgaagatttgatgagtgacagaagggctgcttagcaccacaggatttaaaagatagtaccttccctcaaagagctcacagtcttcatgttccaactgtaatatgggatggattctataataaagtaataatagagttctcttggagtagatgaaagcttgattaattttttctggggaatggggtcaggatagcttcatggaagcaattacacttgaactgggccgggaagcgttaatcacattctaagaagcaggaaaaaaacaaaaaggtaagtaatccaggaagtggcaaatgtcttgagtgaaatcacagagacattggagtgcagggcttctgtggtgagcagtgagtggctgcaggctagagcattggaaaggtgtggccagagatgaggctaaacaagtatgttcgtgtcagttagtgaagggccttaaataacacattctctctgatcattcctagtctgatttttctcagtctcggcccttctcacatccctaacccacccccaattctcagataaaaattttcaggtttcctgctatgtcatgtgttgatatatgccagagatttggtcatacagttttaccttagtgctgaaagagaccagacttcatctggttaattattaggaggcagctgctggcacatactctagccattccagactttcatggagagagcttgatctcagtgttttggaaaaacaaaaagtaactccttcctatgaaaaggggtggggtgctcagcctcatcagtaatcggaggaatgcaaattaaaactgcagtgatatattggttttatgttcatcagattggtaaaaattaaagtctgacaaaaaatgttgggaaggatgtgaagcaactagaactctgcaagcagaagtgtaaatgagcacaaccattttggaaaaacaatttggtattgtctcataattaaagatgtacatgccctgtgacccagaaattccactcctgggtatttaccctaaagaactttacatatgtggaccaggagacatgtacaaaaacatccatagcaacactgttgacaatagcaaaacaaactaacagaaaattcaaactggagaaaaaatcccaatgtcgatcaacttgagattggataagttaatcatgatatgttcctacaatagaatactatatagcagtgaaaaagtaaatcgcagctatagcaacataaactaatctcaagaacaaaaagttgcagaagggtatatacgttaatattagaaataaaaaaatcaggtcaagaccaacctgggcaatatagtgagacactgtctctacaaaaaaattttaaaagtggctgggcgcagtagttcatgcctgtaatcccagccttttgggaggccaaggcgggaggatcccttgagcccagtagttcgagaccaccctggacaacgtaagaagaccctgtctctacaaaaaatttaaaaactagctgggcattggtggtgcctgcctgtggtcccagctacttgggaggatctcttgagcccaggagtttgaggctgcagtgatctgtaattgcaccactgcacttcaccgtgaacaacaggaaaacagtctcaaaaaaaaaaaaaattagttgggcatggtggcacacgcttgtggtcccagctactcaggaggctgaagtaggaggattgcctgagcccaggagttacaggttacaaagagtgatcatgcactgcattccagtctggacaacaaagtaagaccctgtatctttaaaaaaaaaaaaaaaaaaaatatatatatatatatatatacacacacacacatatatatatatacacacatatatatacacatatatatgtatatatattagagtcatatgaagttctagaatgtgacactaaacaatataacatttagagatagaaatgtgataaaactataaagtaaaggaaatggtaaacacacgtcacacatttaagatagttatttcaggataaggaaaggagatggctttgggagagtatgcagggggctttaaggctaatagtaatattcttttttgtttttttgagacagagtcttggtctgttgcccaggctggagtgcagtggcgtgatcccagctcactgcaacctctgcctcccaggttcaagcatccttctgccttagccccccagtagctgggattacaggcatgtgccaccatgcctggctagtttttgtatttttaatagagactgggttttgccatgttggccaggctggtcttaatctcctgacttcatgatccttctgccttggcctcccaaagtgctaggattacaggcgtgagccaccgcgcctggccctttttttttttttttttgagacagagtcttgctctgtcacccaggttggagtgcagtggagtgatctccactcacggcaacctctgcctcctgggttcaagaaattctcctgcttcagcctcctgagtagctgggattacaggcgtccaccaccacacctggctaatttttgtatttttagtggacacagggtttcatcattttgcccaggctggtctcaaactgctgacctcaagtgatccacccacctcagcctcccaaagtgctgggattataggcgtgagccaccactcccggcagtattcttcttaaactgggtgatagatacactgacatttgctatgtcatgattctttagagtttacatatatttttaatttttaaaatttttattttaattttttgagatggagtcccattctgtcactcaggctggagtgcagtggtgtgatctcagctcactgcaacctgcctcgtgggttcaagcaattctcctgcctcagcctgctgagtagctgagactgcagctgtgtaacacaacacctgggtaattttttgtatttttagtagtgatggggtttcaccatgttgaccaggctggtctcaaactcctgacttcaggtgatccacccacctcagcctcccaaagtgctgggattacaggcgtgagccaccgtgcctggcaatattcttcttaaacagtgatagatacactgacatttgctatatcatgagtctttagagtttacatatatttttaatttttaaatttttgtttttattttaattttttgagatggagtcccactctatcactcaggctggagtgcggtggtgtgatctcagctcactgcaacctgcctcctaggttcaagcaattctcctgcctcagcctgctgagtagctgagactacaggtgtgtgacaccatgcctgggtaattttttgtatttttagtagagatggggtttcaccatgttggccaggctggtctcgaactcctgacctcaggtgatccacccacctcagcctcccaaagtgctgggattacaggcacgagccaccgcgtctggcctatttattcatttatttatttattttagacagtctcactctgtcaccaggctggagtgcagtggcacgatctcagctcactgcaacctctgcctccctggttcaagcgattctcctgcctcagtttcccaagtagttgggactacaggtgcgcaccaccacgcccagctaatttttgtatttttagtagagatgggttttcaccatgttggccaagatggtcttgatcttttgacctcgtgatccaccctccttggtctcccaaagtgttgggattacaggcgtgagccacggcgcgcagcctgcgtctggcctatttttttaaaaactatatctctaaataattttaaagcattaagaaaagattgctgacacttgatctagcctagtgttctccctagttcttcttttgcaaataaacacatttttcaaaaagtaaaaactgaggctcagagaaattaaatacagtggtctcctgccttatccagtttcaattacctgtgttccactctggttcaaaaacaggtgaatacagtgcagtaagatgttttgagagaccacattcacttaacttttactaatattactgtaattgttctattactgttcttaatgtcttactgtgcctaatttataaattaaactttatcatatgtatgtatagaaaaaaatacacctcagtactatctgcagttttaggcgtcatctgagggtattggaactatgttctgaggataaggggtgactactgtaatttaattgttcaaggaagaaagtgtacctggtctttcaaacccagtatagcacactttgtagcatcctgttttgcaactctcctgttctgtagattctgtcaattagaaatgcttccacttggacttctgccttagtctttcactccctcatgtagtacattctccatactgctgccagagagagctttctaaatgcaaatctgatcatgtcactctctggcctcaatcttaaatagctccctatagcttttagcacactctgttaagtgctgtagcccggcatacaaggctctctgtgcctcagcttttgtctgccttattagtctcatcactcatgacttcctgcacttcagccacataagccatttactgttcctggaacactgtttttgcctctgcatatgctactccctccacctggaagttcttaactagctttatttgtcctttaagacaccttttcttaactgactgcccctctttgccccaacttgagctggatacttccattataccttgaacttaacatttgtagtcacacttaccagagtattattgtcccctttatttatatctccaggagcttgcaagctctgtgagggcagaggaagtattaaattaatatcctaagtgtgtggcacagtgcctggtatataagtttcactgaatgaacaaataattgtatattactttatacaaagacaatatatatgtatgcttttttttttctttttaagagatgggatctcactatgttgcctaggctggcctcaaattcctgggctcaagtgatcctcctgccttggcctcccaaagtgttgagattacaggtgtgagccaccatgcctggctccatatatatttcatagttgtcatttgtgtgccagattttcaccagctctacccatatttattgaggaaagaaatgaagaagggagggaagggaggagaagggaagggaacagaaaagaagggagaaggaggctgggtgcgatggctcacacctgtaatcccagcactttgggaggccaaggcaggcagatcacctgaggtcaggagttcgagaccagcctaggcaacatggagaaaccccgtctgtactaaaaatacaaaattagccaggcgtggggcgcgtgcctgtaatcccagctactcaggaggctgaggcagaagaatcgcttgaacccgggaggcagaggttgtgatgagctgagattgtgccattgcactccagcctgggcaacaagagtgaaactctgtctcaaaaaaaacaaaaaagagtctgggagagggaaaaaagaaaggcagacagcttggtgggtagatgggtgggacaaaagtattgaggagaggaagacaagaagctggtttgggagattcagggtcttattaacattttaggccaagtacctggaaagtttaaaacaccctgtatttctttggacatgtgctaattatcatgacttattctgacatttcttagcctttttggaaatttctcttcttggctgataactatcatttttctctctttacattagggagtaagagctttgaggtacaagaatgagacggttgtggcagacactcatgttgtcacggtagtcttggtctctaattttttttttctttttttgagacggagtcttgctctgttgcccgggctggagtgcaatggcgtgatctccactcaccgcaacctctgcttcccggattcaagcaattctcctgcctcagcttcccgaatagctgggattacaggtgtctgccaccacacccagctaatttttgtatttttagtagagatgggatttcaccatgctggccaggctggtctcgaactcctgacctcagacgatccgcccacctcagcctcccaaagtgctgggattataggcgtgagccaccatgcccagccaataattttcaacttctttttctgctctgtcccagattggaccctgagtttgaggggtaaatgtagatcctctctcgtgacctggtgggatgccagaatctatttctaaaacaaaggttgaacttgggttatcttctctcaggaaacagtgctataagactggagttccagacaccctccttatccttatctttgtgagagccaaagcacaagaagcaactatggcttcattcatttgatttgataaacttttttttttttttgagatggagtctcgctctgttgcccaggctgcagtgcaatggcccgatctcagctcactgcaacctccgcctcctgggttcaggtgattctcctgcctcaacctcccaaatagctggaactacaggcatgcgccaccatgcccagctaatttttgtatttttagtagagatggggtttcaccatgttggccaggctggtctcgaactcctgacctcaagtgatagggccctccttggcctcccaaagtgctgggattataggcgtgagctaccgcacctggccttgataaacatttattgaccattctcttggtacctagcgtggtggtaggcactaagattagagatgactcatagcagcctcagagaactcacagtctagtaagagagcaagtgaaaaaaccgctcattttaatcccgtgtgatggtatagacatggacaacgtgttatggatatttagagaaccgttatggcatgtggaagaggggacgccagcttcctttggggcaaggcctatcaagaggtgtttcgcttgagctcagacttggaagaccttataggctggtgggggttgtggtgggtggtcaaacttgagcaaaagtatggaggtaagagagaacatggtacagtggggtgtgatgggaaggtctgtaggactgcaaagaaaggtatatgtgtatgagaatgtgacaggagatgaaaccgaaggcatataaagggccatattgtggatgacctttttttttttttttttttgagatgaggtctctctctttcacccaagctggaatgcagtggtgtgatcttggctcactgctacctccgcctcacaggttcaagcgattctcctgcctcacccttctgagtagttgggactatgggtatgcatcaccacacctgactaattctagtagagatgggatttcaccatgttggccaagctggtctcgaactcctgacttcaagagatccacccacctcggcctcccaaagtgctgggattacaggcgtgagctattgtgcctggccagtggatgaccttttctactttcctagataaactggattgtcagtagaagtgtttccatttgtccaatgttcggtgttagtgttttactattgtcttttgagtaactgagtttcatcactttttatttctttgatttgttctttttatgatacccaaatttggaactctctttattcttcaggtgattctgctttgagtacgatctagtcaaaccctacactcagacattgtggaatggatgatacactgcttttaaggcagtttggaaggaggatgatttaaatgaccttcaaagactaatgtcaagcccccatgtcaatgtcactgcaattcatgcatgcatggagaataggaaaggaacttaattgtggaggaggggaattgtaaccctgtttgaatgggtagttgaaagtcctgggcccgcccctaaggctcaaaaaaggactttcttacatttgctgccaagaggtcagagggagagcccatataaataccatcctcccgcggggtgtgtgagccagtcttattcttttacttccacaggtgcagaacaggttcaccaaatagtattctgatctcccttgaacagaatctgacatcatattgtccttctctagaaaatcaatccctttaaagcatggaacatggcaattttaggtcagtaggcatttaaagacacctttttaactttcaagggctggcctaataagatatattttgtacaaaataccagtgttatcaagatgaaacttgaatcatttaaattttgcaagagacttagttttagctgcttgtgtaccttttacctatgaaattacttcttattttcttttaatggtgctgtccttctggagcactgtgatcatcatcaggtatcaggctccattccttcagctaaactttcgtgactgttcggaatccattagtgtttgagatgagggaacccacagcaacccatgtcactgtcttttcggaccacaaaataactttccatagttaggctggatgactgcagaaaccagtgccttacatagtcaggagctgctgcaacatagctacaatctgaacaaccaaaggaattaatcacagccagcctcatccatttcattaatttgttttgccaaatggtatcagtgaggcagaggtacacctttggctcattaatacaagatctgaatgggaaaaatctatttcattgaaatccttgagagttgctgaaaacacatgatatgtcttagtactttaaatagaactgttctaatttggagggaaactgctgtacaaacatggcccattgataccttcacagcttatctattcatgccgctcttgccatttctgaattttggaaaaagttctgtgttaatgtaaatataattttatttttctaaatactcatatcttaaaataatactcattaatagattttggtaggaaaactccatcttcttaatttttcatttatataagcttcttccctgcattctggaagacattcttcagtgtatatactgtgtcaaagcccattttcaaggcagttgatagagatttagctatgcaatttatttaccattggtcaccaagaaaataaaaatggaagaaccagaaggccactgagggaaaatgttataacagcatactccaggggctagagaccagagagcaagaagaatgctcacgggtggtcccagggaactatgattgatagtaacagaatagcaattaggtaatggaaagttccggctactgtaccaaagacattcttcatcttttttttttttttttggagacaggctctcaccctgtcacccaggctggagtgtggtggcacaatcttggcgcactgcaatctccacctcccaggctcaagcgatccacccacctcagcctcttgagtagctgggactaccagtgtgcaccaccacgcctggctaatttttgtgttttttgtagagatggggttttgccatgttaccaaggctggcctccaactcctgggctcaagtgatctgcctgcctcagcctcccaaagtgctggttgggattataggcgtttcttctaacaaattttgtcttggagttgtctttacaagtgaagcttttgtgatttttggaatgctatagaattcatctctaggcttcttgtcccactaaagcattagaatttaaaacagaccctttaacatgatttatagcagacaagaaataccagttcagtttgggcaggtggtatttaattgcccctctttgcggtccctgtaaaattgtttgtgggtgaaatcacaacaaagatccataaagaacagctttatatatatattgaaagagataccagtttcttgcatttttctaatgtcaaaggttaatttaaaatattaatgctgaaaagattaagatattaaatctagtaaagaatacatgtacatattgtaattactttttacgattaaagtaattggattatatttaatgagctatttacatttaataattaaaaaagacttatcttttcagtatttcctatatgcagaaagagatgggagaaaactcacttctgatataattatcttagtttgggctaaataggaaaaacaactgtgctttttagaaaaagagaagaatattatattaaaatatacatacacagattaagaattacccataggagtgttttagttcattgtaaaagaagatggaagattaggtgctttaaaaaaaaaaaaaaagtccctgatgagaagatttgatgagctaaacagagaatgaaacttaaagcgattctcagggaccctgtagataaaagtaacccgtcagaagtgttggaacccctaatgcctagctgtttgaaaacaggagtttgaaaagcagtagcatctgcacatgttatctgaggctgggattttaaataagcctgtgtttatgttgtttaaaggaaagaagtgaagcccctgagcatctggctaaaattgggcgcagagagggagaaagcagtatgttatactcattaacaccatttcagttttagggtaaataggaatgctttcttgtgttagcatgcagtcttttttccatgggagataaactagtctggaatttgatggcacttgtgtacaaagatgagaactatgggcgtatttgtctaacttcttagtttgggtgttttgcatagagtcagtgtggtgtcatggaaagaacatgaagtttggacacagttggacctgggtttgaaagctgtctgtctgtgtgactttcataaagttatgaatcactctgggttttagttttctgatctgtaaaatcaaaatattactacttaccttggaaaattggaggactagaaatattcaagaaaatgtgaataaatatctggtacattttaggaatttaacaggtatttattgagcagacactgtaggatgaaaagaaattttaagaatcctactttgtctccagatagttgctgttgctactactgctttatgttaggtttaaagatattttgtttttcaattcctgtactcaaagagttgtatacaccaaaaatctgtgctataaaatagactgtagtgactgctataaaagaggttcagcatacctcattggcacttggagggaggaaaatgactttagactggaagattcagggaaggcttcttagaagtggtgacactcacctcgggcttttaagatgaaagattgtttgtgtgtttttataaagaaataccacaatccagataatagtctcttgaagaatgtattgccttcaaagtacttaaagtgaaaatactggattgactcttgactgtgattgggaagactgataccctttgttgtaatccttaaaataggtataatgtaagcagaggccatccatctttttcagtatttgtctccatgttcctgaagagcctgtctcagaaggtaagaggcccacctacttcttggcctccactgaaaccaaataaaagaggaccatttaggaacacctttgtgtaatgctctttgttgtttaatttgacctgctgtctttagattatttcattactaggaggtaggtccatataaactcgccattccttcgagttagtaataatgagagctatcagttactgaatacctactgggtgctgggtacccctctggaatgcttacatatgttatcacatcttattcttagaactatcctaggttggccatggtggtttacgcctgtaatcccagctctttggaaggctgaggtgggaggatcacttgaattcaggagtttgagaccaaccagggcaacatagtaagaccctgttcctacaaaaagtgaaaacattagctgagcatggtgctgcacgcttctagccccagctactctggaggctgaggtgggaggattgcttgagcccaggagactgaagctgcatgagtcacattcacaccactgcactgcagcgtgagtgactgagccagaccctgtctcaaaaaaataaaaacaactaaggccaggcgcggtggctcatgcctgtaatcccaggactttgagaggctgaggcgggcagatcacaaggtcaggagttcgagaccagcctggccaacatgatgaaacgccgtatctactaaaaatacaaaaattagccaggtgtggtggtgggtgcctgtaatcccagctactcatgaggctgaggcaggagaatcacttgaacccagaaggtggaggttgcagtgagctgagatcacccccccctgcactccagccggggcaaaagagcaaaactctgtctctaaataaataaataaatacaactatagtataaggtagtttgtattttccccattttacggatgaggctcagagagattaactaccctaaggtcatatagctagtggctcaagaaatccttgctttctttgtctgaacattcttctggatttaccaagctatattaaatttttttttgttttttgaggtggagttttgctcttgttgcccgggctggagtgcaatggcgcagtcttggctcactgcaacctccgcctcctgggttcaagcgattctcctgcctcggcctcccaagtagctgggattacaggtgcctgccaccacgcccagctagtttttgtggtttagtagagacggagtttcaccatgttggccaggctggtcttgaactcctgacctcaggtgatccacccacctcagcctcccgaagtgctgggactacaggcatgagccactgtgcctggcctttttttttttttttttttttttaagagacggtgtcttgctcttgttgcctgggtgggcctcttactcctggagtcaagcgatgctttcacctcagcctcccaggtagctgggaccacaggtacatgctaccacacttggctaattttttatttatttatttatttagaaacagggtctcactgtgttgcccaggctggagtgcagtggcacaatcacagcctactgcaggctcgacttcctgggctcaggcaatccccccatctcggcctctagagtagctgggactacaggttttcggcaccgtgcctggctaatttttttttttttttttttttttgagacagagtctcgctctgtttcctaggctggagggcagtggcgcagttttggctcactgcaacctctgcctcccaggttcaagcgattctcctcctgagtagctggttttacaggcatgtgccaccacacttggctaatttttgtatttttagtagagacggggtttcaccatgttggtcaggctggtcgcaaactcctgacctcgtgatccgcccacctcggccccctaaagtgctgggattacgggtatgagccaccacgcccggccctttggctagttttttgtgtttttcatagaaatgaggtttatccatgttacccaggctggtctcaaactcctgggctcaagcagtctgcccatctcagcctcccagagtgctgtgattataggcatgaggcaccacgcctggcctatttttatttttaattttaactttaatttttttgagatggagtctcgctctgtctcctaggctggagtgcagtggcacagtctggttcactgcaacctccacctgctgggttcaagcgattcttctgcctcagcctcctgagtagctgggactacaggcacgtgccaccacgcctggctaagttttgtatttttagtagagacggggttttaccatattggccaggctggtcttgaactcttgaccttgtgatctgccggcctcggcctcccaaagtcctgagattacaggtgtgagccactgcgcccagcctttatttttagtttttaactttggtaggtacatagtagttgtatatgtttatgggatccagcatattttaaaatttttttgtaaagatagggtctttctatgttgcccaggctggttatattgattatttattttatttactattttttttttagagatgaagtctcatttttttgcccaggctggagtgcagtggagcaatcagtcatggctcaccacagactcaaactcctaggcttaaaggatcctcttgcctcagcctcctgagtagctgggactacaagtgcacaccactgcactcagctgagtttttctttctttctttttttttttttttttgagatggagtctcgttgtgtcgccaggctggagtgcagtggcacaatcttggctcactgcaacctccgcctcccagattcaagtgattctcatgcctcagcctcccgagtagctgggactacaggcatgtgccatcacgcccggctaattttttttttttttttttttttttgagacggagtctcgctctgtcacccagcctggagtgcagtggcgcaatctcggctcactgcaagctccgcctcccaggttcccgccattctcctgcctcagcctccggagtagctgggactacaggcgcccgccaccacgcccggctaatttttttgtatttttagtagagatgaggtttcaccatgttagccaggatggtctcgatctcctgaccttgtgatccgcccacctcggcctcccaaagtgctgggattacaggcgtgagccaccgcgcccggccatttttagtagagacagggtttcactctgttggccaagctggtctcgaattcctgacctcaagtgatccacccacctcggcctcccaaagtgctgggattacaggtgtgagccaccacgcccagccacgtttttcattttttatagagacagggccttgtcattttgcccaggctggtgtcaacttcctgggctcaagtgatcctcccaccttggcctcccaaagtgctgggagtacagtcatgagccaccactcccagccagtaagtatttgtatatccaaacataactaaacatagaaaaggggctgggcatgttggctcactcctgtaatcccagcacattgggaggctgaggcgggcagatcgcttgagctcaggagttcgagactaccctaggcaacatggtgaaaccccatctctaccaaaaatacaaaaaattagctgagcgtggtggcatgtgcctgtggtcccagctacttgggaggctaaggcgggaggatagctggaacccaggaaggggaggctgcagtgagctgagattgtgctactgcactccagcctgggtgacaagagtgaaacctcatctcaaaaaaaaaaaagtgttatgatcttatgggaccactgtcatatatgtggtccatcatagtccatcattgactgaaatgttgttatgtggtacataactattctcttgtaagtctgagttatagaatgcattttagtgttagagagattttttaaagaccaccgtgtccaccttctgaggctggaggattgcttgagctcaggagttcatggctttagtgcactatgattgtgcctgtgaatagccactaaatttcagcctaggtaacatgatgagaccttgtctctaaaataatatgtttatatttcattgactcaggtatacattttttcctcacattttaacatcgcttttttttttttttaagacagggtctcactctgtcaccaggctggagtgcagtggtgtgatcactgctcactgcagcctcgacctcctgggctaaagtgatcctcccatatcagcctcctgagtagctgagactacagctgtgcgccactgcattcagctaatttttgtattttttgtagacgggatttctccacattgcctagactggtctaaaaagcgtgagctcaagcgatccactctccttggcctcccaaggtgctgggattataggcatgagccaccatacccaccccattttaacatctcttgaatcgtaatgcctctttcaatcagtggcatcctaaatttgatgaaatatggtagaaacccattggaattgtgacttttccataaatactagtggtaaagttcaagacttctgtttatcatattagctctccttgaaaaacctttccgtctgtttttttacatccaaattctatccagttcagatactaggttttgggttttgttttgtttacttttgtttttttgagacagagtctcattctgtctcaaaggctggagggcagtggcatggatcttggctcattgcagcttcaacgtcccgcgttaaagtgattctcctgcctcagcttctcaagtagatgggactacaggtgtgtaccactacacctggctaacttttaattttttttgtagagacaaggtctcaccatgttgcccaggctaatcttgacctcctaggctgaagtgatcctccacctcggcctcccaaagtgctgggattacaggcatgagccactgcacccagccccagttcagatctttaaggttccaaggagtctgttcagtcccttcagttcacagtgatcttttcatcctttctattgtcataattgaacttctatttatttgctatattgttacttaactgtggttttctctctctctgaactaaattataagctcctggagtcaagggaagagattttatacttctttgtgtcttttagtgtcttcttgataaatattcagtgattgataacagcactataattagtagttaaccattaatacgacctgaagcttattaagacagtattgtataatgcttaagagaaccatatataaacatttagaacagggcatgtgctagatagatgtcaatcattctactgctactactactaccaccaccactactaccatgatactactattactactactgttgttttaattattctgtgctaggcactgtgctaaacgttttatacatgcattatttcatttttcttcacaacaactttacagacaaggggtcatgataatgatttaacaggctaggaaatagactgagagactgcttgccaaggttccaaagctataaaatgtggcagtggtggagtgaaacccacacctgtgtctcttaatgttcatgctcttgctctgccccactgcttactagatttttagggctttggcaacttcctggtaaactgaggttagaaaggaaagaacagatacttatttttccctctgctcaaggactttagcttgtaagtctcatgctttgagtgctgactgaatgttgtgagaggaagtagatgtacagctgccctttgctgctgactcttagtcagttgctggtggcttggccattagtgacagatatgtgtgtgacactttttcaggaatgaattcttgttacagctggctattgagtagttcatatggaattgcatggcaatttgctccataattccactccttgtctcacatgtagttgtgattgctaggtctctctcctcacttaagttggtgtattaatagtcacatctcaggactgctgcttccgcccacctgctccatgaccacacagtgtgtttgtgtattgccctgaagtgtcaacaaaacattttgctgaattttctttttgttgttgctctgcaaccatcttttccctggcctttctcagttgtgtaaagttggtttctttcttggtctttccatcccagagagggtgcagttactgcaaagagaagcttgaaataagaagtaaggcatcataacaattaaaacaaatggttacacagctagccagatgaattgagacttagtgcctgatgtgcagttcagctcttattatctccttcctcttctattttcaaacctgccactgtagctaatccaccagtgggtactctaataccttgaccaaaggaagtttaacctagtacagtactcagtgctgcttgcaagagccaagaaagaaaggttgcagtctagccccatcttctccatcgcatagtatgatagtaaaatggggttagacccttccataaaaccaagctgtgtattggacttttggctgtttgtctgggagaatacatgcccaggtttggcttcctcccaggtacttggagaggaatgcattttgtatctgtcctcttatctcaaatttctgggtaccatcaactggagagcactctcttctgtcattggctataaatttaaaaagaatcgtttaaatatgaagggtattttattggggcttgtgtgagttattgacatatttctagtaatctagtgaatgatttgaactgatttgttgaggtttgatactttttttgttttgtgtgtgggtgttgttttttcagaacagcttagttgtttttcatgttaaactcctgtgtaaatttaatgttcagttgatgacaatggctgaaagaaatctgataccttattaggagtaaagggtaagatttctccatttataagtacaattattcataatctatatttatccaatcaaagtaaaagcccatttagatgggtagtttgaagtatttcaaaccatacaattttggtgatatgggttttactagaaattggcattagattgggaaagtaaaatgaactttgtctgtaactgaaagtcatcagtgaccacattgtagatcctgtgtaatttaagtggatccataacaaggaattgggccaagatggagatacaagaaatactttatgcgggtaaatcttttcctcagagctcagaatactttgcatacaaaatctctgtttcatatagcatctttcaagcattttttagtgtagtttacagctggactagagggatgaattgaaattttatccccgattgcctgtcatcattagattgaaagctagaatccaggtttccaactcacagtttaaatgtattttcttttggacaaccagatggatcctgctaaaaagagagtctaattttggccatttaaaagacagttttctatgaaaaagttgatactagaagaaaccaattttgaaggttaaagagattcccccaattttagttttaagaacgaaactatgattagacccttaagtgtaaaagggtaagaacaaaaggtgctattgcccccaaaagataataaaaagttatggaattaccaggtgtgaatgaatggtccttcatagatgtaccttatgctcaaggagtaagatactggagtttagaagttctgtttcctcagctactgtcttaaagccatatcaagacaagaagtatccctacactgattggatgtaggcacaaaattggtgtgtcattcctttatgaaattggaaatatctcttttagatcacaagtaagccctttttctcagttttcccagtcaaatactttctgtatctaccgcaggagttccatttctgtcctactagctcctttggacattgttttagtgacctaaacagatttgtcattccttgtgcttggagagagagtgtggttatatttgttagtttagccccaccctgtatttcaacaggaagtgggtgggtgcctaagcttataatgaagtgttcttccttgtagttgctgcatggtaatgaggactgctatatgcaacagtaaattcatactttaaacattttaatatacagacttaaatttcagtaagaccatgtattgtctgtcattttgaagtcaaatgactattcgactttccaactgaaattcttaaacctagtgaaatgcatattctttttcttttttgtttctttctttttgagacagggtctggctctgtcacccaggctggagtgcaaccactccagctggtgtgatcgtagctctctgcaacctccaaggctcaagcaatcctcagtcctcctgcctgagccccctgagtagctgggactacagccgcatgccactacacccagctaatctttttgtttttaatagagatgaggtctggctatattgcccaggctggtttcgaattcctgggctcaagcagtcctcctgctgctgcctcccaaagtattaggattacaggtgtgaatcactacacccagccatgttctttaacataaagaaatgtatctcttgaaagaggaaactcaagagtaaacctcttctcatatgtccccatccaaagtgctgttaactatagaacagtgggaaacgctgaagtgaaagcagaagtcctaattgccacacatgcaacatccccacatgttccatcccctgctactgctgatcagcattttgggggtatgtttcaaagaggaactgccttgagaagcatttctgttgtgatggttattgctatagctcaaatatgtttgctttttggatgtgaccatagaaatctgcaggtgttatcagtgaccttggctcaaaatgtagcattgtttatttgtcatgaacagctagtaataaacatagccagaagaatgagcagtcatctatctgtcttctggtaataacaggagttcagagtgtggggcacagatgagtgcatcctcccttctctcacagatatccctccctttttgttttcttctaccctccaacccccagctcaccccatcccaccccaccccaccccaccccaggctgttgggagcagtcatgagagttcagaaagtagggtggatatcagagtctccgttgcctagactggagtgcagtggcacaatcatacacactgcagcctcaaccttctggattcaagtgatcctcccacctcagcttcccaagtagctgagactataggcatgtagcaccacacacccagctaatttttaaaattttttgcagagacagggtctggcttttttgcccaagctggtcttgaactcctgagctcaagcaatcttccggtctcagctcccaaagtgttgggattacaggtgcgagctactgtgcctggccccagagtctctttttaactttatactgaccaaaggtgatatataaaagtattccatgataggctgggcatggtggctcacgcccgtaatcccaacactttgggaggccaaggtgggcggatcacttaggtcaggagttcgagaccagcctgaccaacatggagaaaccccatctctactaaaaatacaaaaattagtgggcatggtgctgtatgcctgtaatcccagctacttgggaaggctgaggcaggagaattgcttgaacctgggaggcggaggttgtggtgagccgagattgtgccattgtactccagcctgggcaacaagagcaaaactccgtctaaaaaaaaaaaattgcatgataacttcaaatatacagacttgaagaatctcactgtttgaggggaccttaaagggcctcatccagtttccatttcaaagcacgaatgccatcatggcactaacagtccagactggtactgccaggccatggctaggaagttctggcagtcttttatttgttttcagactcattctcaagtcccttaggctgaaacttgctacagatgaagatggggttactgctgaatctggcctggatgtctggagctggtccaaaatacagtttttctttgaaattttttgggtagctaactccttgatcagtccaggagccccttgggtataaataacctcagggctctgtctggaacttcctttgggccattctagatctcacaggtcctagtaattagacagatgtagacctggagaaggggcatgattcatggctataatctgcccctctctacagtccctaaatgtgcctctgattgtgtgttcagaatgcaagtggatgttggctgagtgaggagatcatggcagcttgggtagaagcacatctagaaattttagagctgggaagcttctaaaagatgtttagcttagtccatttattttgtagatgaggacacaaagcccagaataaaaattataacatctttgatttagaaggcattgtagaggtcatctagtctgactttccaacaccttcataaatgctagaaatttctcccccaacgtgcctgatagctggtcatccagagcacagggctggagaactcataaccttatctaaagataagccattctactatcggacaattctaattaaaatgacctagataaattgaaatctacttccctgtaacttttatattctcagcagttctaatttaattgctctcctatttgacatctcccaaggtaagaccttctcaaatccccaaattagcagatatcactatagtatataatttccctaatcaaagtaaaagatgtctgaaaaagaccttcacagattccataaagatagggcattccactctttcatgtatccagaatttccttttttgaccaagaaccaccacttcactggttttcttcactttctctttgttttccttcactggcgctagcattcagctcttttctgacgcttttgataaagaaacatacattttatcacttagtgagtataactgtataaaactaaagagagcagccggtggggctgaggggctggactcacccctgcaactgccacctgtctagtttctcagttcatatttgctagctgtggtagggtgggcctttacatttctactttctccttctcagcctgtgaagaatttcccaattggtcttcttacttccagccttctgcccaaatataactcctgtgcttatgcagaatgatttgtctaaaatgcaaatgtgaccctgttgtccttccataattcagtggttccccaacatccagtgcactataccagtaaggtgctactgatgatagaggagcctttctcaactggagttccatgaaagaattaaatcttaatgtcattaggcattcattatatgtaatatattaacttttctccagtacgcgtagaatggtgctagttatgtacagtcttgaggggaattgagaaaactgtcactctaatcatcctttttgttctgtggttcagatgaggaatccagttatgaaagactggaagaaagagatagtatatgttcttcaggaggtccaggatcacagctggaagcagcctccaggaaaaacctgccaaattcctttgaaggctagagttttgtctttaaatttttagtgtaaatattgcattccaccatataatatgtctatggttaaaagtatttttaaatatttatcaatgaggggcccgggtatggtggcttacacctgtaatcccagcactttgggaggccaaggtgggaagattgcttgaggctaaaagttagagaccagcctggacagcatagcaaggccccatctctataaaagataataaattagccaggcatggtggcatgtgcctgtagtcctggctacttgtgaggctgaggtgggagcatcacttgagctcaggtgtttgaggttgcagtgagctatgatcatgccactgcactccaacctgggcaacagagtgaggcctgggtgacagagtgagaccttgtctcttaaataataagataaaatatttatcagtgaataggatttattctacaggaggatttgcctagggtctgtggaaccacaaataactgcctcttttttttttttttttttttttttttgagacagagtttcgctctgtcgcccaggctggagtgcagtggcgcgatcttggctcactgcaagctccgcctcccaggttcacaccattctcctgcctcagcctcctgagtagctgggactacaggcgcctgccaccgcgcccagctaattttttgtatttttagtagagacggcgtttcaccatgttagccaggatggtctcgatctcctgacctcgtgatccgcccgcctcggcctcccaaagtgctggaattacaggcgtgagccaccgcgcccggcctataactgcctttttttaaaagccctgtagtgggttttttattttatatatattatttaatgtctctaggaaaattgcccccaagatcacacagtaaggtgtactagtcagggtgctaacctaagaatgtgtcgactccataaagccgatacattttctataacttgaagtgtgagagagagagcctggaaatctttttgcccaattctaagtttattttcacctgaatgtaagatttttttcttcttggtcaagttactgttgtggttcagatcatgcataactccatgcttcttgtacaaaccaatccttgattatccaaaagaaaaatgagcaatggtgcatgtcatttcacatacaaggaattttgtctctctttggtggctttgaaacaaatcactttaaacgatagcagataaacttttctaattgttttgtcctaatagatattgacatattgttatttctcgagtaccctcccgctggttgtggtaagtggcctttttgacaataagccatttgctttagaaaacttggttccaggtaaaccccaaacagatgacatacagttagttgtttgttctgcttatccaaggcacttagaaaaccataagtgctaaagtaccaaggtgttagaatttgccccccaccctcaatctgaaatttatgtagccatctggaatctagtttccattaggtatccagagggaaagtccagaatgccctgtcattggtcacattcagcacagcatttcaaggtggtctggttcttttagctcctctgagaagctggaatgagtactcaaatgattaccagtggaagagccacagtggctgtttccagtcattcctggctgtacaccaaatttctggttgatcttgaaagtttgaaatttgggaatctaaggacacctagaggatggtgttcagagccctgcaaggttctttcatatgtaacctcctcccacctttcctgttctaaactctctttaccatgtgttactgaagattgcatcttagtacctgataccctttacattaaataaaagagggaaagagttaaattggaaagtccagggtttggactagaaaacccatggggtcaaagggggaattcagcagagaagtggaatggaaatcatttccttagacagtagacaagtattcaggaaacacctctgcaccccaaagataggcacagctgccacacagtgactattaaagggaggttcaaagttataagcaaacagctgattctcttggttcttgggctgttgctgttggtgacaggaaatcttgttccccaagctgctggcttcctgttttatttttacttgtagcagatcagaatgtccataacaaggagcagtctgttccgaagggttctactccccctttgagcctgaaagatttttttttctcttttggtcagacaatatgtctgtaatatttagtttggtttaagcattttgtattcacagtcaacgttttggtgatgagctggtattttaagatttgatgtaaataaacccttgttttgcttttttttttttttaaatatataaagaggagtttataatattggggacttggcccagctattcggaaagctaaggtaggaggatcatttgagcaaggcggtcaagaatgtagtgagctgtgatcgcaccattgcactccatactggatgacagagtgagaccccgtctcaaaaaaacaaaaaggctgggcgtggtggctcatgcttatagtcccagcactttgggaggctgagctcaggagttcgagacaagtctgggctacatggcaaaacctcatctctacaaaaaaatacaaaaattagctgggcgtggtggtgcatgcctgtaatcctaactacttgggaggctgaggcaggaggatcgcttgagcccagtaggtggaggttgcagtgagctgagatcgtgccactgcactctagcctgggtgacagagcgagaccctgtctcaaaaaagaataaaaaataagaaaaaaaattgaggacttaggtatgttaactttatgctttaccttttcatgtgaagtgaatttgtcattttccctagcatgaaaaccattaggctgttttagatttctttagttttataagatgtggaaagaggatcagttcattgtgccttgactgtagtcatatccattttgtggaaattaaaaccctctcctatccttgtaaaactaggaattcggtaatctaaatctaaaacaatagctcagcatgaacctgaagtgctgggggatttcctagggaaaggggctcagcccaccggataagaaacagtaactggaaggtttccggatctgctccagacatttcctgctgtctctagagccttttggcccaggtgtgttgaaccggatgggagcaagaaagggagctgttgggtagaagagaaagcaccagggaatcttacagcacagtttactcagcatcatgtttgacatattgaatgtgtaaaatttttactttatattctctcgttcagtcaatttacaaactaaacttaagagatactggcattagtagttagctatacttttttttttttttttgagacggagtcttgctcttgtcacccaggctggagtgcaatggcgcaatctcagctcactgcaacctctgctttccgggttcaagcaattttcctgcctcagcctcctcagtaactgggattacaggcacccgcgacacgcctggccaattttttgtatttttactaaagacagggtttcaccatcttggccaggctgctctcgaactcctggccttaggtgatccacctgcctcagcctcccaaagtgctgggattacaggcgtgagccaccatgcccggcctagtggttagctatacattaacagccatttaccaaggaaggactggaaaagttaatcctgatgtatatcaatcactattggcagcttgatttcattgtggagattatcaggtgacagtgttcttttttgatctttataattggtggcctagaatctgatctgtcctggttatgaacaccccagggataggatctgtaccgtccagtgtctgctgaatgggctgttttctaaccatgcctccttgcctctggagactcttgttggttggagcagtagttggcactttaatgtttctatgctgcctatgtacctcaggcagcagtcaccagtccataatttctaaacttacatagcagatcttctaatagcaaaccttaaaaagggcaagggagagaggacttaaaaatgaaagaaaaaaaaagatagggagaatgaagattttttttaaagctgttttagatcagggtaagaccaaaaaaaaaaaaaaaaaagattcacacagccctagtgtgcctggaatttgtggttgagtaatactttcctgttatttcttttttaggttgtttttcaccattcagaacattgcctgaagcaggtccaccatgccgttagtaacgaggaacatcgagccaaggcacctgtgccgtcagacgttgcctagcgttagaagcgagctggaatgcgtgaccaacatcaccctggcaaatgtcatccgacagctgggcagcctgagtgagtgcctcagagagcctgtgctttgccctcaggggtcgttggtgctctttatttagtttccttctcctcccgcgttcctatttctcccccatctgccttccctaggtaatgcgaaaatgtatcctccctctcctccccaaagagaggctcccttttggtgtagcttcttctcttcaaccttctttatctaccaccaccctctaggttccctcctccctccccctccacctgcttcaacagaaatctgtgggaagggtggcaggaagggctgcagcaaaaactgcagacggaatgacagagcagaattctgtgtgtgtaaagtgggaggttcacagagcagtatcttgggtcggggaatgtgcctgtaattacacgagctgttcgatgtagcctgactttgttgaagcctcaaatgtgccaatagtttttatctacccaacacccccaccccttttcttcccaaagaggagtaaagcaaacatgccttcggagagattctgactgacttgtccaccctggtacacatttaattgtgctgcaagcccccaggtccaagttcagggtacagattacttctgcagtctctggggtattgggagttttgcaagctgtgtgaacatacagtgacacaaatagtagctggagccattcttccttaggaggaagatgggggttagcccagactgttttggagctgaaggaaagccagctcaactatatatatttttttaattggcaagaatgaatgagactgccttgggtggggtacatgcatgtggtttggatttcattctgaatcaagttgactttgtttgcttgaagctgagatatgggaagggcagatgcttggattggctctgcatttatctagtgccactccagctcccataagaacctccgtcaaaatgccattttagtgatcttccttagcaaaggcatcttggtgtgaattatttcagatagtcacccctcctatcgcatcactgcccttagtgaaggcagtggaatatcaagaaagcctgcattctcccgtatagcaataggcccagcctttaaaataggaggctgaggagacagaactctatgaccagatgatgtatggagtctgagattcctaagccttcacctacctcagggatcatctcagttgatccagggcttagagaaacctagatggggcatcatgaagaagtgaaaccctgccagtgcctgtcttacacaaaggaacactgacagtagcacaacagcagtgcagctgacgaggaagcacatcaaggctgcagagacctcactgctttttaaaggcataatttctgcctctctctgtctctctctgagaaggccaaatgggtggaagtcaatcaatcacacactggttccttcttcataggacaaagaacatctagctaatgatgcttcttatttccacttactgaagttacgctctctctcagctatttttccagggtggtgttgatggatgccattgctcacactcccacttgtgatcagaccactcctatcttggggaagctgatctgagggccaaagtcaccttatgcccaaggaaacaagattttcttacattgtgggggctaactgatcctttattcatccaataaacttgtgttgaacatattttatgtaccagctgctgaggggatactcaacaagaataagaataagaggcaataataagaaattgtctctgccctccaggactcataatctacaaggggaggcagaaataaataattcctaagaggagagaatgggaagagagtgagaagggaacccacatttgttgattgcctactttatgccaggtttggataagatcttgacatagattatctcatttaatcttctcagtaatcctatgagattaggtggtggtattcccatttttcagataaagaaaataaggctcagaaaaataaggtaacttggccaggcacagtggctcatgcctgtaatcccagcactttgggaggctgaagggtgtggatcacttgaggtcaggagttctagaccagcctggccaacatggtgaaacccgtctctacaaaaaatacaaaaattagccaggtatgttgtcacacacctgtaatcccagctactcgggaggctaaggcacgagaatcgcttgaatccgggaggcggaggttgtagtaagctgagattgtgccactgcactccagcatgggcgacagagcgagacttcatctcaaaaaaaaaaaaaaaattaagttaacttgcctaaagagatacagccagtaagaggcaaagtcactgtttaaactcagacttcctacagatttctcagctctgtcccttactcgctgtctctgccaatattgccctggtttagacttcattgactttcacctaaactattacccaagcctccctctaccttctttctctgatccaacccccttaaatctgttcctatatccctgccagagtgatctgcctaaaaatcaaatctcactttttactttttatgattctgaatttctgaagctttgaaagttctgtgttaacttttgtaatgtaacaagtgtttttatagtcagagtacacatcgcaactatttctctcccctcttcctcactgtggaattatttaagttccttggcctagcattcaggaccctgcaagacctgccttcctttctagcctcattttctacagtctgtcttccattttacaatttttttttttaatttttgtgtttttgagacagagttttgctcttgttgcctaggctggagtgcaatggcgagatctcgggtccctccctgcagccttcgcctctgcgttcaagtgattctcctgcctgagcctcccgagtagctgggactacaggcatgtgccaccacacccagctaatttttttttttttttttttttttttttgagacggagtctcactctgttgcccaggctggagtgcagtggcgccacctcggctcactgcaagctctgcctcacaggttcacgccattctcctgcctcagcctcccaggtagctgggactacaggcgcccgccaccatgcctggctaatttttttgtatttttagaagagacaggatttcaccgtgttagccaggatggtcttaatctcctgacctcgtgatccgcccacctgggcctcccagagtgccgggattacaagcgtgagccactgcgcctggccaattttttgtatttttagtagagacggggtttcatcttgttggccaggctggtctcaaactcctgacctcaggtgatccaaccgcctcagcctcccaaagtgttgggattacaggcgtgatccaccacgcccagccttcattttacagtcttttaaaatggaaaaagggggcttggcatagtggctcacacctgtaatcccagtactctaggaggctgagacacaagtattgcttatgctcaggagttcgagaccagtcctggcaatatactgagaccctgtcgctacaaaaattaaaaaattatccaggtgtggtgctgtacacctgtagtcctagctggttgggaggataaggttggaggatcgcttgagcctgggagttcaaggctgcagtgagccatgatcatgccactccagcactggccaacagggcgagaccttgtctcaaataaataaataaaatgaaaaaggaaagcaaaaaagaatgaattatcagctactagtaattctcctgagacagaccatgctctctcatatgtccatacagtgctcttgctatccccactggctgaacagcccttgccatctttgtctgtctggctgcctgtagctgatccttcaaggcccagctcaggaatcttctcttccaggttgggctaagagtgttcctctgagctcccgttacatgcctatattatcctatcacattgtatcacaaatcacctatgtctcaattaaaaattattggctgggcacaattgtaatcctagcactctgggaggtggaggcgggaggattgcttgggccctggaatttgagacagcttgggcaacatagtgagaccctgtctctacaaaatataaacgaaattagctgggtgtggtggcgtgtgcctgtacttgcagctatttggaaggctgaggtgcaaggctggggtaggaggatcacttgagcccagaaggtgaaggctgcagtgagctgagatagcactgctgcactccagcctgggcaaccaaaaaaaaaaaaattgttgaaggtagaaatcatgtattgtttgttcttgaaccccagtgtctaccttgtatagtacctgtcacccagtagaaactcagtaaatgtcgaataattcacgcctatatatttcccactattccgtgctattgatgcacaaagaatgtaggaatggaaagaatactttctgtgggtagtgggggcacaggtagggataggcggggtcaaggaagacttcacagaagaggttacatttgaatgggaccttgaaagatgactgggatttcatctagctgagaggagtgcagggaagggttcatatgtgcttcaggctcatgaccttggcctcatgtgcattgtacctgggtggaacttctcaatttagtagtgaaagtctgattatggaatggataaagcataaaactaaaaattccacagccatagatggctctgtgacagcacatccagaattcttattttttctcagaatagtgagattggcatttcgcatattcggttgctgtatcttaggaaatacaggcacagccagccagcactttgtatcagtattgtggccactcgggagaatggaacccccacttgggtcattaaaaaatcaagctagatattgggtttctaactgactgcggtgtgggtgagggggtggggcatgccattggggagctccaagactcccactcagacttcaataagagcagcttcacatttttaaacatcagttttacctgttctacttccacgtaacatttcatttgaagtgttctgctaaggaaaaaacaaaattgaagactgcttcctagaatcttttgcaaaatgtggtatctgtatgaatgttggataatgatggatattgggtctgtcttggtaatctgagtgagtgaaatttaactctgaacaagacactttggtttttcctagttcagtatcacacttctgttttcagaagttggagtaatttttagcacttgaagaatagatactatcaaattactgattggaattatatttaaaattttcctctaagcttaaaacttagggtatttaggctgggcacagtggctcacgcctgtaatcccagcacttgaggaggccaaggcggatcacttgaggttgggagttcgagaccagcctggccaacatggtgaaaccccttctctgttaaaaatacaaaaattagctgggcctgcgcctgtatttctacttgggaggctgaggcaggagaatctcttgaatccaggaggcagaggttgcagtgagctgagattgtgccattgcattccagcctgggcaacagagcaagtctctgtctaaaaaataaaaaaaaaaaatttgaaaatcaaaaacttagggtatttagaattaacacttttttttttttttttttgagatggagtctcactccgttgcccaggctgaagtgaagtggtatgatcttggctcactgcaacctttgcctcttgggctcaagcgattctcatgtatcagcctcctgagtagctgggattacaagatgatgtgccaccatgcctggttaaattttatatttttagtagagacagggtttcaccatgttggccaggctgatctcaaactcctggtcttcagtgatccacccgcctcggcctcccaaagcattgggattataggcatgagccaccgtgtctggccttaggtatttacactcttaagtcatgtaatgtggttgaggagtataaggaagaatctcattgtaacaactcacatttttagctcacttaatccttatggtaacttgatggggtagatattatccccactttacagatgaggaaactaaggctgggagattgtgacttgctgatgagtacacgagtataaatagaaagagctgagactgattccaattttctttttttttttttttttttgagatggagtcttgctctgtcacccaggctggagtgcagtggcacaatctcggctcactgcaagctccgcctcctgggttcatgcaattctcctgcctcagcctcctgagtagctgggactacaggcgcccaccaacacgcccggctaattttttgtatttttagtagagatggagtttcaccgtgttagccaggatggttgtgatctcctgacctcgtgatccgcccacctcagcctcccaaagtgctgggattacaggcatgagccactgcgcccagcccagattttctggtttgaagtcaactgctccttccatgtctcagtatagttctaagtctgcctcgggcctgaggtgatgagatagtggggaagccttcacaccacctcacttcctcttaaaacagagatcttattgttaccagttttatatgttgaggttctgtgtaagattttttcttgaaaaccactgtgccacactgagcctctacttctactatcactatccccttcacttaaggagcaggaaatcctaggtactcttggtgactcttggtgtaagttgattgttttttttttttccccctccagaatagctggatggttaatagatatttttcttttttcttttcttttatttcattttatttattattattatttttgagataggctggagtacagtggcatgatctgggctcactgcaacctctgcctcccaagttcaagtgattctcatgcctcaacctcctgagtagctgggattacaggtgtccgccaccacgcccagctaatttttttttttgagatggagtctcgctgtctcacctaggctagagtgcaatggcgcgatcttggctcactgcaacctctgtctcccaggttcacgcaattcttctgcctcagcctcctgagtagctgggattacaggcgcctgccaccatgcccatctcatttttgtattattagtagagatggggtttcaccatgttggccaggctggtctcaaactcctgaccttaggtgatctgcctcccttggcctcccaaagtgctgggattatagtcatgagccaccacgcctggcctaatttttttgtaattttaatagaggcagggttttgccatattgcccatgctggtctcaaacttctggcctcaagtgatctgcccaccttggcctcccaaagtgatgggattacaggcatgagccaccatgcctagccttcttttatttttaacagatatttttgagcttggtttgttttccacacataatgttgcatatttctctgtttcaaccttccaaacacaattttccattacctagacaagcatgatacagtatggttttcataggaacttagccatattagaacagggatcaaataaaatcctcaacctgcagagtagaaatgcttgtcagccaatttgagttctttgagctcaggagcgtcccatagttgtttaggtcacaaacgatcactatgcaaggacttgcttcttccttgattagaagtccttattgacttaaatttaccagcaattcaaaatatgcagttgattggtcttatccccactcttcaggttgtactgggaaggtgagctgcagttcaccctgaaggtgtggttttggcctttcaggctattttttctccctcaaatatggactaagcataaatgtagttttgaagctaaaaattagagcctactttaaatagttctcaaaaaaagattatcatttgattgggcacagtctcttatgcgtgccttcaccttgcaagaagctcagatggtaggcccgggcgtggtggctcatgcatgtaatcccagtactttgggaggctgaggtgggcagatcacctgaggtcaggagttcaagaccagcctggccaacatgatgaaaccccgtctctactaaaaatacaaaaaatgagccgggcgttgtggcaggcacctgtaatcccagctactcaggaggctgaggcaggagaatcacttgaacgcgggaggcagaggctgcagtgagctgagattgcgtgccactgcactccacctgggggatagagcaagactctgtctcaaaaaaaaaaaaaaaaaaaaaaaaagctcagatggtatatttatttgtatgcaccacttttcattcctagtaagaatgtgcctgtggcttggaatgacaatatagaggtagtgtcaaattgctgttatgtttctttggctgcaaattctccttgcattccagggttgaaagtacggaacttttctttttctaaaaaacaagacattgtggaaagagaccactgctatgttgtttttcagagagggcttgaaagtttcagcttttcacttggttcctgagatgtagatttgaaggattgtaacctagagcagactttgaaagttataggttacaagccgggcatggtggctagaacacctgtaatcccagcacttcgggaggccaaggtgggcggatcacttgaggccaggagtttgagaccagcctgggcaacctggcaaatccccatctctaccaaaaatacaaaaattagtttggcatggtggtgcgcatctgtaatcccagttactcgggaggctaatacatgagaatcgcttgagcccaggagatggaggttgcagtgagccgagatcacgccactgtactgcagcctgggtgacagagggaaactctgtctccaaaaaaagaaaaaaaaattataagttataaaacataaaggaaccttcccacctcttaaaagaagttgtatatctctgctatggcttgttgataagctcagggcccctcaaagataacacaactgatcatagttgttcactgtattttcaaggctccattgaggaactaatttcctatttttcatgttaattttagatacgtagaacgtcctctgaactcccaatctgtttttcagaaccgttttataaggtacttttacagaacagcaagaggctaagggctataggcaaatgtgtagtgtttattttatttggagtctcgctccgtcacccaggatggggtgcagtggctcggtcttggctcactgcaacctccgcctcccgaggtcaagcaattctcctgcctcaacctccccagtagctgggattataggtgcctgccagcacgcctgtctaatttttgtatttttagtagagacggggtttccccatgttgcccaggctggaaatgtgtagaaatattatcttttcttccaggcttaattttttgcattacacctttcagttttattcagcctgttttgagtctcatgactgttcacgtctgtcaagaagactctattagttatagaacatatgcaggcttcctaaactatgaagagtatttctctgtctctaagagcagtcatctgcatatagcccaaaccgtcttagggtatgtgtgtgtatatgtatgtgtttgggggttagggaacacgatctttagtagccagtttttgtgaccatttacgttacttctatgcactagtgacttggtttctttgctctttccaggtaaatatgcagaggacatttttggagagctctttactcaggcaaatacctttgcctctcgggtaagctcccttgctgagagggtcgaccgactacaggttaaagtcactcagctggatcccaaggaagaagaaggtaagaaagctgagctcagcatttgcaggctctgctgagcagttttgtagaattttttttccctgatttatttaaaaaaaaaaaaacgtgaggagagaaatcacagagacctatagagttctgctttgaaatcacacaagcctgagtgctggaaagaacctttttagctccaccacacccccatgcactcctttctcccattcccccaattccttctttctcaaatttcccctccctcaatcgtattttgctaccataaaagtacttggaagattcattcctcctaaggagaggcctgctagatctggccacatagtaaacctttgtgttgcctcattttgttcagtcgtgaaacgactgggctgctgacagccttgtggggcttccccagagggggagggaaaaaaaaagcctggctgcggacagccacagccaagaagtgcagcagctgaggcctctccgactggtgtgactcagtgtttgctcaaatagcctgtcgtccattttctaacgccttccatcttctctcagtgtcactgcaaggaatcaacacccgaaaagccttcagaagttccaccattcaagaccagaagctttttgacagaaactctctcccagtgcctgtcttagaaacatacaatacctgtgatactcctccccctctcaacaatcttaccccttacaggtaatggctggctagttcctccctttttcaacctatggtttaataacgctagatttttttttgtctgaagcggttgtttccatcagaggattgtatctaaaagcttactgcctaccccaaagttgtggtagtttctgtggcagcagaaactaaaatttacaccataaaaattgtcacttattattgtttggtttctgaaattcatagtgaatataatacatattgaaagtttactgtaaccattgcatgctacagaatttaatttcatataagccaggtccatcttggattccatccaaggaatttagttattatagaaccaaaaggactttgttacaaggcggtcctacagcatggatcatggatcccaggggcaacattctagcaaggctcccacttacttggaaaccactagattaccagatgtttgggtgtgttagtggggccagcctcttggcctggctgctctgggcccaaaggggtctttccaaagcttaaggagtaattcgcattcttccaaatgagcatcgttcactttgttttgaacatcctttggacatttccttctgtaaggacctactctgctgtgcctggacttgaaaaagaaggtagccttatagacaaagcccctctcctctagtggtttggtagttttgtcatcctgcaaaaaaccactgaagaggggcagaaggtgaatatttatcttgcttacacccatatatatctttggagcaggtaaaaagtaattacagatagctggaggcagatgtcttctatcagacatgtgtacactgcaaggtagagtgtgtgtgtgtgtgtacccacgtgaaattcaaggacaccagtcagattcagggagccttctcacacagatataaagtacatggcatctgtccttcattttacttgtaaaattatgtttgccccttggctttcaaagggaccagcatagcaggacagaggtttgactctgcagcctccgttattgagtctagttgggtttgggcagaggggttgtggggcagaaaggggtcatacaactgataatattgtagcgagtataacatagggtttgtgtggtgggattgcataaacaaatgatattaggagaattttattcttcagttaatggtatttttctttttagcatacagtgtcagaattagcgtggcctctcagttatctgaacttggcctaacagaaatgagtggtggtgtatctaactcaggagaagatttaatatagaaattattaatgtttgatttggaagtgctttctgtgttgtgataggattggagggtagggaatagaattgcctttccagttctttttagttcagaataatgttaagataaatgttcactcctaagcacatcctttctggatagtgagaggaccttatccatgccaaaatgcaagattccaactaggaccattgaatctggcagatagcccttatatggacactaagtagtttactctgtcccactggcacagccattaattagaagctggtgattaaaccttgtggtcttacaacagctggccatcttttctcactggagccctcttgtggttggggtgtatgtggatgctgagctgttctagaagggagcaagaaggtggagtgctgtggttggttttctgtgtgtgcagagaaataacagctgtaaaccacacacttttcacgtatatatgtgtacatatgcatacacatgaactcccacatgtgcacacaggtttccggtgggtgggaagctactgatgctttctagagagtccttggggaactggtgggaaaagaggaaccagtggtagaaatcccctctgatgtaccaggaaatccgaatatcctcagggagatctctgtggccatgcagatcatcagaagtaatcaggatccctgctgctatcacctgtacttgccctgacaatgcacattcatctaccaggaattgaaagtaaggctaaggttcttaaaaagtctgataagtagagaggtgccattcgggggcattgaaatgctggtatgggagaggaggtatgcaatcgattcaaatgacttcttgattccttggtgtaaaaactgctaactggtaggtgtttggaatattggatttggttgggagctcatctgtctactgacagctacttgtcttcatttctatcccagggacgatggaaaagaggcactcaaattctacacagacccttcatacttctttgatctttggaaggagaagatgctgcaggacaccaaggatatcatgaaagagaagagaaagcatagggtgaggggaaaggggcctctgttctccacatcagtaggcacgattgtggagggggataaaaaggaagccagtgttatgtgaagtaatcatttcaagtggctgcttgcttggatgccaggtgaaactcttaaaaaaatgtgtccacaccaagcacaaccaagatgaaagtacaaatcataccaaaaatgtgtttgttccccccagtgctattaacaattgagtatattcaggctgagttttagaaattgacttttctattcaccatttatttctcttgcaatttgcacctgactctgctggacactcaagctaggctagtcccttctccactagttttgcagctcatttctcagagatcagcacaaggttctgcagtgtttgatttgcaacaggagcagtttaatgccttcgctacgggctgggcggggctagggtggggggatatatgtaggttttgaagattctccctccccatagactcttcctggtatgtatgtgacctaccagttgcaacctcagtcccattagcatggctgccaggaggcccaagagagtgccaggggcaagagcagctgcacaggcggaaaaattcttcattgatttttgttttgttttgttttgtttaaactatttccttatatgtgccccagataactgcaggtctcattacatctcatctctcttgactgacctttggggctgagcaaataataaatagctgtttactaacatctagcaattagagcttttcaaaaatgtgaatgagttatccaaagaggaagtggggttcccgttgctggaggcatttgagtgtgggattgagcaaatgtttcacccggggatggtttggattagatggcctctgggtcacttcaaacccagtaattctgtaagttctgtagttattgtatgttgtctaggcagattatctcttagatacgcatccatgaagatgggtagaattttaatgaagaacttggaaaatgttctacaaagaccttcctgttccttttcattatagaaagaaaagaaagataatccaaatcgagggaatgtaaacccacgtaaaatcaagacacgtaaggaagagtgggagaaaatgaagatggggcaagaatttgtggagtccaaagaaaagctggggacttctgggtaggtaatgcctttgtactgttggtagcattctttgaaggggctggggacaacagtctgacagctctggtgtgacacctttcacaccccctgaagtctgtctctgtggcttagatcaataccactgttaatcagctactttaaagtgcatccatctggtgatgaaaatttgctaaataaatcaagagattcagcgatttaaatgaggtgattggagtggtctggaaaagaaagcccatggctcctagtgcccttactctgcgagatacacatctaagggccccagaggaaagattggaaagggaagaaaagtggtcttgggaatcctttgcctccagagcattgatttgaaggtcatgcctaagaactgggcatttcactctcagggctggggagggctaggcaagaaagctgttcacatcaccaaagcaacttttcagtcagcctttgtcagtcatgggagagaagctagccaagggactgaatgcagacctcatagacagtgtgggaaaggttgcttggccagtattgaggctatatatctctgtggagaaataagaggtgtcagtctgaccccatttcccaataccaaatcacactggaggtttaaagggggaaaaagatggttttaaagcttggtttgatgcttatcctggtgtctgacctggttgacattcaaagccaagtcaccatgactgcttggcatgaatgtcgccctggttttttctctaaatacactgcatcatggctgtcagagaaccatgccagcccatgctgggtgtctaggaatgataaaaggaaagagttgagttgttcttgcttttagaaataactctaccatgaaaatcttgacttttaaaaatcttgacacttctgacacttgttcttcgtggattaagagctctgctttaaagagtgatgaagatggtgaaaggaaaaaatgaacctttttctctactgggaaatcagccctgagggtaccttcattaccttcacctcccagtaaagggggacattttgttccacggaccaatcctgttcagacaggcacttgtcataggttcaatgactctaaggccagaagcttatgtgttcagaatgccagctacccatgtgtgtcttctttttgtggagtaggaagatgaggatttgccttccattttcctgttgtccaggcggtttggagttggggcttcatggttagtctatctggacatgcctgttggtgaacctataaagagacgtgccaaggctccagggctccaggccttggggattttccacatcagagcatcttttgattcagttagttttctccaactctgttctccctgaggtctgttttagatgagttctttagaccccaacaatggtggaaagagggggaggtggagcagagcaggccagattttgctagctgatgcttggtgtatttgtgcttgtttgaagttttgttgttgttcacccagaacaaattcacccaaggcccagtgcactgagggacaggttttcatgagacaagccctagcacgctactttaatcgtcagctcatttggtttgataagagacctggcagaaagaccacatttactaccacatagcaccctgcattcatcctcagcttgattttgcaatccagtgcctccttggccttcgagctctccagaggcttgctgacctcaaaatcagtctgtgtgccagtcacgtgtttgcagctcactagcctctgagacttggcttcacatttgtcacaggacagactttgggattcaggtatatctgcacctgacactggggagagaatttaaaagaactgctgggtttgacaaggccaacactgggcaaggaacagcatggttttgataatctgggttgaatcctgttactacaaacaattcagcataaatatctgggatatatttgacaatagaatatttagtcttaaaataaaatttcagtgtaacagaaaatatgtgggaaatatacctattttacttctccctaatagcttttgtatcaaatgcatttttgtagtaccttttaagaagaaaaaacccactcaggctctttaaatgacagtttttggcattcggttcattgtcaggtatccacccactttggtgtaccagaatggcagcattggctgtgttgaaaacgtggatgcaagtagctatccgccaccaccacagtcagactctgcttcttcaccttctccttccttctccgaggacaacttgcctcctccaccagcagaattcaggtaaatggtggtacctactccatccactattggtagttatacacttgagaacaaaagaatggaccaggagcagtggctcacgcctgtaatcccagctctttgggaggccaaggtggtgggaggatctcgtgaggccaaaagttcaagaccagtctgggtaacatagcaagacttcatccctactaaaaatcaaaaaaattagccaagcatggtggcaaacgcctgtggtcccatctactcaggagactgaggtgggaggatcgcttgagcctgggaggttaaggctgcagtgagccatgatcatgccactgcactctagcctgagtgacagagcgagaccaaaaacaaaaacaaacaaaaagttaaaaccctaggtcaagaccactaaaataacttcaaacaagactgtctagataatagaaataattaacactgtatgtatatgttgcttaattctcataggagtcctcttttgaggtaggcactgttactatccccatgttacaatgagtaaactgaggcacagaggggtcaatgaaatgacccaaaggtcacagccagtaagggcagagccctgattggtcagttgaactccagaacctatattcttaactactcctgttttgcctataccgaaacaaatggaaatcaccagcttctttcttgttttttccttaactttattttatttacttatttatttatttttgagacggagtctcactctgtcacccaggctggagtgcaatggcgcgatcttggctaactgcaagctccgcctcccgggttcatgccattctcttgccttagcttctcgagtagctgggactacaggcacccaccaccacgcccagctaattttttgtatttttagtagagacagggtttcaccatgttagccaggatggtctcgatctcctgacctcgtgatccgcccacctcggcctcccaaagtgctgggattacaggcatgagccaccatgcccagccttttccttagctttaactcatcatgaaatgaagtggtacaatctgctgtccatgatatagttagcagttaccttgcccagttgtctaggaacctagcatagagtcacttcctcttagtgcttctggttagtttcactgctgtgtcaaatctccagaaacaatgaaacaaagggaaaagggggatgaaactccaaattcgtccattttgatatttgtgcatgtccctggcagaggtgtacagtggaagtgttaggcagtaatgactgaaaagagatctgagaattgttcagattgcactgttttctccgttacttttgtcctttctgatgcctgataaatgagagctttgaaaggtgcacttttctccttgggtacttcttaattagaaattgagtatgttgaggacccctcggatggagacctaaagctgtgctgtcctccttctctcccctcattcttcttggccctagaaaccattaatcccaaatctccttctgcttcccaaatcacttcctgctggtggccctgtcagatgcagctaaggctggaaggtctgtggaaaattccaaaatggctgcttttctaaggagtagctgttagtgcagggtagatacaaaggtggaaaaagaaaaccttcagcttcacacatggcctgagaccttgcagctgcagccgagcaaatctgatcccaggagaggtgtagctttaatcctctttcaggcctgggtcaggagtctggtggcacattcatttcccatctctgcagattctcggattgagattcattctctctcaagatttccccacatgagcactgaagatgcattcacctaaatctatatcccactcaggtgtggtcagcctggcttgggtttcctgccctctccaatgctggtgaatgttaatagcctgagaaacagagcctagtgtgtgggtggtgtttgaatttttattccagttctttcttgcatgcacccttaaactggctccaggattaaactagcaactgccatggaccatccttcttagggaaggggagggagggtgccttccccttagagctggaaaggcagagggggccgaagagatgtctcagctagcctgtacctgatagaggaatctcaagtccacttcttgcaggtagttttactcaatctgtctatcctcctctactggtgggaagctcattaccttaaaaggctgcttatttcattattggtctgttatgaccatctgtaggcttttctttctgtttaagtgaaagtgaaatggtatagtcaaccaagataaacctcggtctgtagacaaggctaactgtagataggtgtctgcattctaagggtgatggtgagtctttttttctttggccttttagttacccagtggacaaccaaagaggatctggtttggctggacccaaaagatccagtgtggtcagcccaagccatccaccaccagctcctcctctaggctctccaccaggccctaaacccgggtttgctccaccacctgcccctccgccacctccgcctccaatgataggcatcccacctccaccaccgcctgtaggatttgggtctccagggacgcctccaccaccctcacccccatctttcccacctcaccctgattttgctgcccctccacctcctcctccaccaccagcagctgactacccaactctgccaccacctcccttgtcccagccaacaggaggagcacctcctcctccccctcctcctcctcctccggggccccctcctccccctttcactggtgcagatggccagcctgctataccaccaccgctttctgataccaccaagcccaagtcctccttgcctgccgtgagcgatgcccgtagcgacctgctttcagccatccgtcaaggtaaatttcaatggtgggtttgggactgtggagccttgtctttctgaagctgggatgactgattgggggatgggtgagggggtccctgtgcccttcccaggaaacggctttcattgggtggggagagattgggacattaggcctgggagcagcctgagaaaaggcttcaccctaaaaatatggagatttagatttctttccaccttggtttaaagtaaaggattcttttcttttcttttttttttttttttttttttttttttgtgggggacagagtctggctcttttgcccaggctggagtgcagtggctcgatctcggctcactgcaagctctgcctcccgggttcacgccattctcctgcctcagcctccggagtagctggtactacaggcgcctgccaccacgcccggctaatttttttgtatttttagtagagatggagttttactttgttagccaggatggtcttgatctcctgaccttgtgatccgcccgcctcggcctcccaaagtgctgggattacaggcgtgagccaccgcgcccggccaaagtaaaggattcttaagctgggatctttgaagtccttggaaatatatgcttatgtgtgtttgcatgcatttttttttccttggggaaggatccccatttttcatcagtttctccgaagggttttgtgccttcgaaaaaaaacaagaatcactgtcctagtgggtccttgttcaactggactcagcaactccccagccttctccactgctctgcccttcgtgtcttccttccttgccccctgccctctttctaactccttttttctcccattttcttttatctcctcttttctcctcttccctcccctccccttccctcccccttcatcatctcaccctcctggaacattggagcatttattctatcaggggccaggtctggtcccaaggtgttatcgtggtttgttctgtttgtgatcctcaaaaaacttctaatctagagaggacagtctatggcagctgagccccattataattgatggaattgggcaggctgagggtctgctagatggaatgtggtggctgctccccacttcaaagccttatgagaagtcctcaccagcctgaaagtgtgtaaaccagaaaggacagcaggctgcctttcagacacacctgtgacatcagggccatcaatttcataaactcatcttcttctgcttttccataacaaccttctttttctctatcctttccaataccacttacccattggtggccactccctcttacccagttccagatggattccaaggctgaggacacgccttcctcacccttctgtctctttgccactaggttttcagctgcgcagggttgaggagcagcgggaacaagagaagcgggatgttgtgggcaatgacgtggccaccatcttgtctcgtcgcattgctgttgagtacagtgactcagaagatgactcctctgaatttgatgaggacgactggtccgattaactctttctgcctgctgcccaccttctttttctttccttcctacctgccttctttgatgccaaccccaacagacccgtagggggagaaaagggaggaaaaaagtaattttaaggggccaaagctttccctgaagcaaccaaagatatatccaagtgcttcctccaagtcaacatgtatttcctctccccattttcaggccctgtggggctcctgaggttcagtagctgggatgttccctctttccttcaagtgcctgttgcatattgaaaggaaggagaaatcccaaagcagattcctttgatcgggtttctgttggagatggggcttcccttaggagccatattcaactacagccttctaaaacctgtgccctcagccacttcgaatgccagccaccttctggttctaaaacggggagtggtctgaatgaacacagctgacccctttcccgcgcactgaaagggcagagtaggccgaagggtccaagggccagactgcctcaccctctgccctaatcagcagggtgggcctgccttttgctaagcgatctctatgcctgggatgccctttattccaggaggcatcaagcctctaaagaatgtctcacctcctctgcccaaaaatgatgcctttctgtaggctggtgttgttgcctccctcccaggatccctttggtgagtatggtgttcaggatgcaccaccaccacctctagataccttcaggcaacacagcccagttttaacctctagtatccatgaccaaactatccctgacacatgaggacaggggcctcttctggctgtcaggagcaaagcctgaagacttggagctgcaggactggaagaacagtggagccccgtgggtctcaccctttaaggatgctgaggcctagagatgggaagtgacttgctcaaggtcacacaattggatagtgacatagctagagcgcagagttcctgattccaagtcacctgtgctttctgggaccaaagaatgggcacctgctggagtccgggcagagctttctcagttgtattgctactccagacctcaccataggttggggtcccagtaggaaggctcagggtctgtgccagccctgtcggtgctgctcagaccttcatagcctctcttgtcattctttgttgccccttttctgtcaccagccaaccacatagccttgggaccagcctctctgggggaccagaagtagtgagagaaggaaggggataggcagctttgacaggtgctgctttcaattcctctgcaactcctcccccttttatttccccaatttaaacaaagattctgccaactgtggaaacttcagtccctcaggctggcagccatgccagtacctgcctgggggtggggggtgcctggcagccatgaagcaggctgaaaggcagaggggctccaggtcctgtttccagctcccctcactgcacatggtgaagctcgctccctccctccctcccttcccgcttttcccagagctaatacacaggtgctattattcagaaaaaaactggtcagctctagccaacagtgaggtttcttttcttctgccctaactattgtgtagcctcttatgctgaaatcggcttctgctggcttctccggctttcagagccctgaaacaaagagaaacaggatctgtccctacccagcacagcaaatggttgtagtaattgccaaagccctcataaagccctccggcttgaggagagagtgtatagtcatgggttctgcctctgtgcccttgctggccgcttctcctctgccttctttcctggaactcagggtgtggggactgagcctgtaggggacagcatgccgtcttgctgtggccactcccaagtgtgccctcttccctctttacacatcaggtgtctctggcacaggacttggcactaagctccatgctgagacaccaggctatgtgggcccccaccttgtttcccagcctgcaccttagaagccgaaggtgctttcatcagaaccctaaaatggtcgttgaaggcgcctgggccgcagcccagcagtagttggagaggcaggcagagggcagtggttctcccaaataggagacctggggcctggccaggccagggtttgggcctaatggctttgactaaattacccccatcctccttgcccggaaaagggagagctagagccactcactgtcattctgctctgaccttgaagggggcggtgttggcctggcttctggaatggactgagtccatcgtggaaagggctgggggcaggaggaggtggggaggggcactgcctgcggaaggtaggattagatcattagctcagtgacctcctagggtttcgatgtgctatgttctcatcctacagttggtttggtaatgatctgcaagtcccggagagcaacagcacagctctgcctgacgctctcattaaaatctatgcagccaagctcggcactttgtagcagccggccttgcgaagcctcctcagctcggggggccggggacccagtgagccgagaggccctctgggctccacttatgcatatgcaccaaaaaaacaccaaaaaaaaaaaaaaaaaaaaaggcttctttagacccagagccctttaagatgataaaggacccaatgcaggtaatcctgtttttggactcacgtaatgtagaatgcaaagtttagtgattatttaatctgggcctaagctagtgagagtatggaacaatggcccataaggactcctaagcgccgaagccaaggagcctcctcccttcctggttcaccccgcccaagggacctgcccccattcctgtggccctggggcccagcttccaatagtgtcagaagcaacttgtggctttgccttggttgtgagatgggtacattccaaaggagcagcctgggggagggggcaggctcagccagcccttggaggctcagagcagctggcccaggctccagctcgcctccagtggaagcccgagcgccctcagaaacgaccctggccaatgtcaacgcagagccgaggcggtgttgtcacagctaatgtgaaatctcttcccgtggcgcccatcctctgactctgcagtgccagcttggacagattgaggtctctgtggctttggtgaccctgcttaagcattcccaccgtgtcccagctctgctctaggactgcctcccactgcggcccctcacctgacttcagggtatggggagggagggagccagtgctccaaggccagggggctttgctcatgagagatgtcaggcttcctggaggcatcaggctttgagccctgctggggtccaactgacctgggaccaggtgtcgcgcagagatgtgcctcattctgtgcctccttctgtgcctcctaccatgttccctttaactgtgcctcagtgtgggttagggaacaattttgttattgtattaagtttattcagttaattcacttgaggaactaaccagtttttactttctgtctagaatgatgtacatgtagtagagtaagccataatgctcccaaagtgccttgttttctctgatacaaacatatttataaggacatattcctgtgggttcttgggtgtgtttgccacatcaagattttagggaaggggggtatatgtgtagtagggatgccgtttgaaaacaggcactcttcccctgaggatgggaaaggagctcttcagttggagatctaggcagtgggttaagccagacccctaaagtgaccctttcctcttctgccctattcttctcagaccctcagaaagacatccaatttttttaaatccctgtagctccaagcctggtctcatttgcttccctgccaggctcatcgtgtgtataccacatttgtgccccactgacctgaaggttccatgtaactgtatacacatgaatacttaaatgccaacatttaaaataatttgataaagtctttgtagccactcagccacctctggtgtttgtggtattgttttaatgggacaagagattagaaggaaatgacactaacagccacaggtggtggccagagctcaggaggggctccagtgtgggtgggcctaaagggcaggaggcttttgggtgtggaaagtgcattgtgtgcagaggtggagaaggctggaaaccatttcagtttaggaggagacccaggttggaggacctgcagacccagatacccagtccccttctcaccatgagaaagggggtgtgctggggcctcaggagacaatctgctggcaactgtttgcatcaggcaggagaggagtacaggctgaatgctgatgctgcgcccaacatctggccggcatcttgtctgcctctcagacccaagcaacttaccttaaatagaacgatttacaatggaatccgataaaaggtttaggctgctgcacgccccttctcctgcctgaggaaggcgaggcggctgggtttgtattctgacccaaaaaatgacctacccaggaagcaacggttgttccgagcacagctgctgcgggtaactgtccctgggggtaatttatgagcagacacccagttccgggcccagcagacacagtgtagtggcccccgggagaggggcgggagcagagttggtgactgcgggtcacgcctgctgttcggagagagagtcacccactggcatcccaggagaggcggcagaagttttgaattgtcagcaactgctgcgccagccgctctgagctcatcgctggaggtggtggtgcagagaagggggccgcggagccagttcgcccttgcagagcccctttgctccacccgcctgctcaggcctgtgtttagtcagcacttggcttccctaggccggtgactgacaggcagccagacacccgccctggcagaagacaaaatggtggttcgggagccgcccttgctagggaattggagggaaggaatgtggctttgggaagcaagaggcctgagcttgaattctggccctgccactcggaagctgtgaccctgtgcaagtcgcttcacctccttgggctgatcctgagaagaataagcatttattgagcgcccactacctgccaaagactgcatatcttttatttcattcttaagaggcaagggtcccccattttacacagaagagaaacagattcacagttgcctaagatcacatagctggccaggaacagaacgtggttcaaacacaggcctctctctagccagagcccaatgctctgtttaccatgcaactgaaacggcttgagtctccatccaaaatcattgagggctttaacgttgtagggagcctgttaaaggtttccattcttacctgccccactccctggtgcccagttttataagggcagtgaacggtgatggtcatttttgctctcgctttgaaatcaagtgagcttggctgagggcctggctatcccagacctttagagcaggaagtgcctgcacccttggctacctaagaagaaagtgggttccctataggtatgggctggggcttcacagagacacgtgagtgggcacatgaggaccggtgcacatatcgtgcacagatccctgttgtttgcacaaggacacaaaccagcacatgatttcaggaacccataatcgcaggcagccctcacacattcctcgggagccgccctccctacttgctgcctccaccagttcctcactgccccctcctggctgcccagtggccagggcaacctggcaccatttcctggaagttctgctcggggctagttgtcaaccagttccctcctagatcatggggctgggagcagtttcaggtgctcccactgaactgcccctcagccccaggaggtgtgggcgcttaaagggtgctcttgaagcttaaggacaaaaagcctttcatgggccaggcacggtggcctacacctgtaatcccagcactttgggaggccaaggtaggtggatcacttgaagtcaagagttcaagaccatcctggccaacatggtgaaaccccgtcactactaaaaatacaaaaattagccagacttggtggcgtgcgcccgtggtctcagctacttgggaggctggggtacaagaatcgcttgaacccgggaggtggaggctgcagtgagctgagattgtgccactacactccagcctgggcaacagagcgggacttcatctcaaataagtaaataaataaataagcctttcacatccaaaggaatcttttatgggagaattgccagtcccttgatgacagggagagtggttaatatttggggcaaggggtcctgcctagctgccttccctgcctttacctaagaagctgtccgtgcatgtccacggtatgcacacacgagctcacactgcacacatcattaaaaaggagcagacttcctggctgagaagtcagaggtcagatctagctcccaccttgggcctcagcttcctcacctattcaacaaagagttgactgtgatgatgtatgtagcccctccactctggcgttgcaccatcttgggaactgatgccgctcccagagtgtgtgtcttggaaggattacaaatacaacgccttttgttctattttatagatgaggaaacaagatacagagagccacagcaacttgcctgaagtcacacagcaagctagcagcagacatggaaatagaaactttttttccaatgccctagactgcctacaagagagcagaacaccttgtgggcttgagccacagccaaggagactgaaactgcaagggaagccagaatctctggccttttgtgttggaaccatgacagggtccatgtggctgcctgaaggcttagggggagtccagaggaggtcccaggacctctccccaggaggctggggagagacaggttggaacttgagtgggttccatcactccctatccccaccagtagactgagcaaacctcaagcttttatgtaaagccagaggctagctaaagagggttctccctagcgtgcggccatttggtagcttgttcatcagggcatatacacgcatgtgagcggtgtgcatggatggatgtgcatgcatatctggactccacatgtataaatcataatgtggatagtagttggatgttggtgcatgcctgcaagcacacttagaaccttcatgggcatgtgtaatgtgtaagtgtatgtgtttgtgagcccatatacatgcaactgcattcgtgtgtttggatgtacatatataaatgatgtctgcatatctggcgggtgactatgaacatatgaaattttgcttgcatgcatacttggtacatttatgagtgtacttgggtctgtgcagatgttcacctgttagtgtgccaagtggggtggaatatgtctgcacacatggctggtgagtgtgtgtaaatgtgcatgcagggctggcttcaggtgactgtgtagataatgaatcataggagtgccctcccaagagagtatgaagccagtgttctgcccagccctggaatagggggtgcactacctggctccagccagtcacaatgcagggcttgcagtacccccaccctcaccctcaacatgcacagtattccctagacccatcctgcttggccaatttgcagcctcttgctcccagctcctgagaaggcctgcagcaaagtcaaggggctggtggccaattagcgagggggttaatcatggatcggaggccccccggggggcgggaagctgaaggcaggcattggggttggcagggccatgagctgcctgtgatgacgcaaggagagagggaagacaaggagcggaggttgagccagcccgttggttctggaaaccgagggtcagcctgtaaattcaggattgctgagcactgccagcagcggggaacatttgcaagtgtgtgtacgctgtgtgtgaaagggcgtgcacatgcattcattcaagtccttgaatctggtgctgcatgcaaatgtgtatacatgactatggacattatatgcagtgcggttttgtgtatatgtggctgtgctaatgggtttaggtatgcatacatggttgttgtgcctgtgtacacacacacaagggtgtgtacatgtgtgcaagggcatgtacattgaagtgtgtgcttcagcactaaatatgcacagaaagttgacatggtcagtgtacacatgtgcagtgatgtatctgtgtgcacaagtgtgtgtgtgctagtgtgcaggtgcatctgggtatacctacatacatgtctgcctgtgtgtgtgttctcagaacagccaggtgcctatacatgtgtgcctgcatgtgacatgagtgtgtgtctgtgcacgcaggtctcagcatggaaggagctgggggatgcgggactggcggtctccaggctccaggagggaatctgacagccgagccttgccgcagcccccagccccgggagcctgttttccagcctgcggaagctgtgagcccgtgaactcatcttatattaatagctactgtctcctcacttattgcaaggagaggcggacatggccccggcaggggctcagcactcagggctgcccccacacacccacataggaccaagggaggcggggaggagagatgggctccagccccatcccagggcctaccccagcaggaaggtggggctcttggccctagccttgcctcccccaattcagggggccacgtcaccagctgaccttcctggacccctgtagttgggagggatcaggcatgggggttggaaagctgtcagaggcagagaggctgggaggtgtggctacccctccccaattacacacaagcaaatgcgcgggcgcgcgcgcgcacacacacacacaaagcatgcggtgctgagcagctccaggctgtgggcaccagaggactctgaggcttgaaggagacacaggaggcctcagtctgagtggggaagacacagtcctaccctcagggatcctcaatctgaggcaaaagacatgaccctgttctcaagaggcccccagcctaagggaggagacagctctgctctcagaagttcccagcctgaggggagagacatgactttgtattcaggagcccctagttctgaggagagagaaagatctgccttcaggagccttcggtttgagcagacagacatcccttctctcaggaaccctcaactggaggaaggacacacagccctgtcttcattctgaggagggagggaagacttctctacaaatatttactcaggggaggtgtagtaaggcatattgtatggatcacattctcacagctacaaaagggctcaggcagggaggcttcctggaggaagcatggagtggaggtactgggaagaagtgctaagctgatctgcagaatcctgggaggagggaaaagccagccagccccaccacacacacaggaaccaacctgagggacagattcaaacacccctcaaggtaggcccaggacccaaagcagagaccccagatccagtctgccagaaacacctcagctccagcccacagccacccccagagagacagaggaagcccctcagtgcaggggcccgacacaggccctcccagacacaaggatggcggcaggtcccttcttgggccctggagctggaagctgggctggggaagcaaagggctgagactcacccagggtaggacgggcacctggcctctctcctctggaccttggtggggctcctcaggagcatgatggtggaggcagcaacaaggccctgccctgtgctgtgcctccagaggtctgggtttaacctggagaccccctgctttcccccagcctggggatttaccccagtttccttgcttgatgtttctgggttgttcctgaaacacgctccctcatccaggaaagaaagagatttagagtcaaatgggcctgggttcaaatcccagctcaactccttaccaaccctctgactttggaccaatccaatgtcacctctcagggaggcttttcctgggcaccctaatttaaaaattactcacaccctccccatccttcttcccctgctctttctctgaggacttaccactgtgtaatattacattttgggaaaaactttgtattactatttcccccagctagaatttaagctgtccacaaggacagcagtgaatgaatgaaggcccattactcttggagcctcaacttcttcttttgtaaaatggggaggagcaatggtacccatttgacaaagccacggtgatggtatggaatgtttggcgtgggggaggggcctgctgagtagggacttttcccagggacctgtcaggagggtggggatagaataaagcttggcctgacctggtgcggcctccccgctttgtgcctgggcctattggcatgacgactctcctcagactactgggagggatttttttggttggggggtggggacggaatctcactctgttgcccaggctggagtgcaatggcgcgatcttggctcacagctcactgcaacctctgcctcccgggctcaagcgattctcctgactcagcctcccaagtagctgggattataggctccacatccggctaattttttgtatttttagtagagacagggtttcatcatgttgaccaggctggtctcgaactcctgactcaggtgatctgcccgcctcggcctcccaaagtgctgggattacgggcgtaagccaccacacctggccaagggagggatctttacaccagacaaaagggctctaactctgccagggaaatggagaaaggcctgtgtcctagcctggcacagctgtgcgagtttgagcaaatggttgctcctctttgggcctcgggctcctgtctgtatgtggaggggtgagccagaaatgctccaagagccccacctccaagctttgcccaaaaataaggcttgggaagctgggaggcttggccaatcaaagcttcctcttcagccacaccccaaacctgctgctgccctggcctgatagacacattctttctggggtcagcttcctctcctcaagtacccaaactctgggtcctgcacacatatgtccccaaaggcacacactgatagtcactcacctttgcgtagaaaagctcttctgactccaaaatgaccagaccccctccgaccacttcccaaatgtggccctaaaaatgaaccccaaaataaatcagggtccagctgggtgcggtggctcacgcctgtaatcccagcactttgggaggctgaggcggacggatcacctgaggtcgggagttcgagaccagcctggccagcatggtgaaaccccagtctctactaaaaatacaaaaattagccaggcgtggtggcaggtgcctgtaatcccagctacttgggaagctgaggcaggagaatcgcttgaacccaggaggcggaggttgcagtgagccgagaccacgctattgcactccagtctgggcaacagagcaagactctgtctcaaaaaaaaaaaaaaaaaaaaatcagggtccagaatgtcctaagctccaggcttgggaaggaaggaaatcactcactacacagcacagattctggaaacagatgttcctggctctaccattttttagctgtatggccttgggccagctgctgtccctcactcagcctcagctccctcgtttgtaaaatggagaagacactaccggtgccatgggatgcttattaggcataagcgaggtagcatgtgtgccagacacacagtaggcacccatgattagaaggacctattattggccaggcgcgttggctcacgcctgtaatcccagcactttgggaggctgagacgggtggatcacgaggtcaggagatcgagaccatcctggcttacacagtgaaaccccgtctctactaaaaatacaaaaaaaattagccgggcgtgatggtgggcgcctgtagtcccagctactcgggaggctgaggcaggagaatggcgtgaacccgggaggtggagcttgcagtgagccgagatcacgccactgcactccagcctgggggacagagcgagactctgtctcaaaaaaaaaaaaaaaaaaaaaaaaagtaggacctattattattaaggaaactgacatgctttgagcatattcatcatgtctaagccccacagtggccggtgtgggcaggatgtgagcatccttgacccaggaagagccaagcacccaggttcctgtcaccaggaggaggtaaggtccttgccagtcagtgcccaggtctgagcagaggggcactgacatctgagaaggagtcacctgccagccaccctccaccctctgtccagctccccagatcccccaacaggccccccaggcctggcttgaccctctcattccaggccatcccccatcaggccccactccataccctccacacacacatagggaaacatatttatgacaaaatcattttttattgagttgggttggagacgggaacagggaatgcactgggggccataccccggttggcagaggggtggggtgttggctcgtgccccccctcctttagggcaccgcagggtgaggcttggcccccaggccatggctgtggccctggacgccaggctggagtggagctggggttgcattctggtcccagctgcctggccgggctgcagttttccccaaatggccaccagagggcagtcggaccccagcgcagaggaatttttggttgctcaggtgatggcttcttaaaaaaataaaaaaccagaggctggtgtgttccccttccaaacccgaggagggcaggcctggggagaaggctctggtttctatgatctcttcgataaaaaataatccaaaataataacaaaatacgtggtttctctttcaccctttcccccctccaggaactgaggtcagaaatgggggtgaagggacaagggataccctggtatggcctggatatcaaggtgtgggcctcttttttgccccttaccacccataagtaaatttataaataaataaatcaatcataaatagacactgtctttgtatatgtgcatatataatctttctctctcctatttaggcaactatgtgactaatctctctgactctttagctcagaaattcaaacgtaaagtgacatggtcaaggtcaagtttgggggaagagggacatctgggacttggaatggcactgtaaaactcccagcattctggaattgcaacccagctgggctgtgagacatttctgagtagaacactgaccacctgaacattctggaaccgtggagccagctgggcccccatagggatctgaacagaaccttgaaacacccaatgtcctagaactccagaaccagctgggtctggggggtgtggagctgggggtttggaaagaagccctggagagcctaacattctggaattctgtagtaatcagggttgaagggtcatgaagactcagctagacatcactgggggagcgggatcggaaggggatcttggaagaggaacagcagcagcagacagcccacagcactttctgcacatcctggttgcggaaggcgtagatgatagggttgatcatggagttgtaggtggcagggagcaaggtaagataggtgtagagaggtggagagtgggcatcacccagcaggcagtagacagtgaagggcaaccagcaggcggcaaaggctccaagcaccacggccagtgtggcaatgcccttgcgggtggccacatagtgggaggcaggcagcaggtgccgctgaagggcaatctgctgggcatggcggcagacgatgcggcagatttgggcgtagagctgcagcatgatgccaaacaccatgaagaaggcaatggccagaactaccagatggttcttggagagtggataaaccacgccacatgtggtcaggccatccaggcagttccaggccagcacaggcagcagccccaggcccagggcacctccccacactaaggccagcatcacataggtccgtgtcactgttgtctctgaatag

SEQ ID NO: 225 - DNA, 2678 bp, Homo sapiens
gcggggaatcgcgtaatggcggacacaggcagggcgagcgcggctgggggcgtagcgcgctgagggggtccggccgtttggcagcccgcgaggcggtccgcgggagcacactctgtgcggagactgggcggccggccgacccttcctgtcgctgacggcgactgcgggaggccaggttgtttttcaccattcagaacattgcctgaagcaggtccaccatgccgttagtaacgaggaacatcgagccaaggcacctgtgccgtcagacgttgcctagcgttagaagcgagctggaatgcgtgaccaacatcaccctggcaaatgtcatccgacagctgggcagcctgagtaaatatgcagaggacatttttggagagctctttactcaggcaaatacctttgcctctcgggtaagctcccttgctgagagggtcgaccgactacaggttaaagtcactcagctggatcccaaggaagaagaagtgtcactgcaaggaatcaacacccgaaaagccttcagaagttccaccattcaagaccagaagctttttgacagaaactctctcccagtgcctgtcttagaaacatacaatacctgtgatactcctccccctctcaacaatcttaccccttacagggacgatggaaaagaggcactcaaattctacacagacccttcatacttctttgatctttggaaggagaagatgctgcaggacaccaaggatatcatgaaagagaagagaaagcataggaaagaaaagaaagataatccaaatcgagggaatgtaaacccacgtaaaatcaagacacgtaaggaagagtgggagaaaatgaagatggggcaagaatttgtggagtccaaagaaaagctggggacttctgggtatccacccactttggtgtaccagaatggcagcattggctgtgttgaaaacgtggatgcaagtagctatccgccaccaccacagtcagactctgcttcttcaccttctccttccttctccgaggacaacttgcctcctccaccagcagaattcagttacccagtggacaaccaaagaggatctggtttggctggacccaaaagatccagtgtggtcagcccaagccatccaccaccagctcctcctctaggctctccaccaggccctaaacccgggtttgctccaccacctgcccctccgccacctccgcctccaatgataggcatcccacctccaccaccgcctgtaggatttgggtctccagggacgcctccaccaccctcacccccatctttcccacctcaccctgattttgctgcccctccacctcctcctccaccaccagcagctgactacccaactctgccaccacctcccttgtcccagccaacaggaggagcacctcctcctccccctcctcctcctcctccggggccccctcctccccctttcactggtgcagatggccagcctgctataccaccaccgctttctgataccaccaagcccaagtcctccttgcctgccgtgagcgatgcccgtagcgacctgctttcagccatccgtcaaggttttcagctgcgcagggttgaggagcagcgggaacaagagaagcgggatgttgtgggcaatgacgtggccaccatcttgtctcgtcgcattgctgttgagtacagtgactcagaagatgactcctctgaatttgatgaggacgactggtccgattaactctttctgcctgctgcccaccttctttttctttccttcctacctgccttctttgatgccaaccccaacagacccgtagggggagaaaagggaggaaaaaagtaattttaaggggccaaagctttccctgaagcaaccaaagatatatccaagtgcttcctccaagtcaacatgtatttcctctccccattttcaggccctgtggggctcctgaggttcagtagctgggatgttccctctttccttcaagtgcctgttgcatattgaaaggaaggagaaatcccaaagcagattcctttgatcgggtttctgttggagatggggcttcccttaggagccatattcaactacagccttctaaaacctgtgccctcagccacttcgaatgccagccaccttctggttctaaaacggggagtggtctgaatgaacacagctgacccctttcccgcgcactgaaagggcagagtaggccgaagggtccaagggccagactgcctcaccctctgccctaatcagcagggtgggcctgccttttgctaagcgatctctatgcctgggatgccctttattccaggaggcatcaagcctctaaagaatgtctcacctcctctgcccaaaaatgatgcctttctgtaggctggtgttgttgcctccctcccaggatccctttggtgagtatggtgttcaggatgcaccaccaccacctctagataccttcaggcaacacagcccagttttaacctctagtatccatgaccaaactatccctgacacatgaggacaggggcctcttctggctgtcaggagcaaagccctggtctcatttgcttccctgccaggctcatcgtgtgtataccacatttgtgccccactgacctgaaggttccatgtaactgtatacacatgaatacttaaatgccaacatttaaaataatttgataaagtctttgtagccactca

SEQ ID NO: 226 - protein, 498 aa, Homo sapiens
MPLVTRNIEPRHLCRQTLPSVRSELECVTNITLANVIRQLGSLSKYAEDIFGELFTQANTFASRVSSLAERVDRLQVKVTQLDPKEEEVSLQGINTRKAFRSSTIQDQKLFDRNSLPVPVLETYNTCDTPPPLNNLTPYRDDGKEALKFYTDPSYFFDLWKEKMLQDTKDIMKEKRKHRKEKKDNPNRGNVNPRKIKTRKEEWEKMKMGQEFVESKEKLGTSGYPPTLVYQNGSIGCVENVDASSYPPPPQSDSASSPSPSFSEDNLPPPPAEFSYPVDNQRGSGLAGPKRSSVVSPSHPPPAPPLGSPPGPKPGFAPPPAPPPPPPPMIGIPPPPPPVGFGSPGTPPPPSPPSFPPHPDFAAPPPPPPPPAADYPTLPPPPLSQPTGGAPPPPPPPPPPGPPPPPFTGADGQPAIPPPLSDTTKPKSSLPAVSDARSDLLSAIRQGFQLRRVEEQREQEKRDVVGNDVATILSRRIAVEYSDSEDDSSEFDEDDWSD

SEQ ID NO: 227 - DNA, 5659 bp, Homo sapiens
gcggggaatcgcgtaatggcggacacaggcagggcgagcgcggctgggggcgtagcgcgctgagggggtccggccgtttggcagcccgcgaggcggtccgcgggagcacactctgtgcggagactgggcggccggccgacccttcctgtcgctgacggcgactgcgggaggccaggttgtttttcaccattcagaacattgcctgaagcaggtccaccatgccgttagtaacgaggaacatcgagccaaggcacctgtgccgtcagacgttgcctagcgttagaagcgagctggaatgcgtgaccaacatcaccctggcaaatgtcatccgacagctgggcagcctgagtaaatatgcagaggacatttttggagagctctttactcaggcaaatacctttgcctctcgggtaagctcccttgctgagagggtcgaccgactacaggttaaagtcactcagctggatcccaaggaagaagaagtgtcactgcaaggaatcaacacccgaaaagccttcagaagttccaccattcaagaccagaagctttttgacagaaactctctcccagtgcctgtcttagaaacatacaatacctgtgatactcctccccctctcaacaatcttaccccttacagggacgatggaaaagaggcactcaaattctacacagacccttcatacttctttgatctttggaaggagaagatgctgcaggacaccaaggatatcatgaaagagaagagaaagcataggaaagaaaagaaagataatccaaatcgagggaatgtaaacccacgtaaaatcaagacacgtaaggaagagtgggagaaaatgaagatggggcaagaatttgtggagtccaaagaaaagctggggacttctgggtatccacccactttggtgtaccagaatggcagcattggctgtgttgaaaacgtggatgcaagtagctatccgccaccaccacagtcagactctgcttcttcaccttctccttccttctccgaggacaacttgcctcctccaccagcagaattcagttacccagtggacaaccaaagaggatctggtttggctggacccaaaagatccagtgtggtcagcccaagccatccaccaccagctcctcctctaggctctccaccaggccctaaacccgggtttgctccaccacctgcccctccgccacctccgcctccaatgataggcatcccacctccaccaccgcctgtaggatttgggtctccagggacgcctccaccaccctcacccccatctttcccacctcaccctgattttgctgcccctccacctcctcctccaccaccagcagctgactacccaactctgccaccacctcccttgtcccagccaacaggaggagcacctcctcctccccctcctcctcctcctccggggccccctcctccccctttcactggtgcagatggccagcctgctataccaccaccgctttctgataccaccaagcccaagtcctccttgcctgccgtgagcgatgcccgtagcgacctgctttcagccatccgtcaaggttttcagctgcgcagggttgaggagcagcgggaacaagagaagcgggatgttgtgggcaatgacgtggccaccatcttgtctcgtcgcattgctgttgagtacagtgactcagaagatgactcctctgaatttgatgaggacgactggtccgattaactctttctgcctgctgcccaccttctttttctttccttcctacctgccttctttgatgccaaccccaacagacccgtagggggagaaaagggaggaaaaaagtaattttaaggggccaaagctttccctgaagcaaccaaagatatatccaagtgcttcctccaagtcaacatgtatttcctctccccattttcaggccctgtggggctcctgaggttcagtagctgggatgttccctctttccttcaagtgcctgttgcatattgaaaggaaggagaaatcccaaagcagattcctttgatcgggtttctgttggagatggggcttcccttaggagccatattcaactacagccttctaaaacctgtgccctcagccacttcgaatgccagccaccttctggttctaaaacggggagtggtctgaatgaacacagctgacccctttcccgcgcactgaaagggcagagtaggccgaagggtccaagggccagactgcctcaccctctgccctaatcagcagggtgggcctgccttttgctaagcgatctctatgcctgggatgccctttattccaggaggcatcaagcctctaaagaatgtctcacctcctctgcccaaaaatgatgcctttctgtaggctggtgttgttgcctccctcccaggatccctttggtgagtatggtgttcaggatgcaccaccaccacctctagataccttcaggcaacacagcccagttttaacctctagtatccatgaccaaactatccctgacacatgaggacaggggcctcttctggctgtcaggagcaaagcctgaagacttggagctgcaggactggaagaacagtggagccccgtgggtctcaccctttaaggatgctgaggcctagagatgggaagtgacttgctcaaggtcacacaattggatagtgacatagctagagcgcagagttcctgattccaagtcacctgtgctttctgggaccaaagaatgggcacctgctggagtccgggcagagctttctcagttgtattgctactccagacctcaccataggttggggtcccagtaggaaggctcagggtctgtgccagccctgtcggtgctgctcagaccttcatagcctctcttgtcattctttgttgccccttttctgtcaccagccaaccacatagccttgggaccagcctctctgggggaccagaagtagtgagagaaggaaggggataggcagctttgacaggtgctgctttcaattcctctgcaactcctcccccttttatttccccaatttaaacaaagattctgccaactgtggaaacttcagtccctcaggctggcagccatgccagtacctgcctgggggtggggggtgcctggcagccatgaagcaggctgaaaggcagaggggctccaggtcctgtttccagctcccctcactgcacatggtgaagctcgctccctccctccctcccttcccgcttttcccagagctaatacacaggtgctattattcagaaaaaaactggtcagctctagccaacagtgaggtttcttttcttctgccctaactattgtgtagcctcttatgctgaaatcggcttctgctggcttctccggctttcagagccctgaaacaaagagaaacaggatctgtccctacccagcacagcaaatggttgtagtaattgccaaagccctcataaagccctccggcttgaggagagagtgtatagtcatgggttctgcctctgtgcccttgctggccgcttctcctctgccttctttcctggaactcagggtgtggggactgagcctgtaggggacagcatgccgtcttgctgtggccactcccaagtgtgccctcttccctctttacacatcaggtgtctctggcacaggacttggcactaagctccatgctgagacaccaggctatgtgggcccccaccttgtttcccagcctgcaccttagaagccgaaggtgctttcatcagaaccctaaaatggtcgttgaaggcgcctgggccgcagcccagcagtagttggagaggcaggcagagggcagtggttctcccaaataggagacctggggcctggccaggccagggtttgggcctaatggctttgactaaattacccccatcctccttgcccggaaaagggagagctagagccactcactgtcattctgctctgaccttgaagggggcggtgttggcctggcttctggaatggactgagtccatcgtggaaagggctgggggcaggaggaggtggggaggggcactgcctgcggaaggtaggattagatcattagctcagtgacctcctagggtttcgatgtgctatgttctcatcctacagttggtttggtaatgatctgcaagtcccggagagcaacagcacagctctgcctgacgctctcattaaaatctatgcagccaagctcggcactttgtagcagccggccttgcgaagcctcctcagctcggggggccggggacccagtgagccgagaggccctctgggctccacttatgcatatgcaccaaaaaaacaccaaaaaaaaaaaaaaaaaaaaaggcttctttagacccagagccctttaagatgataaaggacccaatgcaggtaatcctgtttttggactcacgtaatgtagaatgcaaagtttagtgattatttaatctgggcctaagctagtgagagtatggaacaatggcccataaggactcctaagcgccgaagccaaggagcctcctcccttcctggttcaccccgcccaagggacctgcccccattcctgtggccctggggcccagcttccaatagtgtcagaagcaacttgtggctttgccttggttgtgagatgggtacattccaaaggagcagcctgggggagggggcaggctcagccagcccttggaggctcagagcagctggcccaggctccagctcgcctccagtggaagcccgagcgccctcagaaacgaccctggccaatgtcaacgcagagccgaggcggtgttgtcacagctaatgtgaaatctcttcccgtggcgcccatcctctgactctgcagtgccagcttggacagattgaggtctctgtggctttggtgaccctgcttaagcattcccaccgtgtcccagctctgctctaggactgcctcccactgcggcccctcacctgacttcagggtatggggagggagggagccagtgctccaaggccagggggctttgctcatgagagatgtcaggcttcctggaggcatcaggctttgagccctgctggggtccaactgacctgggaccaggtgtcgcgcagagatgtgcctcattctgtgcctccttctttccctttaactgtgcctcagtgtgggttagggaacaattttgttattgtattaagtttattcagttaattcacttgaggaactaaccagtttttactttctgtctagaatgatgtacatgtagtagagtaagccataatgctcccaaagtgccttgttttctctgatacaaacatatttataaggacatattcctgtgggttcttgggtgtgtttgccacatcaagattttagggaaggggggtatatgtgtagtagggatgccgtttgaaaacaggcactcttcccctgaggatgggaaaggagctcttcagttggagatctaggcagtgggttaagccagacccctaaagtgaccctttcctcttctgccctattcttctcagaccctcagaaagacatccaatttttttaaatccctgtagctccaagcctggtctcatttgcttccctgccaggctcatcgtgtgtataccacatttgtgccccactgacctgaaggttccatgtaactgtatacacatgaatacttaaatgccaacatttaaaataatttgataaagtctttgtagccactca

SEQ ID NO: 228 - protein, 498 aa, Homo sapiens; identical to SEQ ID NO: 226

SEQ ID NO: 229 - DNA, 5080 bp, Homo sapiens
gcggggaatcgcgtaatggcggacacaggcagggcgagcgcggctgggggcgtagcgcgctgagggggtccggccgtttggcagcccgcgaggcggtccgcgggagcacactctgtgcggagactgggcggccggccgacccttcctgtcgctgacggcgactgcgggaggccaggttgtttttcaccattcagaacattgcctgaagcaggtccaccatgccgttagtaacgaggaacatcgagccaaggcacctgtgccgtcagacgttgcctagcgttagaagcgagctggaatgcgtgaccaacatcaccctggcaaatgtcatccgacagctgggcagcctgagtaaatatgcagaggacatttttggagagctctttactcaggcaaatacctttgcctctcgggtaagctcccttgctgagagggtcgaccgactacaggttaaagtcactcagctggatcccaaggaagaagaagtgtcactgcaaggaatcaacacccgaaaagccttcagaagttccaccattcaagaccagaagctttttgacagaaactctctcccagtgcctgtcttagaaacatacaatacctgtgatactcctccccctctcaacaatcttaccccttacagggacgatggaaaagaggcactcaaattctacacagacccttcatacttctttgatctttggaaggagaagatgctgcaggacaccaaggatatcatgaaagagaagagaaagcataggaaagaaaagaaagataatccaaatcgagggaatgtaaacccacgtaaaatcaagacacgtaaggaagagtgggagaaaatgaagatggggcaagaatttgtggagtccaaagaaaagctggggacttctgggtatccacccactttggtgtaccagaatggcagcattggctgtgttgaaaacgtggatgcaagtagctatccgccaccaccacagtcagactctgcttcttcaccttctccttccttctccgaggacaacttgcctcctccaccagcagaattcagttacccagtggacaaccaaagaggatctggtttggctggacccaaaagatccagtgtggtcagcccaagccatccaccaccagctcctcctctaggctctccaccaggccctaaacccgggtttgctccaccacctgcccctccgccacctccgcctccaatgataggcatcccacctccaccaccgcctgtaggatttgggtctccagggacgcctccaccaccctcacccccatctttcccacctcaccctgattttgctgcccctccacctcctcctccaccaccagcagctgactacccaactctgccaccacctcccttgtcccagccaacaggaggagcacctcctcctccccctcctcctcctcctccggggccccctcctccccctttcactggtgcagatggccagcctgctataccaccaccgctttctgataccaccaagcccaagtcctccttgcctgccgtgagcgatgcccgtagcgacctgctttcagccatccgtcaaggttttcagctgcgcagggttgaggagcagcgggaacaagagaagcgggatgttgtgggcaatgacgtggccaccatcttgtctcgtcgcattgctgttgagtacagtgactcagaagatgactcctctgaatttgatgaggacgactggtccgattaactctttctgcctgctgcccaccttctttttctttccttcctacctgccttctttgatgccaaccccaacagacccgtagggggagaaaagggaggaaaaaagtaattttaaggggccaaagctttccctgaagcaaccaaagatatatccaagtgcttcctccaagtcaacatgtatttcctctccccattttcaggccctgtggggctcctgaggttcagtagctgggatgttccctctttccttcaagtgcctgttgcatattgaaaggaaggagaaatcccaaagcagattcctttgatcgggtttctgttggagatggggcttcccttaggagccatattcaactacagccttctaaaacctgtgccctcagccacttcgaatgccagccaccttctggttctaaaacggggagtggtctgaatgaacacagctgacccctttcccgcgcactgaaagggcagagtaggccgaagggtccaagggccagactgcctcaccctctgccctaatcagcagggtgggcctgccttttgctaagcgatctctatgcctgggatgccctttattccaggaggcatcaagcctctaaagaatgtctcacctcctctgcccaaaaatgatgcctttctgtaggctggtgttgttgcctccctcccaggatccctttggtgagtatggtgttcaggatgcaccaccaccacctctagataccttcaggcaacacagcccagttttaacctctagtatccatgaccaaactatccctgacacatgaggacaggggcctcttctggctgtcaggagcaaagcctgaagacttggagctgcaggactggaagaacagtggagccccgtgggtctcaccctttaaggatgctgaggcctagagatgggaagtgacttgctcaaggtcacacaattggatagtgacatagctagagcgcagagttcctgattccaagtcacctgtgctttctgggaccaaagaatgggcacctgctggagtccgggcagagctttctcagttgtattgctactccagacctcaccataggttggggtcccagtaggaaggctcagggtctgtgccagccctgtcggtgctgctcagaccttcatagcctctcttgtcattctttgttgccccttttctgtcaccagccaaccacatagccttgggaccagcctctctgggggaccagaagtagtgagagaaggaaggggataggcagctttgacaggtgctgctttcaattcctctgcaactcctcccccttttatttccccaatttaaacaaagattctgccaactgtggaaacttcagtccctcaggctggcagccatgccagtacctgcctgggggtggggggtgcctggcagccatgaagcaggctgaaaggcagaggggctccaggtcctgtttccagctcccctcactgcacatggtgaagctcgctccctccctccctcccttcccgcttttcccagagctaatacacaggtgctattattcagaaaaaaactggtcagctctagccaacagtgaggtttcttttcttctgccctaactattgtgtagcctcttatgctgaaatcggcttctgctggcttctccggctttcagagccctgaaacaaagagaaacaggatctgtccctacccagcacagcaaatggttgtagtaattgccaaagccctcataaagccctccggcttgaggagagagtgtatagtcatgggttctgcctctgtgcccttgctggccgcttctcctctgccttctttcctggaactcagggtgtggggactgagcctgtaggggacagcatgccgtcttgctgtggccactcccaagtgtgccctcttccctctttacacatcaggtgtctctggcacaggacttggcactaagctccatgctgagacaccaggctatgtgggcccccaccttgtttcccagcctgcaccttagaagccgaaggtgctttcatcagaaccctaaaatggtcgttgaaggcgcctgggccgcagcccagcagtagttggagaggcaggcagagggcagtggttctcccaaataggagacctggggcctggccaggccagggtttgggcctaatggctttgactaaattacccccatcctccttgcccggaaaagggagagctagagccactcactgtcattctgctctgaccttgaagggggcggtgttggcctggcttctggaatggactgagtccatcgtggaaagggctgggggcaggaggaggtggggaggggcactgcctgcggaaggtaggattagatcattagctcagtgacctcctagggtttcgatgtgctatgttctcatcctacagttggtttggtaatgatctgcaagtcccggagagcaacagcacagctctgcctgacgctctcattaaaatctatgcagccaagctcggcactttgtagcagccggccttgcgaagcctcctcagctcggggggccggggacccagtgagccgagaggccctctgggctccacttatgcatatgcaccaaaaaaacaccaaaaaaaaaaaaaaaaaaaaaggcttctttagacccagagccctttaagatgataaaggacccaatgcaggtaatcctgtttttggactcacgtaatgtagaatgcaaagtttagtgattatttaatctgggcctaagctagtgagagtatggaacaatggcccataaggactcctaagcgccgaagccaaggagcctcctcccttcctggttcaccccgcccaagggacctgcccccattcctgtggccctggggcccagcttccaatagtgtcagaagcaacttgtggctttgccttggttgtgagatgggtacattccaaaggagcagcctgggggagggggcaggctcagccagcccttggaggctcagagcagctggcccaggctccagctcgcctccagtggaagcccgagcgccctcagaaacgaccctggccaatgtcaacgcagagccgaggcggtgttgtcacagctaatgtgaaatctcttcccgtggcgcccatcctctgactctgcagtgccagcttggacagattgaggtctctgtggctttggtgaccctgcttaagcattcccaccgtgtcccagctctgctctaggactgcctcccactgcggcccctcacctgacttcagggtatggggagggagggagccagtgctccaaggccagggggctttgctcatgagagatgtcaggcttcctggaggcatcaggctttgagccctgctggggtccaactgacctgggaccaggtgtcgcgcagagatgtgcctcattctgtgcctccttct

SEQ ID NO: 230 - protein, 498 aa, Homo sapiens; identical to SEQ ID NO: 226

SEQ ID NO: 231 - DNA, 4905 bp, Homo sapiens
gttgtttttcaccattcagaacattgcctgaagcaggtccaccatgccgttagtaacgaggaacatcgagccaaggcacctgtgccgtcagacgttgcctagcgttagaagcgagctggaatgcgtgaccaacatcaccctggcaaatgtcatccgacagctgggcagcctgagtaaatatgcagaggacatttttggagagctctttactcaggcaaatacctttgcctctcgggtaagctcccttgctgagagggtcgaccgactacaggttaaagtcactcagctggatcccaaggaagaagaagtgtcactgcaaggaatcaacacccgaaaagccttcagaagttccaccattcaagaccagaagctttttgacagaaactctctcccagtgcctgtcttagaaacatacaatacctgtgatactcctccccctctcaacaatcttaccccttacagggacgatggaaaagaggcactcaaattctacacagacccttcatacttctttgatctttggaaggagaagatgctgcaggacaccaaggatatcatgaaagagaagagaaagcataggaaagaaaagaaagataatccaaatcgagggaatgtaaacccacgtaaaatcaagacacgtaaggaagagtgggagaaaatgaagatggggcaagaatttgtggagtccaaagaaaagctggggacttctgggtatccacccactttggtgtaccagaatggcagcattggctgtgttgaaaacgtggatgcaagtagctatccgccaccaccacagtcagactctgcttcttcaccttctccttccttctccgaggacaacttgcctcctccaccagcagaattcagttacccagtggacaaccaaagaggatctggtttggctggacccaaaagatccagtgtggtcagcccaagccatccaccaccagctcctcctctaggctctccaccaggccctaaacccgggtttgctccaccacctgcccctccgccacctccgcctccaatgataggcatcccacctccaccaccgcctgtaggatttgggtctccagggacgcctccaccaccctcacccccatctttcccacctcaccctgattttgctgcccctccacctcctcctccaccaccagcagctgactacccaactctgccaccacctcccttgtcccagccaacaggaggagcacctcctcctccccctcctcctcctcctccggggccccctcctccccctttcactggtgcagatggccagcctgctataccaccaccgctttctgataccaccaagcccaagtcctccttgcctgccgtgagcgatgcccgtagcgacctgctttcagccatccgtcaaggttttcagctgcgcagggttgaggagcagcgggaacaagagaagcgggatgttgtgggcaatgacgtggccaccatcttgtctcgtcgcattgctgttgagtacagtgactcagaagatgactcctctgaatttgatgaggacgactggtccgattaactctttctgcctgctgcccaccttctttttctttccttcctacctgccttctttgatgccaaccccaacagacccgtagggggagaaaagggaggaaaaaagtaattttaaggggccaaagctttccctgaagcaaccaaagatatatccaagtgcttcctccaagtcaacatgtatttcctctccccattttcaggccctgtggggctcctgaggttcagtagctgggatgttccctctttccttcaagtgcctgttgcatattgaaaggaaggagaaatcccaaagcagattcctttgatcgggtttctgttggagatggggcttcccttaggagccatattcaactacagccttctaaaacctgtgccctcagccacttcgaatgccagccaccttctggttctaaaacggggagtggtctgaatgaacacagctgacccctttcccgcgcactgaaagggcagagtaggccgaagggtccaagggccagactgcctcaccctctgccctaatcagcagggtgggcctgccttttgctaagcgatctctatgcctgggatgccctttattccaggaggcatcaagcctctaaagaatgtctcacctcctctgcccaaaaatgatgcctttctgtaggctggtgttgttgcctccctcccaggatccctttggtgagtatggtgttcaggatgcaccaccaccacctctagataccttcaggcaacacagcccagttttaacctctagtatccatgaccaaactatccctgacacatgaggacaggggcctcttctggctgtcaggagcaaagcctgaagacttggagctgcaggactggaagaacagtggagccccgtgggtctcaccctttaaggatgctgaggcctagagatgggaagtgacttgctcaaggtcacacaattggatagtgacatagctagagcgcagagttcctgattccaagtcacctgtgctttctgggaccaaagaatgggcacctgctggagtccgggcagagctttctcagttgtattgctactccagacctcaccataggttggggtcccagtaggaaggctcagggtctgtgccagccctgtcggtgctgctcagaccttcatagcctctcttgtcattctttgttgccccttttctgtcaccagccaaccacatagccttgggaccagcctctctgggggaccagaagtagtgagagaaggaaggggataggcagctttgacaggtgctgctttcaattcctctgcaactcctcccccttttatttccccaatttaaacaaagattctgccaactgtggaaacttcagtccctcaggctggcagccatgccagtacctgcctgggggtggggggtgcctggcagccatgaagcaggctgaaaggcagaggggctccaggtcctgtttccagctcccctcactgcacatggtgaagctcgctccctccctccctcccttcccgcttttcccagagctaatacacaggtgctattattcagaaaaaaactggtcagctctagccaacagtgaggtttcttttcttctgccctaactattgtgtagcctcttatgctgaaatcggcttctgctggcttctccggctttcagagccctgaaacaaagagaaacaggatctgtccctacccagcacagcaaatggttgtagtaattgccaaagccctcataaagccctccggcttgaggagagagtgtatagtcatgggttctgcctctgtgcccttgctggccgcttctcctctgccttctttcctggaactcagggtgtggggactgagcctgtaggggacagcatgccgtcttgctgtggccactcccaagtgtgccctcttccctctttacacatcaggtgtctctggcacaggacttggcactaagctccatgctgagacaccaggctatgtgggcccccaccttgtttcccagcctgcaccttagaagccgaaggtgctttcatcagaaccctaaaatggtcgttgaaggcgcctgggccgcagcccagcagtagttggagaggcaggcagagggcagtggttctcccaaataggagacctggggcctggccaggccagggtttgggcctaatggctttgactaaattacccccatcctccttgcccggaaaagggagagctagagccactcactgtcattctgctctgaccttgaagggggcggtgttggcctggcttctggaatggactgagtccatcgtggaaagggctgggggcaggaggaggtggggaggggcactgcctgcggaaggtaggattagatcattagctcagtgacctcctagggtttcgatgtgctatgttctcatcctacagttggtttggtaatgatctgcaagtcccggagagcaacagcacagctctgcctgacgctctcattaaaatctatgcagccaagctcggcactttgtagcagccggccttgcgaagcctcctcagctcggggggccggggacccagtgagccgagaggccctctgggctccacttatgcatatgcaccaaaaaaacaccaaaaaaaaaaaaaaaaaaaaaggcttctttagacccagagccctttaagatgataaaggacccaatgcaggtaatcctgtttttggactcacgtaatgtagaatgcaaagtttagtgattatttaatctgggcctaagctagtgagagtatggaacaatggcccataaggactcctaagcgccgaagccaaggagcctcctcccttcctggttcaccccgcccaagggacctgcccccattcctgtggccctggggcccagcttccaatagtgtcagaagcaacttgtggctttgccttggttgtgagatgggtacattccaaaggagcagcctgggggagggggcaggctcagccagcccttggaggctcagagcagctggcccaggctccagctcgcctccagtggaagcccgagcgccctcagaaacgaccctggccaatgtcaacgcagagccgaggcggtgttgtcacagctaatgtgaaatctcttcccgtggcgcccatcctctgactctgcagtgccagcttggacagattgaggtctctgtggctttggtgaccctgcttaagcattcccaccgtgtcccagctctgctctaggactgcctcccactgcggcccctcacctgacttcagggtatggggagggagggagccagtgctccaaggccagggggctttgctcatgagagatgtcaggcttcctggaggcatcaggctttgagccctgctggggtccaactgacctgggaccaggtgtcgcgcagagatgtgcctcattctgtgcctccttct

SEQ ID NO: 232 - protein, 498 aa, Homo sapiens; identical to SEQ ID NO: 226

SEQ ID NO: 233 - DNA, 31705 bp, Mus musculus
  misc_feature (1)...(31705): n = A, C, G or T/U
cggctggaaagcgccgcagaggccgctgactggccgggcgcgacgccgcggagggagccgggcgcctgggcctcccgcgcgcatgggcgcgtcggcggctgcctgaggaaggcagcgaagccagcggagctcaagacctcgcgcgtcccacgagcggctgcggcgggccgcggagccggcgcggccatggcgacgggcactcagcagaaagagaacacgctgcttcatctcttcgccggcgggtgagtctggggcccgagctgctctcgcctcagccccggccttctccccctgcgtgccgtggccttgggaatccgcgtttcccgtccgtcgcggactggggtgaagccaggacgggcagcccaggagggtcgtggcttcggcgtccccaccgcggggtcagccggcacggcggctttccacccggcgcgtccgcggtcccatcccccacccaccggccgcctctcgccgtattctccttttgaacaattcctggctggtgtgactgtcaccaggggcgatcgcgccgagcccctgtggctccggcctcctggcgttttcctgatcacgctgcggtcactcaccgctgcagaggtgcggatgctggaggtcccggggcagctagcccaggaggtactgcgctgggtcagagctgcgggnnnnnnnnnnnnnnnnnnnnnnnnnnnnnnnnnnnnnnnnnnnnnnnnnnnnnnnnnnnnnnnnnnnnnnnnnnnnnnnnnnnnnnnnnnnnnnnnnnnnnnnnnnnnnnnnnnnnnnnnnnnnnnnnnnnnnnnnnnnnnnnnnnnnnnnnnnnnnnnnnnnnnnnnnnnnnnnnnnnnnnnnnnnnnnnnnnnnnnnnnnnnnnnnnnnnnnnnnnnnnnnnnnnnnnnnnnnnnnnnnnnnnnnnnnnnnnnnnnnnnnnnnnnnnnnnnnnnnnnnnnnnnnnnnnnnnnnnnnnnnnnnnnnnnnnnnnnnnnnnnnnnnnnnnnnnnnnnnnnnnnnnnnnnnnnnnnnnnnnnnnnnnnnnnnnnnnnnnnnnnnnnnnnnnnnnnnnnnnnnnnnnnnnnnnnnnnnnnnnnnnnnnnnnnnnnnnnnnnnnnnnnnnnnnnnnnnnnnnnnnnnnnnnnnnnnnnnnnnnnnnnnnnnnnnnnnnnnnnnnnnnnnnnnnnnnnnnnnnnnnnnnnnnnnnnnnnnnnnnnnnnnnnnnnnnnnnnnnnnnnnnnnnnnnnnnnnnnnnnnnnnnnnnnnnnnnnnnnnnnnnnnnnnnnnnnnnnnnnnnnnnnnnnnnnnnnnnnnnnnnnnnnnnnnnnnnnnnnnnnnnnnnnnnnnnnnnnnnnnnnnnnnnnnnnnnnnnnnnnnnnnnnnnnnnnnnnnnnnnnnnnnnnnnnnnnnnnnnnnnnnnnnnnnnnnnnnnnnnnnnnnnnnnnnnnnnnnnnnnnnnnnnnnnnnnnnnnnnnnnnnnnnnnnnnnnnnnnnnnnnnnnnnnnnnnnnnnnnnnnnnnnnnnnnnnnnnnnnnnnnnnnnnnnnnnnnnnnnnnnnnnnnnnnnnnnnnnnnnnnnnnnnnnnnnnnnnnnnnnnnnnnnnnnnnnnnnnnnnnnnnnnnnnnnnnnnnnnnnnnnnnnnnnnnnnnnnnnnnnnnnnnnnnnnnnnnnnnnnnnnnnnnnnnnnnnnnnnnnnnnnnnnnnnnnnnnnnnnnnnnnnnnnnnnnnnnnnnnnnnnnnnnnnnnnnnnnnnnnnnnnnnnnnnnnnnnnnnnnnnnnnnnnnnnnnnnnnnnnnnnnnnnnnnnnnnnnnnnnnnnnnnnnnnnnnnnnnnnnnnnnnnnnnnnnnnnnnnnnnnnnnnnnnnnnnnnnnnnnnnnnnnnnnnnnnnnnnnnnnnnnnnnnnnnnnnnnnnnnnnnnnnnnnnnnnnnnnnnnnnnnnnnnnnnccatttaagatctctgtgcttgcagatgagaaaagaaatgacccctcaaaaagctgctttcagagctctaattggattttagcctaaaacaccttttaaggtagagcatgaaaggagtcagtataaagagggcacagactatagttaaaagttgtcagcccaggggtctggtaagccctttcctctgttgttagctggcatctctccagagagctaagttcaatgcctttgagaagtctgagatcttgcttttaaaatctgttgcgtttcccttgtttgttgaataatcattgaaggctatgttcccaaacagatttaacgatatccctgattataataatataaacaagttttgttttttggagacaaggtctagaactcacagagatcttctgtctctgcttctacctcccaagtaccacgattaaagatatgtgccaccaggtcctggtaatacacttctactagctatcagaggcttataaattaatataactagtgaaaatctattttagatcctggaaaaaaaacagactgcaccaaaacaattcatagtcttttttgtttgtttgtttgtttttggtttttggttttccagagagggtttctctgtgtagccctggctgtcctggaactcactctgtagaccaggctggccttgaactcagaaatctgcctgcctctgcctcccaagtgctgggatcaaaggcgtgtgccaccactgtccggccaactcatagtctttaattttttttttcttaaaggaacaagtttctggattatttcccaagattatttcctatattaacatatactagtcagattttcagtgtagcatgttgccctcagaaaagagaacagaaaggccaccacagaccaaaatctagaaataagcactttgggaaaggttccgagtgtatatatgccccaacccaattttatactaactttaaatataagattgagttgtttctgtttgtttattttgtgtgagcaggtctggaattcaccgtatagcccaggctagcctcacactcccagcaatcctgccttagccttctaagtactaggattccaaggcatgagccacgttgcctggctggctaaagcccctgcctgctcttcactttgttttcttcatagtgatgtattgatttccattgtagtgtatttctgagtacagtttacctttagtacatctctgtttaatattcagtcccaagtttatgaagagaccggtgagggcaaatccaatttttaagcccatatgcgagtgggtatccgtgaataaatacaccatcacagagtgaacggcataacttatagcaagctcctaaacacaccgatgacatctttctaatcgccactttgtcccttctcgtgcgctagaaatcatacctgtggagatacagctgctgagccaaaatatcttttagatttgattttatgtgtatggctgttttgtctacagctatatttatgtattacatataagccctatgcccatcaggggctagaagagagtattggatccccttgaactgggtcacagatggttgtgagcggccataatcaagtctggtcctctggaagagcggcatgtactcttaaccacagagccatctctctagtcccaagcggtctcagcattttcgtttgcctcctagcgtgtgctgcatctgtgtggatgaggttcgttctggcattaacagtacctataaggtttgtgctttcctcagtgtcagtgttgtcaaagcactcagacattgttactctaacaaataaagatagaactttaatttcttttgaaatcccattttttttaatgatgattcttaatgttttaaccttccttgtaacccaccacccaccagaggtagtgggaaaaaaaggattggggattgggggtgggggtggaggggatctttggagcaactctggtctgtgttgtctggaaatcagcaattcatatcacaggttagcaggcagcagcagcttgatcaactcacaaacacctcattggctacaccagcagtccagttaggtagagtcaggttagcaaagagcagtgacttgacctagcagagacagccaggcctcagccttggcacaagtcagcaggagagaccagcaggaacaccaggagaggttcttggctgtgcctctcagggaagtgaagatcagtgaagacgtgagacccacaagcattacacagctacctctataagcaagcctaggttagccttcaccactgtccatcaagacctatttatacccttcagtgtccgctccagtgaaacattccttcatgagtctgccttagcctttcacacctgtgtccactttaactacatgtttttttggttttggttttggttttagttttttgagacagggtttctctgtgtagccctggctgttctggaactcactcttgtagaccaggctggcctggaactcagaaatccgcctgtctctgcctcccaagtgctaggattaaaggtgtgcaccaccactgcccagccttttaactacatgtttgctccagcaaaacaccatccaaccaactttccaaagaacccttaagtttccacttcataaagactaccattcctttctgtggtttaaaccatcccattaagaaaaaaggacaggtgtagtctacagagcaagtccaggacagccagggcttctgttacacagagaaacctcatctggggggtgttaagggggagatggagggagaggaggagtccactagatttctccgaagtggcccttacttgtgaattgatttgctttcaagggcctgggggacttgtgttctggtaacagtggcaccctttgcctgcagtgctaccaaagagtggtgactaggatcnnnnnnnnnnnnnnnnnnnnttttttttcttaaaggaacaagtttttggattatttccccaagattatttcctatattaacatatactagtcagattttcagtgtagcatgttgccctcagagaagagaacagaaaggccaccacagaccaaaatctagaaataagcactttgggaaaggttccaagtgtatatatgccccaacccaattttatactaactttaaatataagattgagttgtttttgtttgtttattttgtgtgagcaggtctggaattcaccgtatagcccaggctagcctcacactcccagcaatcctgccttagccttctaagtactaggattccaaggcatgagccacgttgcctggctggctaaagcccctgcctgctcttcactttgttttcttcatagtgatgtattgatttccattgtagtgtatttctgagtacagtttacctttagtacatctctgtttaatattcagtcccaagtttatggagagaccggtgagggcaaatccaatttttaagcccatatgcgagtgggtacccgtgaataaatacaccatcacagagtgaacggcataatttatagcaagctcctaaacacaccgatgacatctttctaatcgccactttgtcccttctcgtgcgctagaaatcatacctgtggagatacagctgctgagccacagtatcttttagatttgattttatgtgtatggctgttttgtctacaggtatatttatgtattacacataagccctatgcccatcaggggctagaagagagtattggatccccttgaactgggtcacagatggttgtgagcggccataatcaagtctggtcctctggaagagcggcatgtactcttaaccacagagccatctctctagtcccaagcggtctcagcattttcgtttgcctcctagcgtgtgctgcatctgtgtggatgaggctcgttctggcattaacagtacctataaggtttgtgctttcctcacaattcacaaacacctcattggatacaccagcagtccagttaggtagagtcaggttagcaaggagcagtgacttgacctagcagagacagccaggcctcagccttggcacaagtcagcaggagagaccagcaagaacaccaggagaggttcttggctgtgcctctcagggaagtgaagatcagtgaagacgtgagacccacaagcattacacagctacctctataagcaagcctagcttagccttcatcactgtccatcaagacctatttatacccttcagtgtccgctccagtgaaacattccttcatgagtctgccttagcctttcacacctgtgtccactttaactacatgttttttnnnnnnnnnnnnnnnnnnnnnnnnnnnnnnnnnnnnnnnnnnnnnnnnnnnnnnnnnnnnnnnnnnnnnnnnnnnnnnnnnnnnnnnnnnnnnnnnnnnnnnnnnnnnnnnnnnnnnnnnnnnnnnnnnnnnnnnnnnnnnnnnnnnnnnnnnnnnnnnnnnnnnnnnnnnnnnnnnnnnnnnnnnnnnnnnnnnnnnnnnnnnnnnnnnnnnnnnnnnnnnnnnnnnnnnnnnnnnnnnnnnnnnnnnnnnnnnnnnnnnnnnnnnnnnnnnnnnnnnnnnnnnnnnnnnnnnnnnnnnnnnnnnnnnnnnnnnnnnnnnnnnnnnnnnnnnnnnnnnnnnnnnnnnnnnnnnnnnnnnnnnnnnnnnnnnnnnnnnnnnnnnnnnnnnnnnnnnnnnnnnnnnnnnnnnnnnnnnnnnnnnnnnnnnnnnnnnnnnnnnnnttttgtacaagacagggtttctctgtgtagtcctggctatcctggaacttaactctgtagatcatgctgtccttgaattcagagatctacctgcttctgcctccctagcatttggattaaaggcattcgccactacccccgaccctcactcctcactcccacccccagctaaggatgaaagtttcttgggcccagcaggttacaactaccagtcagtattaaacaatttaataccgacttattaacttaactcgggtataaattgttgtggtctaaataaagagaaattactttattgctgtgttacacattaatatttgctgaaactatattggtataaggtatgctaatttagatttctcttattgtggaaagatatgattcttctttatttgggatgcttttttttttcctccttttttggggggcagggaggggggtgttttgagacagggtttctctgtatagccctggctgtcctggaactcactttgtagaccaggctggcctcaaactcagaaatcctcctgcatctgcctcccgggtgctgggatcaaaggcatgcaccaccatttccagctctttttttttcctcttaagatttatgtatttaattcaaatgatatgttctcactgataagtggatattagcccagaaacttagaatactcaagatataagatacaatttgcgaaacacatgaaactcaagaagaacgaagactaaagtgtgtaatatataccactttgccccttcttagaattgggaacaaaacacccatggaaggagttacagagacaaaatttggagctgagacaaaaggatggaccatctagagactgccatatccagggatccatcccataatcagcctccaaacactgacaccattgcatacactagcaagattttgctgaaaggaccctgatatagctgtctcttgtgagactatgccggggcctagcaaacacagaagtggatgctcacagtcagctattggatgggtcacagggcccccaatagaggagctagagaaactacccaaggagctaaagggaactgcaaccctataggtggaacaacgatatgaactaaccagtaccccggagctcttgtctctagctgcatatgtatcaaaagatggcctagtcggccatcactggaaagagaggcccattggacttgcaaactttatatgccccagtacagaggaacgccagggccaaaaagtgggagtgggnnnnnnnnnnnnnnnnnnnnnnnnnnnnnnnnnnnnnnnnnnnnnnnnnnnnnnnnnnnnnnnnnnnnnnnnnnnnnnnnnnnnnnnnnnnnnnnnnnnnnnnnnnnnnnnnnnnnnnnnnnnnnnnnnnnnnnnnnnnnnnnnnnnnnnnnnnnnnnnnnnnnnnnnnnnnnnnnnnnnnnnnnnnnnnnnnnnnnnnnnnnnnnnnnnnnnnnnnnnnnnnnnnnnnnnnnnnnnnnnnnnnnnnnnnnnnnnnnnnnnnnnnnnnnnnnnnnnnnnnnnnnnnnnnnnnnnnnnnnnnnnnnnnnnnnnnnnnnnnnnnnnnnnnnnnnnnnnnnnnnnnnnnnnnnnnnnnnnnnnnnnnnnnnnnnnnnnnnnnnnnnnnnnnnnnnnnnnnnnnnnnnnnnnnnnnnnnnnnnnnnnnnnnnnnnnnnnnnnnnnnnnnnnnnnnnnnnnnnnnnnnnnnnnnnnnnnnnnnnnnnnnnnnnnnnnnnnnnnnnnnnnnnnnnnnnnnnnnnnnnnnnnnnnnnnnnnnnnnnnnnnnnnnnnnnnnnnnnnnnnnnnnnnnnnnnnnnnnnnnnnnnnnnnnnnnnnnnnnnnnnnnnnnnnnnnnnnnnnnnnnnnnnnnnnnnnnnnnnnnnnnnnnnnnnnnnnnnnnnnnnnnnnnnnnnnnnnnnnnnnnnnnnnnnnnnnnnnnnnnnnnnnnnnnnnnnnnnnnnnnnnnnnnnnnnnnnnnnnnnnnnnnnnnnnnnnnnnnnnnnnnnnnnnnnnnnnnnnnnnnnnnnnnnnnnnnnnnnnnnnnnnnnnnnnnnnnnnattattgaagtatcagagaagagagaaattcccacagaagtagagggttgcagagcacctactgggattgtttgttggtagagtccattttgtacctacgcgtagcacatgagcatggaaatcagttaccacgagttgggtagtggtttattgtacatagcacattggggcctaagaggtagctcagtgggcttcctgctgagcccaacaacttgagttcaaacctggagacccacatggcaggagagaactgtgagttgtccctctgacatccatacatgcacagcaacatggccacccacccccacattaaataagtaagtgtgatacaagtttgtggggcagcacaatggttcaggtgacaaaggcactagacctgacaatctgtttagtatctgggaccaacgtggtggaaggagaaaactgaccgattgccacataagcaccacacacacacacacacacacacacacacgcacacacacagtggaaggagaaaactgactgattgccacataagcactacatatacacacacacacacacgcacgcacacacacatacgcacgcacacggtggaaggagaaaactgaccgattgccacataagcactacacacacacacacacacacacacgcacacacacacacacacagcacacggtggaaggagaaaactgaccgattgccacataagcactacatatacacacacgcgtacacacacacacatgcacacggtggaaggagaaaactgaccgattgccacataagcactacacacacacacagtattttaaaaataataaactttttttaaaataaaaagcactttggctttgattttagtgccaaagtgagtgggtatatgctcaggaagcagcatatttttactgaaaatatatatgtaaaatttcctgattattgaaattctgaggtgaaaggtaatttatgtacataatttaaattttttttgccctcttcgcctgctttccttgtgggactgagcaactgctagatccttggacttccattcaccgctgctgctgaccattgttagggagttggacaacagactaagaaaggaattctaacttcaggaggagacaagaggaaacagacataggagaaaaggcctgtgaaaaacttaccctgtgaaagaaattaaattaacatccaggaggtctccacatagttattggaaatgtaacctcctccacgggactgctgactgcccattgaacgttgtctgcaatagtaaacttcctgtgagctttcttgcaaagtttaggtgtagatttaggacttgtagctgtaagcaagaggaaatctactcttggagcaagctctccaccgttactatggagccctgactgctctcctcccagtgataaccatgtggtcctctcacctgcatgcagttcctctgtctccaccactgagtgggtcttgagtttcagttatgggaccagcttgaagacacacccatcgctaaaccagtcattgctctaagggaatttatgatgagtatcctgggccaaatcacatgctcttctctggacgacagtgaggtggcgtacatagtatcatgttaatgggtttaagtgagtcagagttaaaagtagaagtggccttggtcccattcctagtgtatggcttaagagacagacctggttaggaccgaagggccatatgctaggaggctgccagcaatgccaccaccctgtttacactgtctccaagatgagctttttgtcttgttgtttcgaatggagctttccagctttgacagggtgattgctctcccctgtgcgttttaggatgtttagcagcctaccagtttgctaatgacattacttcaacaaccaaaagtgtcttgagatgtggtcagctgtcactggaggtggtagcagaattgcctaggctaggaaccaagtctaaaatactggtctcagattttgatcacatggccctaagattgcaatgttcttgcattcctccatatgttggtatatatgtatataaaggtcaacttttttgtttaaagacaattctgtcttagtttgggttttactgctgtgaagagacaccatgaccaaggcaagtcttataaaggacaacatttaattggggctgacttacaggttcaggggtttggtccattaccatcaaggtgggaacatggcagcatccaggcaggtatggtgcaggagctgagagttctacagcttttttttttttttttttttttggaaacaggctttctttgcgtagccctggctatctttaaactcactctgtagaccaggcagttctcaaactcagaaatctgcctgcctctgcctcccaagtgctgagattaaaggcatgcaccaccactgcccagcctagagttctacagctttatctgaaagctgctagcagaatactggcctccaagcatctaggatgagggtcttaaagccacacccacagtgacacacctactccagcaggaccttctaatagtgccactccctgggctgagcatatacgagccataacactctcgtagaacctggagctcaacaatttggctatcttagctggccagtgggcttttttgtagttccacctgtctctgcttcttcattaccgtggttacttgtgaggcaagcattttacacgtggggccatcttcccgactcttgccctgtatagttttagtacccgactcttgccctgtatagttttagtaccctctttattttacacatataagattaagttgtaaaaatttaagtaaattttctctccatattttctttcaagatttatttattttatgtatatgagtacactgtagctgtcttcagataaaccagaagagggcatcagatcccattacagatggttgtgagccaccatgtggttactgggaattgaactcaggacctctggaagagcagtcagtgctcttaaccactgagccatctctccagccctctctccatattttccttttaaaatttctatttgtcagttaggtggtggtagcaaacatgtttctttaatcccacttgagatgcagaggcaggtagatctctaaatttgaggcaggcctggtatatagtgagttctaggacagccagaactacactcaaaacaaaacaaaacaaaacaaaaaacaaaaacaaaacaatctttaaattttgggagtgtgtgtgtgtgtgtgtgtgtgttagttacaagtgtatgacaaatgtgtgagtacctgtggagacctgaaaagggtatcagatcctctggagctgttacaagctgctgcatagtggatgctgggaaacaaaatttggtttttacagtaaaaaaaagttacagttatgaagtatcaacaaagtaattttatggttaggagtgacacaatatgaggaactggattaaagagttgtagcatcaggaaggttaagaatcactgacttgggccggagtgatggctcaactggctgcttcctcttccagaggtcctgagttcaatttccagcaaccacatggtggctcacaaccatcggtaatgggagctgatgcccttttctggtttatctgaagacagctacagtgtactcttataatgaaataaataaatctttaaaaacaaaacaaaacaaaaacaaacaaaaaaaccccactgacttaggagatcagtggtttaaatattcctatccagccggatggttcatgttggatatgacttcctgatgtctgaacaatgcctgaacatgctctgctgaagggccgtgtgttccagggaggaaagtccctattgtgtggatgctgactttagatgtctctgtagcccatccagcatggtttgtagatagtgtcgtggaagagaaggtggagagaggaagtttaggataaacaagtgtactgtcttgaaggaaagtgtttaaggtcggtgtagtggcgcacacctgtgactcactgctcaggatgctgaggcaggagaaggtctgtgagtatagcccagagcatctgcctagttgagcctgagatcattcttgtaccaagaagaaatgtgtttaaaaggagttcaatttgttgtgaagggcagaagtgaagctttcatgtgttttctagacgattcatggcgagtctcatggtgagagtggatgaatatccaacagtggaaattgattgcaatactgtgtggagttacagaaggatggcaccaaactgttgacaagtggccatgtggcatctgagctgacaggccgttgtgaagtggttctctttagttctggagcctcacctaatatttttcagtccttgaagttatatgaaatgcacacaggcactctgttttaaagaggaaaagacgagatgtcaatcacatttgctgacagatgtgtgctgccctctgatcctgctgtggcctctctcctgcaggtgcgggggcacagttggtgctattttcacatgtccactagaagtcattaagacgcgactgcagtcttcgagactagctcttcggacggtgtattaccctcaggttcatctggggaccattagtggagctggaatggtgagaccaacgtctgtgacgcctggactcctacaggttctgaagtaagtgcagcccagtcatgcaggccttccctggcgcccgcctgtccaccttatacagccatagcacatgggtggagggaggactccggggatcaggctcaggttgtcaggcttggtggcagttgtccttactcactgtgccactgtgctggtcagatgggtgttttgcttgtttgtttttgtttttaattaattaagtcatttttaagtgtacactggtgtttcgcctgcactgtggaaggtgttgagtcccctggagcaggagttacaagcggttgttagccaccgtgtggaagctgctgggaatagagccgcggtcctgtggaagaactgccagtgttcgtaaccactgagccatctctgcagccctggtcagattttttaaaagttgctgctgaggaggatcaaggtttcaacactgagcgagtggattcccaaaaacaggtggttagtgacaggcacaggaaggacccagctggggtgtgtgaggcagctcggagctcagtgaggacaaacaaacagtatctgtggtcctcagtgactgagagaaagcttcctgtttgtccaccgtgagatggaagtgggtaagtgttcagaagaaccgcttcatatgcggagttaacatttactctacgtgagaacccgttacccaaatgcccgagctacccgctggactaggcctgtaaggtaaatgtgaatgcttctcttctgcaagttttatgggatgtgtattctctgcctctagattctcctagctccagtagccccacctacacgagtttcacagtggaaaccaaaggaaaagggcactttgtcattgaaaactcaggaaccacttccacaccacacaaaagccaatacttcaccacagacccacagcagtggttggttgatacagtcaggggctgtgacatcacacactgccacttccacatgaatatccgtttctactatggtcaggtcaaaatgttaaccatggagttaggtcaggttcttaggacagtgatgctgcccaattaaaaaggttgtgcgtgcacagttgtctcgctcactcaagctctatttctttagcctgttgtgtatgtttttaggatgctcctgcagcgtgggcttgctgtcagtgcctttcaggttttaaaaggattctattgatttttcacctcagccttaaagattagtgtctggacctcaattactcccattttcgagaggaagacgtgcaagttaacgattgcagatgccagaactgtgtttattgcacgtcccatttctaggacagtttggtgtagctacgagcaaagtaaaccaaaaccacaacagctcagctcacagctgggctatggcctccttcaggtcctgtggagatgtagctggtgctagcccagagattctttttattattatacatacactgtagctgtctagatgtgccagaagagggcgtcagatctcattatgggtggttgtgagccaccatgtggttgctgggatttgaactcaggacctttggaagagcagtcagtgctcttacccgatgagccatctcaccagcccctaatccagagattctaagagcagggcctcagccctttcgttagctgctgcttcggctttcttagctgtggctgctgtcataccacctcacctcctgctgtagcagagtcccagggctccctcagtgacagctgtcccccagcagtctcattagtcacctgtgaggaatggggtttctcacacctaccccctgctgcctatatagacagcatgaatgtcttcaactcatacccaacaaaagtgcgcagaccagagctcttgccctgctgagccctgggcctatttggttaaaagaagccgtattcttgtagctatagttctgggaccttggagccactctggagacttctctccacccacagtaaatcctgttagctctgctttcaaagtgtagaacaggctagcgctgtcctgatgaaggctacattgccatggctgtgcggcagtgctagcgccctagctgccctggcctgagatgtagccatccatactcctcactctgctcagcagagcagccagaggcctctgctcacttccctcctccaagcagcccctgggcctgccggctcttcactcagcagtcctgtggctctactgttcccctccagcctccttgttactttaaaggcacaggaatggccatggtggcatacgcctttaatctcgacactcaggaggtagaggcaggtggcgctgtgagtttgaggccagcctggtctatacagagagttccaggacagccagggctacacggtgggaccctgtctcaagaataaattataaaagcacaggaacatagctagcacaagttccgtgtgccagacattctctctggctttgacacctttgcaggtgtatcctgcagtgatctggttatttaacctgagctcctccacccataccccactcacccacccaccacccactcatcacccactcatccacccacccattcactcacccaccacccacccactcacccaaccacccactcaccacccaccctgccttcctccttcaccacagctccatcctccacagcacaggtcacttatttcctgttgtttgtctcctcactctcaccccaccctggaaggtgggcggtgttttgttttgaataataaagtgtcctcaggctccttagaacgttgtgtgtgactggaggagcactcggtaccaaccaaatgatttttagaagttgggcaggtcagtaaaggtcatggggatggcttgctggcctccctccctcaatgtagactcgtttgtgttgctgtcgttagtgggtgctttcctatgctctttaaggtaaggtttgcagcagggtttctttgtatggtgagtcctaattcccatctgaagaaagcctgtccttaggctgtgtggatgttcttgtggacaagatcccaaagtagtgaacagtgtcctgccgtggcagtgaggacagcgaaggtagctgctttgtagtcagccatctaagccaagcccaggggtgacacactaccaggacaagccccagacctttcctgtatacctgggtttagttctgttttgtcaggtatctctttttttgaaaaaaatatttttaagtgaggattttaattactgaggtaccttattattttatattttaaggtctttttaaaagttttaataattttcaaaaacttaaatgcatgcctgcatgtgtgtgcatactacacattcttgtaggtggccagaaaaaggtgtggaaactcctgcagctggagatttacaggctgttgtaaagtgagctacctgacagagctgctggggaccagcaagagcagcgtgactaacccctgagccttctccagcatcctttttcagtctgaaaattaatgtccgtgtctttcagaaactgcctcgctcaggtagacactgagatgaggtgcttgtctctcctgtgcagccgggtctaacctggggacagagtgacagactccatcaagtctctgacctcttttgacatgcttttccaacatgaaagggcagatgcctgtgggagagtgagcctggctcctacattggtctctcaaaactgtatgctctgtatagtgggaacttgattgttccagaagagtttataaacacccagatagggcagaagttcagcttatataacaggcctgacttgttgccactgttaaacgtgtaactacggagactgtctttcttcagctcttacaaggcacaagtcacttgaggacacatgctccgcgatgcattatggatgagggctcctggcttcctaagccaggggttcccttaactttctgagatagcttctcggtggcacagggctcattgctggagatcagtgatgcctgcacgctgtcaggtggagcagcattgggattgctaccacttgctttgtcactgggtgtgctcaccccaaggtgctaccagagacttgttttgttcaaggagcttggcctgtaagaaacagtcctctctttgaggaagataataaaaataaagtgttttaattgaaagcattaagttgtgcctgatagaagccagaaggcttatttttggcctgtgactccagtgaaactcccacgaatttcattttgaagcactgtgttcatgaaggcctaagaactgttggctctagtccttgatttttataactttacatgctatcacttcagcctcagctgttatggcctgtagaaagagctgttggtgctgttggtttcattttagttggttnnnnnnnnnnnnnnnnnnnnnnnnnnnnnnnnnnnnnnnnnnnnnnnnnnnnnnnnnnnnnnnnnnnnnnnnnnnnnnnngttggttggttggttggttggttttggtttctcagtacagggtttctctatgtagcactggctgtcctagcactcagatacccacctgcctctcctcccaagatctgggattaaaggtgtgtactactgcccgactgctgctgctgttgctgctgctgctgttaaagaaccccttttgttttcaaataatttcaaatagtagaagttataagagcaacacagatgacttgcttgtggcattttttggacacaccagtttttaacgtgttactgtcttgctttgtcattttgaccctgtgttcattcataaactcctctgaaccatttgaaaatgagattcaacactctttttgaatgtgcacatacatacacacttaaaagtaagttttttaaaaagcaggttttggtagacagtggtggcacacgcctttaatcccagccagcactcaggaggcagagacatgcaggtctctgtgagtttgaggccaatctggtctacagaatgagttccaggaccacacagcaaaaccctttctcaaaagaaaaaaaaaaggaaagaaagaaatgtcatctgttcagtctgaagtattgcacacatgtaacccagtacctagaagctttacacacatgtaacccagtacctagaagtcttacacacatgtaaccagtacctagaagtcttacacacatgtagcccagtacctagaagtcttacacacatgtaacccagtacctagaagctttacacacatgtaacccagtacctagaagtcttacacacatgtaaccagtacctagaagtcttacacacatgtaacccagtacctagaagctttacacacatgtaacccagtacctagaagctttacacacatgtaacccagtacctagaagtcttacacacatgtaacccagtacctagaagtcttacacacatgtaacccagtacctagaagtcttacacacatgtaacccagtacctagaagtcttacacacatgtaacccagtacttagaaggctgaagcaggagcatagcaagttagaagccagcctggactacgtagtgagactgtttgcagaaataataaaatcataataatatagtggggcccaggttatagaaacctgaacctggagtctcctgcatgcaaggtaagtgtgagtgtatatcttaagccaggggtttgctgccctgaactcactgtgtagtgtgtgcagaccttgaacatgtgatctttctgtctcagcctcctgagaaggcgagatttcagactgaagtaagaggaactgagaattcaccgggagtggtggtgcacgcctttaatcccagcacgtgggaggcagaggcaggcggatttctgagttcgaggccagcctggtccacaaagtgagttccaggacagccagggctatacagagaaaccctgtctcgaaaaaacaaaaacaaaaacaaaaaagaggaactgagaaacaggatcagagctttcctagacagtctttgtagcattcctgtctgactctacaaccttctgatgttatattctacagagggaagtaagagtcaggggccttctaaacaaacactttattccttcagggcgacactgtgatgcttggcttcttattgcccagataagccttcctcagaggtcttggcttgtttttgagacagcctcgtgtagcccagctagcctcagactctatatagccaaagatgactctgaacttgtcatcttcccgctcctgcctccccagggctgtaattacaggtctatgccactgcaccctgtttgttctgacgatacactagggcttcacgttctccaaacactcacctaagcagccacatctgcagctattgaagtcaaaaagattctaaagcgatgtctctttcttactcagatcaatcctggaaaaggagggaccaaagtcactctttagaggcctgggtccaaatttggttggagttgcaccatcaaggtaagcatgtaactgccgagcgagcgagccccagtgcagtagagtgacactgctgaatggctgtttgtgttgcctaaccaagtctgacgtgaagaagcagtggcaaccgtgggttccagtctctgtaagggagagtttcttaccttgagtgtgcggaggaccagtccctgggtgtggaaatgcccagggttagagtgcacacagatccctgtcttcggctttcttagcaagatgacttcctggtgactcataggaacatcagtctgaaggaattccaaaggcgcctagggtttactttctataacattacatccttggatttattttatttatttatttatttttggtttttcgagacagggtttctctgtatagccctggctatcctggaactcactttgtagaccaggctggccacgaactcagaaatctgcctgtctctgcctcccaagtgctgggattaaaggcatgcaccaccacgcccagctattttattttattttttaagatgtatttatttatttaatatatgtacgtaccctgtagctgtcttcagatacaccagaagagggcatctgatcccattacagatgattgtgagccaccatgtgggtgctgggatttgaacttaggttctctgggagagcagtcagtgctctcaaccactgggccatctctccagctcattgtccttggttttttaattctttttaaaggcttcatagaatcgcactatccctgcacggtaagctgttgtctccattcacctttttttttttaatatttatttatttattatatgtaagtacactactgtagctgtcttcagacactccagaagagggcatcagatttcgttatggatggttgtgagccaccatgtggttgctgggatttgaactcagggcctttggaagagcagtcagcactcttaaccgctgagccatccatttacctttttgatgagaatactggtcactttccaaatgtttattatccatgcatagatagtgtctctggatgaagttatgggcagtgctaatagacaggaactgtgtgtataaaagggacgagtggcagtgttgtcacgggccaaagtcctctaatgatagactttaaaggttttccttgccttttctattttgaaatctggccaaattccagtgctttattctataaaataagattggtatgtttgcttgtttagatagacgataaagaggttttcatcaaaggttatatatctcagagttactcaaatggaagaagagagagaacagtagaacaacaaagggttacactgattagaacttgcccctgtgggaaatctgttacttttccctaatcctgatttcttggaaggccaaatgacttggtaacacgaatggcaacttcagcacaaatgattactatcaccgcagccaccaccagcaccaccaccgtcccaactccctttctgtctttcctgtggggatatggtaccagaacttagtccaaaccagtggtctcctgggatcctgttcagcagtagtcaggatccttagttgaaatagattctgtgattgacctgctgttcagcagaggcaaagagaagcagcgctcctgcatcgcagagatgaagcacacctccctagtcactgtaggcagttcacaagatgaacacaagatgaaagcagagctcgttaaacagtgcacctgtaaaatgacagtcctcactcccactcagatgattagcatccatccagaataaagaatgtgaaaagagctaggcagtggtggcctacaccttcatcccagcactctggaggcagaggctatgagtttgaggccagcctggtctacagagtgagttctaggacagccagggctacacagagaaactctgtctcaataaacaaacagacagagtgtgaaaggacttttatgtgtgttaccaaaaatcttatttctcctctgttatcctggccatggctgtcagcactttctggaatttctggaaggcatgaacatccaggtgcagtggcagcctgggtgtgagccagcctcttgtttccttgctggctaagatcattactctcttctgtggtctcctctttgggatagatggtgcagagggacctgtgtactttaaagtgcagtaatgctttaatggttttctctttttgtcctaccagggctgtgtactttgcatgttattccaaagccaaagagcaattcaatggcatcttcgtgcctaatagcaatactgtgcacattctctcagctggctctgcaggtatgttccctagcaagtgttgtttcgttttgctttctttttttttttttctttccaggaattagatgttaactccctgcctcttttgaccctaaaaccatttttaaagctttgtattggagtttgtagaacatgactattagcagtttataaacaaattttacttttctgttcttcatcttcctgatttccctattgagttgtaatgtggagtgagagctgctttctttctgattccccaaggtatctggggtgcatctgccctgcacagctcacttgcacagcaagaatcagggttttatgtgttgtgtggtacttgaggctgtacctaaggccttatgcctccagatggtctgttttcttctgaggaagtccgcactgcagagctcagggcagggcttgccccagggagtgtttgtgagaaagcactggctcctaaattgctaggagaagcctctgcccttcttcatagaggcttctgtccatttgaatctaacagaatttttagagaatttagattagcattttagaatttcttccttctgttaacagcctgcaacgtgtccacaccaatttcctttgttactctcaataaaattactaacccaggttatgatctttagtcagagaaaagcaatattaagcaaacttcttaacacaagaacagtgattccccttaatactgagccccgagaaggacagtgtaccattccaaatcaggttgagccatggtgaattagccgtaatccagaccctgttaatcggctttgtaatgcttgtaaaattaacccagagcaaccctgggtaaaggaagcacaccttgaaggagcttttcaagccagtgccctccagtgccctcatttaatatgtagaggacactagctgttagaggagggctgagcattgaggtttgggactgatccaatgtgttaaaatgctgctgaaggcataccaaaatgattcctgtgggccaatgggcttttaatgtttttgtccttaaatttccaagtttgaattcaggtaacggaagatttaacatccttattcagggttagctataagtactgatgagcatgtttaaaaacaaattatctctggatctgcagcttctaagttggaatttcagatagtttttgccctaggattgaaatgaaccgaagtgatagcaccacctagaggccagaaggactgtgcttggcggcggcagctgtggcgcggacagagagcaattaacccactgcttctgcgcccagccgtgcgggccactgcatggggattgcattcgcaaacactggctatatcagtgatgactgttttttccctccagcttttgtcacaaataccttaatgaatcctatttggatggttaaaacgaggatgcagctagaacgcaagtaagtgaacagtcccttcagtacccggagtcgtcctgctgtgctgtggacgggaaataggagccctgtatgcatatgcagaaatgtcatttgagatctatcctgacagcattgtgggggaggagccccagagagcaagggaagatggacagaagggcctctccatggtcccagcttccttcctgggtgttcctctctggggctctttgtggagccccactgtcaggagggatgctgtaaactccgcagaggcctggctgtccagccaggacaccagcgagggcactttggacctagtccccgatgtctctggtgtctgtcctgaatctaacctggagttcttgtgttccttgagtattctggtggaacctacaaaatgtttggactttgttttttgttgagacagggtcttgctgtgtagttcaggctgcttcaaatttacagtcttgctgtctcaagcctccccaggcctaggcctattacccttgtctagagccaggttttaaggaaatagaaaccaattgaaatgaattcatcaaattttaagaacttgtgatacagtaataatgattcttttatatgtaaatcagatttctcagcaggccagcaacacctgtgaatttccaaagaacaccaagtatactaaataatgccttttaacgttctaatgaatgtggcaggaaaatgtttctatttgtgtaagaccacagctactatttctgtgggctgtcacccacactcatacttcttgaaggaatgctaatttccagtagaaatttgggctctcccaggctgtttaaggaactgcttgtattgtgctgtgtggcccagcaatgtgaaccctggaaacactagcaggctcatcttccctccagcttcctctgagggagagggaaaggctgaggtatacgtggagggtgaaggaggaacctgcctggttcatcgtcctcttgtgcccatgatgagggtttcctgtcaccacagtccatctgccttctgaagtgcttgctagaatcctatgacaagggtcagttacttccagggtaactcttaagttctggcccaagcattgagacagttctttgtagtttccaaaaatgctgtgtgtgtcctacatgtccatgttcctgagtgtccagtcccttgcccctcttaactattgtgcttcaggcttctggccagcctggtctcctggaagcctgtggcctcacctcagagccaagtgttcacagtgttgtgatatcactggtggttagcaacagataaatgcatgtgttgaccgaggccctttctaatgcttaggacgttttagacctttatttaggtgagatctgtgaatatctgtgagtatatattgttccagtggttgccccggaaattggtcatgccttctaccttatagcagtatagccaatcatcaaataagattatagtctggtgggacaaggggtgtgagttgtccagcactctggagaatccatagtacactgtaggctggatggagtcgggagagaataggagagcctcttgaggcggtggcagctcccacactcttcaaaggagccagctgcagggatgggggggaggggcgcgcaggcacacaaaaaggtttgagcaagtaaacagttaattcaagtacaggagtttagtggtttagcttaaatctctctctctctgagacaggattactctactctctctggggttacaggcatgagccactcactgtttacactctcggttctaggatcaacaccactttactctgtaaaacaactagtcttccttgcctctcaagcagaggacactgtgttatcaacaagaggaatgtgtgtaaaagaaacaacaaaaagatgatttctgttaatttccttataaagtgagcacagagacctaagaatactaaaaaacagagcatctccgggttactatttttttttaaaagatcaaggcaggagttctgactgaccttagaaataatagataaagatacagcatcatgggctggagagctatgtcagcagctaagagtgctcactgctcagttcccaacaccacaccagccctgtattgtagttccagggaaactaatgcctgctgtgcatgtacacacacacacacacaaatacataatagatacttaaaagtaaacgaatgagtaaaagtatcaggaaatgtacctagattaaaaattccatacggggctgaagagatggctcagcaggtaagagcactgactgctcttccagaggtcctgagttcaattcccagcatccacatggtggctcacaaccatctgtaatgagatacagtgccctcttctggtgtgtctgaagacagcaacagtgtactcatagaaataaagtgaataaacaaatcttttttaaaaaaatcccgtatgacaaaactaagaagaaatgtatatataaacatatgcgtgtatataatatgttgtttttcaatgcatgaggccctgggttcaggccttagcatgcacacaaatcacactccagagagcagtagaaagagggagccattggcccggcagatagctcagtggtaagctcttgtctaccatgcacaagccctgagtctaatccccagtaaaccagaaggaagacagcagcaaccttttcccttggcattctctcctgtatcatggtgtttgaccttgtatctaattttgtctgctttctgcttagcttccttgtatcttcacagctatcctcatggtgtgtatgcaccaaacgttacgtagccagtcctgctcttagatacatggatgattccaaatgttcctctgacaagtgttgtagtgttgtcttccattagcagtttctagaattgggtcagaggctataagcctgcttcagggattgtagattcagatgccatctgttatatgacctgtcaggtttctcagctaattgaactggcctcacagtgggccagaggtcagggggcctcagaacaaggacaggtttcttctcctgtgtggtttctgtgtcatggctgatgccctttatgacttggtgtggtacgtctctcagtgcgcgttgttgatcctccgacagggtgaggggctgcaagcagatgaacacactccagtgtgctcggcgtgtctaccagacagaaggcgtccgcggcttctatagagggctgaccgcctcctacgctgggatctcggagacaatcatctgctttgctatttatgagagcttaaagaagtgtttgaaagacgctccgatcgtctcctccacagatggagctgagaaaagttcctctggcttctttggactcatggcagctgctgctgtttctaagggatgtgcctcctgcatcgcttacccacacggtatgtagttctcttttctcctggagcagtagaacagttgttggctttgtcatttgtcactgtgtagactgaaatacaaacatagattgggtgtcccttacctgaaacacctgggacaggaaatgcagagatttccagcgtggggcatggtaagcatggtgagcatgtctgatctggccaaggtgacgttctggactttcagattggagatgctcattctgtccctgcagggcagagcgacacaagtcatgtgaatggtggcctactctaccttgcttggctccatctcagtgtcacaaaggttcgctgggccaaaatgggggtcactgaacctttgttttcaaagaagcctgtcttagtcagggttttactgctgtgaacagataccatgaacaaggcaagtcttataaaaacaacatttaattggggctggcttacaggttcagaggttcagtccattatcatcaaggtgggagcatggcagcatccaggcaggcatggtgcaggcagagctgagagttctacgtcttcatccaaaggctgctagtggaagactgacttccaggcaactagggtgaggatcttatacccacatccacagtgacacacctattccaaccaggccacacctattccaacagggccacacctccagatggtgccactccctggtccaaggatatacaaaccatcacattccactccctggtccccatagacttgttcaaaaacatgagtctatgaggggccatacttaaacatagcataatgcaaaatgcatttagtccaattttcaaagtcctcatagtctatagcagtcgcaacaatgttaaaagttcaaagttcaaggtctcttctgagattcactcaacttaattaactgtaatccccaaagcaaggcaggaaaccagctgggcaaactccaaactctgcatctccatggctgatgtcaaagtggtcttcagatctccactcctttttcatctttgttgactgcaacaaactgctttctcctgggctggttccactccctgttagcagctttcctcaacatgtatcccatgactctggcatctttaacatctttgagtctccaaggcaatttcaatgttacagattcttgtttcagtgtctgggattccacttgatcttttgggctcctcctaagggctggcatcacttttcagctctgccctctgtagcactctaagctcaggttgatccactccactacggctgcagttcttggtgatcatcccatggtactgacatctccaatatactggggtgttccactccaactaggcttcaccaatagcctctcataggctctcttcagggtgccaagcctcaaatcctttgcatgaccccttcagtcctgggccatcaactacagctgaggcttcaccttctccattggccttccctggcctctcacagtgctaagcttcagcttctcttcatgatcccttcattccttcacaagcagtaccacctgagtgactcttacacattaccaagtccagccacagcgtgaggtacaacacagcttctttgtgatcccagaaaacaatttccagaagatttcacctcagtgatgctggtctcttcttaatcactgctaattccttagctccagctaaccagcatcaattttcccagtagttccttccattcttaactctagagccagagccacatggctgaagctgccgagttctgctgcttacaggaactagaacacggtccccttgtgctattacattatcactagctttatgttttctaaatccttcactgcctaagcttggctatcctggtccttgctctgtagattgaccttgaatgcagagatcagcaagcctgtctcatgggattaaaggtgtgtaccgccatgtctggttctaaattcagctgggtagggtcttgccccaaggtcccactcccttaatctgttatttcctagaacataagattttgctccatttcacttcctggtactcctttaatactaacaatatattttatattttgcctttctaagcttgctatgcttgttcaaacttctcttcataaggcttaaccagagaacaaagtctctgctgggctcttttgaaacttcctttgtcaatgcaattaatgcaattaatccaagtctcttcaccttagcctcaggcagacttttcagacaagggtaaaaagtagccacattcttcaccaaaataccacaaaaacagtctttatgccacattctgaaattattctcctttgaaatctcttgggccaggtcaacacagttcaaattactcccagcaacaaagtcttccatattcctactaggatgacccattaagccccatttaaaccattccactgagttccaaatccaaagtccaaaaatccacattctttcaaataaaagcatggtcaggcctatcacagcaataccccactcccagtaccaacttctgtcttagtcagggttttactgctgtgaacagacaccatgaccaaggcaagtcttataaaaacaacatttaattggggctggcttacaggttcagaggttcagtccattatcatcaaggtgggagcatggcagtatccaggcaggcatggcgcaggcagagctgagagttctacgtcttcatccaaaggctgctagtggaagactgacttccaggcaactagggtgaggatcttatacccacacccacagtgacacacccattccaaccaggtcacacctattccaacaaggccacaccttcagatggtgccactccctggtccaaggatatacaaaccatcacaaagcccaaattagactttacttaatattccctggctcaaaaagttatacaggagccaaatgaagaatcactaagcctcttctttgagtaggtgctgcataaatctactatttgaacctttttgcttctttgaatgttcttgttgttttgtggggtttgtttgttgttgagatcgttttttctatatctagctgtcctggaactcactatgtaggtcaagctggtaactcacagagatccacctgccctgcctcccaagccagaacacttttcctgttggaatgctagggattgaacatagggccttttgagtgttaaacacatgctctgctgctgaactgcacccttccttatccaagatgcacgggtgagattgctactgtcccactaacctactttaaaaacagttcattaagacttcaaacaagggctggagtgatggctcagcaattaagagcactgaggtcccagaggtcctgagttcaattcccagcaaccacgtggtggctcacaaccatctgtaatgggatctgatgccctcttctggtgtgtctgaagacagcgacagtgtactcatatacattaaatggaaaaaaaaaaatctggccgggcgtggtggcgcactcctttaatcccaaaacttgggaggcagaggcaggcggatttctgagttcgaggccagcctggtctacagagtgagttccaggacacagagaaaccctgtctcgaaaaacaaaaacaaaaacaaaaacaaaaaaaagacttcaaacaagttatgttttcaaaagcctcctgcacagcagtgacagatgcaccatatctcaggaacaagggttaggtcccattgtgtgctggagcaccaccaagacacaaaggcaggaagagggggagaccagcagtgcctcctgggctctgaggtctgctcaacagcggggctgaccagcactgggccactgtgctgggagggagcccaggtggcttttcagctagacagagtagggggagccgagggactcatgggagacgaacacagtctaagaagaacttacctttattttcttttgcttttctcaagacaggtctcactatatagccctggctgtcctggtctgtagctcaggctggcttcaaactcccagagctctgcctgcctgagattaaaggcattaagggccattgtgccctgccagaacttaaccttccgttgtccttcttgcatatgactgcgccgtcaggttagagccaagatgcccagtagacttggtgccttgacttcttccccctgtctctcctgcagaggtcatcaggacgcggctccgcgaggaaggcagcaagtacaggtcgttcgtgcagaccgcgcgcctggtgttccgggaggaaggctacctcgccttctaccgaggactgtttgctcagctcatccggcagatccccaacactgccattgtcctgtccacctacgagttcatcgtgtacctgctgggagagcgtgcttagtgacagggccacatggttgtgctctagaagaataaaactgaaaaccctagagattttcttttccgttgatgtttagtgttcaaaactgaaacagcgaaggccatagaatacctggctcatgtcacctgttggacatttccttttggattcttgtttctggaaggttgaaattcattaacgttaatagttaattataactttcttttttaacttaagaggactgaggattgaggagcaagtaaattaaatcatgctatttaatgtaagttcgtgctgggctgtgttctcctttgtgcttactgggctgccctaagccggccacggggtctggctgggcgtggggaagtgagaagcgtgacttgtggggactgagtggtggacaggaaagagcggtcacgcttggtgacaactgtgagcaaatggtccacagctttccctctgtacatctccatctcccccctccatggtggtaggtttatctgtaatctgtttccagacactgaatgggggtgnnnnnnnnnnnnnnnnnnnnnnnnnnnnnnnnnnnnnnnnnnnnnnnnnnnnnnnnnnnnnnnnnnnnnnnnnnnnnnnnnttctgagtcagggtcttggtgctgtagcccagactgatcttcacctttaaatctcctgcctcagcctcccaagggctgaaaatgcagatgtacaccctgggcctgacctagctggacaataaaaactgcttttagctacattat

SEQ ID NO: 234 - DNA, 1805 bp, Mus musculus
cggctggaaagcgccgcagaggccgctgactggccgggcgcgacgccgcggagggagccgggcgcctgggcctcccgcgcgcatgggcgcgtcggcggctgcctgaggaaggcagcgaagccagcggagctcaagacctcgcgcgtcccacgagcggctgcggcgggccgcggagccggcgcggccatggcgacgggcactcagcagaaagagaacacgctgcttcatctcttcgccggcgggtgcgggggcacagttggtgctattttcacatgtccactagaagtcattaagacgcgactgcagtcttcgagactagctcttcggacggtgtattaccctcaggttcatctggggaccattagtggagctggaatggtgagaccaacgtctgtgacgcctggactcctacaggttctgaaatcaatcctggaaaaggagggaccaaagtcactctttagaggcctgggtccaaatttggttggagttgcaccatcaagggctgtgtactttgcatgttattccaaagccaaagagcaattcaatggcatcttcgtgcctaatagcaatactgtgcacattctctcagctggctctgcagcttttgtcacaaataccttaatgaatcctatttggatggttaaaacgaggatgcagctagaacgcaaggtgaggggctgcaagcagatgaacacactccagtgtgctcggcgtgtctaccagacagaaggcgtccgcggcttctatagagggctgaccgcctcctacgctgggatctcggagacaatcatctgctttgctatttatgagagcttaaagaagtgtttgaaagacgctccgatcgtctcctccacagatggagctgagaaaagttcctctggcttctttggactcatggcagctgctgctgtttctaagggatgtgcctcctgcatcgcttacccacacgaggtcatcaggacgcggctccgcgaggaaggcagcaagtacaggtcgttcgtgcagaccgcgcgcctggtgttccgggaggaaggctacctcgccttctaccgaggactgtttgctcagctcatccggcagatccccaacactgccattgtcctgtccacctacgagttcatcgtgtacctgctgggagagcgtgcttagtgacagggccacatggttgtgctctagaagaataaaactgaaaaccctagagattttcttttccgttgatgtttagtgttcaaaactgaaacagcgaaggccatagaatacctggctcatgtcacctgttggacatttccttttggattcttgtttctggaaggttgaaattcattaacgttaatagttaattataactttcttttttaacttaagaggactgaggattgaggagcaagtaaattaaatcatgctatttaatgtaagttcgtgctgggctgtgttctcctttgtgcttactgggctgccctaagccggccacggggtctggctgggcgtggggaagtgagaagcgtgacttgtggggactgagtggtggacaggaaagagcggtcacgcttggtgacaactgtgagcaaatggtccacagctttccctctgtacatctccatctcccccctccatggtggtaggtttatctgtaatctgtttccagacactgaatgggggtgttctgagtcagggtcttggtgctgtagcccagactgatcttcacctttaaatctcctgcctcagcctcccaagggctgaaaatgcagatgtacaccctgggcctgacctagctggacaataaaaactgcttttagctacattat

SEQ ID NO: 235 - protein, 314 aa, Mus musculus
MATGTQQKENTLLHLFAGGCGGTVGAIFTCPLEVIKTRLQSSRLALRTVYYPQVHLGTISGAGMVRPTSVTPGLLQVLKSIKEGPKSLFRGLGPNLVGVAPSRAVYFACKAKEQFNGIFVPNSNTVHILSAGSAAFVTNTLMNPIWMVKTRMQLERKVRGCKQMNTLQCARRVYQTEGVRGFYRGLTASYAGISETIICFAIYESLKKCLKDAPIVSSTDGAEKSSSGFFGLMAAAAVSKGCASCIAYFVIRTRLREEGSKYRSFVQTARLVFREEGYLAFYRGLFAQLIRQIPNTAIVLSTYEFIVYLLGERA

SEQ ID NO: 236 - DNA, 96425 bp, Homo sapiens
ctgttctagcctatatgtagtgtctatcagggattcaactagcaaaagagaaatgcagcttacacattgtcagccccagtatcccaaagtggaatatagtaggacatcgttggggctggaaacaatagcttaaaaactggcacagtccacctcttgtctatcaggcattgatacacatttaccctcccatacataattaaatttcacacaataacaataacaaacttatgctagttttttcaaaccaagattatttcattctatgcacatgaagaggtaactaatgtcccaaaagccatttctgattaattattcctttttgattaatagccatattatccatctctgggagatgttatataaacctcaaattttgtcatggtttatataaacattctgtactctaaagagagaattataagattaaatatcattgataacacatatgaaataataagacatgaaatgttaatatataaaaatactgtatatgtatacacacagacagacacaaattaggttatatgtgaaaacacagaaggaccaggaaagaaaagatgcatagctgctgcagacctcattttattttattttttttactacccattaaatgttatatttgcactcagccagcatttcggctggctaaggatctctacctatcaaatgactcaaaccttctttcctagagaattggaaatctgagtgattttcacctttcttcggttactgtagtcttccattaaattattgaacacagaaatgctaaaaacttcaaagaaggccctgaatttcatgcatatagtctttcctgcactaccatgtagcaacaccccaaatgtatcttgagaatatggattttttaaaaaaaatcatgttcttcataaaacttaacaatgtgcaattgtgttttggtgcaaagtcccaaaagattgtgctaattgattccacaacacttatttttatgcctttaaattcatgttgaaggtgtggcattatgacaatggagtgtatattgattgctatggtgaaaggcaaaaaattttcttctcaaatggattctatctgaacatagatgagaaacgttttttatgtttcttttaactatttataatttgagtaattatgacacctgataccttgaaagtagtgaaggagaaaaattatgtttccatattagctatctatatcaaatcaggcaagaataaaaaagaaaattgatttttttttgctagaagcctgatggatgtaacaattttcctcaaaggaaaaataaaggaaatctcttattacctatatggcaacatctggccaaatgaaaatgtgcaaaaaaaaaaaaaaaagtgaaataagttggggctgtttctggctcagtgtgaagtacgaaaagattttaaagttaagtgttagattggaaaaaaatgaggatttatgatcatcttctttgacactttttataatgtgcatcatagaatatatgggaaaaaattcccattaaattatgaagaaacaaatatgataagtggacagatattgggtgaatttaagaaaaacaaggtatttttattgtatatttaattgtaaacagtgtaaataggccctggcctgttttctaagcctttgtataggttcaacaatatggctttcttccttccaaagactgacctatctattcccactatacagtgccaaatctaataccagagaccaactttgaggctctgataaaacaccattctttcagagcagagtggggagcagccagtacctttgccaccctcactcagctggagttacttaatacattatgtctgtttcatccattttctaagtcatacctactggaataggtaatctattgcaaaagtatttctcaatccttgctgcatgaatcagtgtttttttttttaatacccatgtgcaagccccaaacacagaaattctgaattaacatatatggaagtctgggcatcagtattataataggttgagaaccattgcattcatgcccaaaatgaatgagtctagaattcgtaacatttatgtaaccacagatgtgctaaaaatgaattctaagaacacgatgagtatagcattctcctaatctccttttttacacagcctagacatctgccttgcaagcttaccactttccttctcatactgagaatcaaattctgccctgttgtgtagaatattttgctagaacattagtatttggccttattctttttagtctttttctcaagagggttgatactatttaaacttctatcactgagaaagtaatgccaagcaggcagactacccaaagctataacctcaaccacctgtttctgaacaatagatctcacactaaattaggtccctttggaaataacatcaaatattactactctgaagtagctaatgtagttaggttaaaaaaatatatcagaagttggaaaaaataggaccaagaagtaaaatagtaagccaaagtcaaaccagagttcataaaattccttgaatgctcatgtttagacccctggatctcctttcaggggcttaccttacctaaaaccagaataatattctaggcacagcttacttgtgaccccacatctttccttccaaggggcattctaccaacttcccagcatatctgctggacaatcatcaatgcataatgacagaaccatatgtaacttcttaaaaatacataccactattgttatactgaatctatcttaattttgattaataattattccctcttatttaattgtattattatttttagttaggagttgatgggcttaagaaccagattggttcttaagaacattgttttaattcctggccctgccatttactattcatgtaacttcggacatattattttccaggggctatgttttctctgataactaaaattatccacttgtagatattctttggtggttaaaaagaggttgtatatttttagtttatcttcttttaattcaatggaatgagcaaataactgggttaaggcagggacgtgtgcagtagtttctcatctactatcagacagttttattaccttagacaagtccctgaacttctcattccattgagattagccactttgaagaataaaatgcaaaaaaaaaaaattaaaaatgaacgaaacctaacagatctgagcaatatcattaagtatatcaacatatgtgtaacagaagtgctagaaggtgagaagagagaactgacttcttaccagaaactatgaaggccagaatattggcatattcaaagtgctgaaagaaaatactgtgaccccagatttctatatctggcaacattattcttcaaatatgaaagagaaataaagaaatttcccaataaatgaaaaactgagagattgcattgctagtagacttcctccaaccatgctaaaggaagcagttcaagctgaaaagaaaggacactaaacagtgactcatccaccagaaaaagtaaagagcactgtgaaagataactgcatagataaatttaaaagactacaaaaatgctctttgagtttgtaacttattttttctatccgatttaaaacaaaatatataaggctataattataaatccaggttggtgggcatataatgtatacagataaaatgtgggacaataacagcataaaaatgagagcatgctccatataacaggggtccccaacctctgggccatgggctgctacttgtctgtggcctgttaagaaccaggccacacagcaggaggtgagtagtgaagtgagtataacctgagctctgcctcctgtcagctaagtggcaggtgaactgggcatgtgagggatctaggttgcacattccttatgagactctaatgcctgatgaactgagatggaacagtttcatcccaaaaccatcccttctacctccatccatgaaaaaattatcttctatgaaaccagcccctggcaccaaaaaggttgggaacagctaggaattatgtattcaacacaaaagaaagcagtaatggaagaactgaggaacaataaagaaagacataacatgtatagaaaacagatagaaaaatgtcaagaataataacattttatcagccattacatgacatataagtagattaagttctgcaataaaaggacacaaattggctaactggattttttaaaatgacctcaatatatgttgtctacaagagactcacattagatgcacagataggttgaaaagaaaaagatattttatgtaaaaaatattcaaaagagagcttgaataggtatactaatatcagacaaaacagactttaagacaaaaattttaacaagtgacaaaagaagacataatataacaataaaaaggtcaattgctgaagaagatacaagaattataaatatgtatgcacttatcaacagagccacacaatacatgaagcaaaaactgacaaaactgaaggcaaacatttgcaagtcaactctaatagagactttttaatacccactttcagtaagggataggactagaccaaaaatcagcaagaaaaaccttgcacaatattatgtgccaatgagacctaacagatatttatagaacactctacccaacaacagagtgcacattcttttcaagtgcacatggactattttccaggattaattacatgtgagaccataaaacaagtctcaaaactttgaaaagattgaaatcatacaaggtatattctccaaccacaatggaaaaaaaatagaaactaataataaaaagaaatttgaaacatttatgaatatatggggaaattaagcaacatactgctaaataatagttgaattaaagaaagaatcacaagagatttaggaaatgctttgagatacattaaaaacaaaatataccaaagccatggagaatagcaaaagcggcaatgagggaaatcttttttttttttttttgagatggagtctcactcttgttgtccaggctggagtgcaacggcaccatctcagcttattgcaacctccgcctcctgggttcaagtgattctcctgccttggcctcctgagtagctaggattacaggcacctgccactaggcccagctaatttttgtatttttagtagagacagggtttcaccatgttggtcaggctggtcttgaactcctgacctcaggtaatctgcccgccttggcctcccaaagtgctgggattacaggcatgagccaccatgcccggcctgaaatttatggttattaatgactacattaaaaaaggaaatatcacaaattaatagcataaccacctgccttagaaacaagaaaataaaagatcaaaactaaactcaaataagaagaaaaaatagtaaagactcgagtagaaataagcaaaatagagaatacgaacacagtagagaaaatcaatgaaaccaaaggttgattctttgaaaagatcaacaaaaatgacaaacatttagctagactggccaagaaaaaaaaaaaaagaagaagattcaaattactaaaatcaggaatgaaagaggggacattactattgtctttacaggagaaaaaattacaaaggaatactataaacaattgtatggcagcaactgatactagataaagtagataaaataaattcctagaaacacacaaattattaaaacagactcaagaagaaatagaaatctaaacaaacagacctgtagtaagtaaagatacaagctactcatccaaaaaaaaaaaaaaaaaatctgcaaagaaaatctcaggacaagatagcttaattaattgattttctcacatgtttaaagaacattaattaaagtatttcaaaagaagtagagtaggagggaacatttcctgacttactctacgaggccagtattatcctgtgagcaaagtcagacaaaaaaccatcacaagagaaaactacagaacaataacacttgcaaatataaatggaaaaaaaattctaagcacaatactgaaaaactgcccagcagcatataaaaatgtttatgtcaaagccaaactggatttatttgaggaatacaaaggtggctcaacatattaaaatcaataaatttattataccacattaatataataaagagaaaataaaaacccatggtcatctcaataggtgcagaaaaagatagtacctttcatgatttaaaaaacaaacatgcatcaagctaggaataaaaaagagctttctcattttgataaataacacctatgaaaaagccacagctaacacatcatactcacttactaaaaactgaaaaaaaaactcaaataattttcctaatgtgaagaacaaggcaaagatgtttgcttagactacttctgtttaacattgtattgaaggtttaagccagggccattaggcatgaaaaagaataaaaactgtccacactggaaaggaaaaattaaaactatttctgcagataatagtgtcttaaatcataaagaagctacaaataaacagtttgaacgagtttagaaaaattgcaagatacaaaatcaatatataaaaatcagttgtatttctaaacattagcaataaacaaactgaaaaggaaagtaagaaaacaatttcagtaatatcagaaagaatagaatacttaggaataattttaacctaatcagggcaagacttatatactgaaaactataaaacactatggaaagaaattaataaagatctgaataaaataacaggaagaccccccttgttcacagattggaagacttaactatcattaacatgacaatactttctaagttagtctacaaattcaacacaatctctgtcaagtgagaggaagttaaaagatcatgattcaaatgccacagagcctcactgctcttaatgttgtagtagattttcttgaataaatgtttcagcatttgctgtgtacccttagaataacttctagagactttaagtgggggagtattatttttttcataattgttactagttatgcttgttttgcaaaggagaaggtccgtgaagcttctcccactgccaatccagaagtggaaacccagaaaccctttttaaaaaaaaattcctacactgaatgtcatttcaacatgtaaaacacatacaagtagaactgctctaattgtgattggggtaaagtctccgaagtccattcgggtggcaagttctcaaatatttcacggactctagatgacttatttatcaacccttggattagatgacagtattctttcttttttttttaacttttattttaagttcaggggtacatgtgcaggttgattacataggtaaacttatgtcatgggagtttgttgtacactgttggttgaagtataaattagttcaaccattgtggaagagagtctggcaatctcttgaagacctaaagacagaaataccgttcgacccagcaattctattactgagtatatacccaaagaaatataaatcattctattataaagaaacatgcatgcgtatgttcattgtagcactatttacaatagcaaagacatggaatcaacctaaatgttcatcaatgatagactgaataaagaaaatgtggtacacatacaccgtggaatactgtgcagccaaacaaaacaaaacaaaaaaaacaaaaggagatcatgtcctttgcagggacatggatgagcagtgttctttcaagccctaatatttgtgaagtgtctaatatgttatttatatatctaagaactctcctctctcctttgtaaggaaaactgcttttcttaagtgccatttctcttccactccttcaaggaaatctgttcacttttccttttcttctcagtaaatgctatctacgtatttagtgcatacttaattcttttaagccttattgacagttacatcagttttgagtctaagcccattaggtaatcaggcctctgagaagctcatattttttcaatgagtatacctaataacaacttctaaacaactacagattctcaaatgttttgggcacaacaacaaaaaatgataaatcggaccctcactgatgcttttaaaagtaaataagcaaatcataagaactcagggatatgggagataaaaacaatgattctcactgtccaaggatatataagtgggtagggaaatgccttcaaacaaggagtttactccttcgacctttgataaaaggataagctttgtcagacgggcccaaagaggagcttgctgataagagttgtcacaaccactccacccctcagaagtcctctgccctcaccacttggctgtggagtgacatatgtcttcatagctcctattacccttgatttttcttaactgggcctttctcatttcatgaattttactactaatcacttggagaaaatagataataagtaatcaacttgggattttaatagaaatttcaaaattttcactatcacaagtccatttggtttatatgctggagtcttcttgagatgtttctgagttttctcctttgatgttctactctctgttatttgtttgttctcagagggggtttcactagtctctcactcttccacaaattgtttgttagcagaagaaacaggaatcctttcctccatgttatctccgtttccacagtggagatttaataaaaataaaataatcagtttttcctttcttgaaagtggcaattaatatttttaactccagatcgaatgatgctcaatcactagcttttttaagacatactttagtttgtcaatttttccaattggaatagaggattagaagagtagaaaaggaaaaaaactaagaaatattatgtaaataaaaattttggctggagaaggaaataaatggtaagtacatgggtggatatctaactactatttttgggcaaaatgcaaagaaaatagtctgttttttagtatttgatcgatcttttcttgggctcctttttccagcagtccagatcattggttgtgattaagatttcaggttgtcagcttcagttgaatttgctctctgaagaatgttttacattatcttctttgttcattaagctagactttaacacatcatgctttttcttatctaaattgccaatgatattagtgttattattgcataaattatttgtgtattggtgttctgtatatttctataattgtaaaccataaatactcttagtcatgcatagaatatttgctgttctttggaaagaagcatttgagttcatagataattcatagagaattttgcttcttttagatggcatctctgtgttcacatattttttaccttctttgctttcttgtcttatctacagatatgacctctgatttttcttacatttagtatgggccataggtacttagccccatcatatgtattggtcctctgcctctaatccctccaacaacaacaacgacaacaaaatccaatctgcgtaacacctccatataattctttctatgcactattttttcacacaattccactcttcaaagggcaatagtcttccactgcatatatattacatacagaataaattcaaatactttgggctgatacccatagatttttgctattttgttcttgctgcccacttttctactattgttttagtttataagcaccaaactaagcattcatttttctcattttctgaagcagaggtggaaaccttgcctgttcatatgcagattatcatgtaggttattacatgaagattatcatgtagattattacataaagaataattcctctggattcctaccaaaccatgtcaattactggggaggctacaagtgttagagtttgtgtctgaagggccttatgcacaataggaatgatatcctcttgtcgggggaaagacttgtcattcaaaataaaagagttctatatctgtacagatagtagatatatgataaacttttccactgtaattctcagaatcaactgaaatctaccacagttgggggagagcagtaaggctattaatgtcacatgaaagttgatgctgcccccgccggtcgcgccgcagaggccggtgagcgcgggcggccacgcgcggaaggcgcgggctgagcagagccggcgttggagcccgcgcgcgcatggaggcgttgccggcagccccctgagggcagcgtggagacaagacccggcgacctccgcgcatccctcgagccgccacgcgctctcgccaccgggcggcgacgggccgcggagccggcgcggccatggcgacgggcggccagcagaaggagaacacgctgcttcacctcttcgccggcgggtgtggaggcacagttggtgctattttcacttgtccactagaagtcattaagacacggttgcagtctttaagattagctctccggacagtctactatcctcaggttcatctggggaccattagtggagctggaatggtgagaccaacatccgtgacacctggactctttcaggttctgaagtcgatcttggagaaagagggaccaaagtcactttttagaggcttgggtccaaatttggttggagttgcaccatcaagggctgtatactttgcatgttactccaaagccaaagagcaatttaatggcattttcgtgcctaacagcaatattgtgcatattttctcagctggctctgcagcttttatcacaaattccttaatgaatcctatatggatggttaaaacccgaatgcagctagaacagaaagtgaggggctttaagcaggtgaatacactccagtgtgctcgttacgtttaccagaccgaaggcattcgtggcttctatagaggattaactgcctcgtatgctggaatttccgaaactataatctgctttgctatttatgaaagtttaaagaagtatctgaaagaagctccattagcctcttctgcaaatgggactgagaaaaattccacaagtttttttggacttatggcagctgctgctctttctaagggctgtgcctcctgcattgcttatccacacgaagttataaggacgaggctccgggaagagggcaccaagtacaagtcttttgtccagacggcgcgcctggtgttccaggaagaaggctacctcgccttttatagaggactgtttgcccagcttatccggcggatcccaaatactgccattgtgttgtctacttatgagttaattgtgtacctgttagaagaccgtactcagtaacaggccggaaaattgtgctctagaagaataaaactgaaaaactctaaaaaaaaaaaaaaaaaaaaaaagttgttgcttagggcttagggatatagtactgggaatatttcagtgaggaggttggaaaccagaaagtattgtctgctatgacaagagtgttgggtatgtgaaagtgtgcctgtactacatatgctcactttgaacttacttaactgttattaccttgaataatgagttttactttatagcacttaaagacacctttctccatcagatacaggttcttggtctttgactgaagatataaaaatcatataaatgattaaagatataaaaagagataaatagatataaatggtttaagtggctttcttccctgaaaattccttaagggaaggactctgctttctgaagcttttcatctcccattttactacatacatttcctgtacttgcccgtaggtaatagttcgtttgtatctattttctgaatatatgttttgaagaaacatataatatattctcctcattcccaggggatacattctgaaaaccctctgggatagttacttatcaaatatttattatcaactgtgtacaggcacgattctcttttctatggacatagcagtgaacagatgaagtttttatttctaatgtgaaatgtcacatagttttctactcaaagatctttttcaatgtttttctttttcctgattaacttagaaaatgggcaagtcatataggcttactgtgtgtatgtgtgtgtgtgtgtgtgtgtatgcagaatacacaattggaagcacttggtgtcctgaaaagtgccaagtacaaaagactcaggtttgattcctactactccatttactaactaaatagagggaagttgcataaaccctcactttttgtttgtttgcctttttttatatgtattttaatgggagtacttttgtacaaatacctcattaaggctaagaacacttatcatattcagactgcaggtttcaaatgttgattctgccacttcacacttaccggctgtgtaaccttaggcaagttttatgtcccttttgtcctccagttttctcatctgtaaaatacaaatataacatatctcatagggttattctgaggttcaaatgagttcctgtgtgtgaagtgctttgaataatacctggcatacagtggtatatgagctaactctcactactgctaccatgctacatttcttgcagttttgttggagaaataaatatgatatatatatatatcaaaattctcagcatagcactggatgcatgactgtcatccaataaattgaaattattactgaagcaatcagtcattttttattattctaagagcctcagaagcatcactctagagaagaatagtaggacaataatttatgttaaatgaagagaaattttggaagaatgagaggcagcatagccatcttaagaaaagtaatagctatttgtcatatgtagaagttgtcttagtcactattgctcccctggcatactatgatctccactaaacagaagtattatattttgatttattataatttaatataatacacatatccattataatcatagttctaaaattaaaatccaggaatggttacttcttatctaaagcacttaggttcaaattaacccttgggatcaagcccagactccccaccctgatatgcataaggcctttcacagtgtaaaccacctccacctttctgggctcacttcttgttgatcccgcactgctctacattgcatcccacaccagatcacttttatttttcaattacatcagtgcccagggtccctgtcagtctacacattctgtgtggtacctttcccataatttactcatccaatttaaataccactttctcgtttccccatctggttagctgctcctgctgtaatcccataggctttatacacatctttaagagcatcatttacattgccttaacactttatgtatgcgtttatcacaacatggagggagatcaatgaagatagggactatgcttctacatcactggagcttgacatgtcatgattcttaacatgatagaatatttattgaataaataaatggacaactcagtgaagggagtaaggtaagttttgttatcaccacttcaccggtaagaggggtgaggctttgaaggcccatcagtaattcctattgaaagccaagagaatagcagacctcccatttacacccagcattgtctggaggtctgttaggagacattttctagattcatcttgactactgtggcctggctcattttttttgagtgcaatttctgcctaatgcagtgtctctcaatcctgggtgcacacattgaattgttcatagcagggtgcctgctacttaatgatatacttaaatgttttttggaaaaggagagaaaaaaaaaaacactgaaactgcctttctttcttaaacttttaattatttaggttcttatactaagttcctccaagtttcatcattagtttaagtattttaatctgattttaactgccttactgattccccaagggtttgtttccgcttttttcaactaagttaagaacttctagactatatacttaaaattgtagttaattgagattggccacagttgaatttcttagctgcgtaacaggattttcatttgaagctatttattcttgacaatctctactcttaaagtgtggagttctcttaaaggggctgtttttcagtgaaaatttccagatactcctcaaatgtgtttcatcattagccaggaatcaggaggaaatagagctcctgggatgctattatttcaaacccagatagatgctccaagtttttcccagtaaaagtaggttgtctatctactaccgtgttgctccctttgagctcccaaactcagctgttggtccattgaattatacagtaactaggcacgattatgtgactgcatggcttaaaatcctccaatggctcctcacagcttttaaactaatattgactaattacctttcatgcaaacctacagtatcggtgttaaaccacatatacctacagatatccacataatatccttcctttcaatccatctgatctacttgcagggtcccagaagcatacttctgttccttcatgcttgtgctttactcctcctagagtgcttttttccctcttattactttgcctagatctctgctattcattttctaaaacttaagttcaagtgtcaccaaaggggcaccttgaccgacaccactcaatcctcatccaagcggatactaactcctctttctcttttttcccaaggcatgaagggcccttctctgttggcattcacactgtactgtgctgaattattgaccagactttagctctttgtaagacaagcacatttcctcatttggctttctatttccagcactcggtgcaatgcttattacatgccaggcactgtcctaactgatggggattagtgaatggtacaatctaccaagattcaacccaaagtcatcgacatttcttagatcctttattctccaagttctgatatctaaacactaaattagtgattcataaaatgtttaaataatttgaataatttaaagaatttaatcttaaataatttaatcttgaacaatttgaaaaaattttggactctctagggaaaaaatatacaattcctatgtattttatgtaaggtttatgacactttataaataatatgaattcaatctcctggttgaattcatattgtttttaactggcaggcactgtaatggacacaggacatataatgaccaataaggcaatatcattgctttcagagaatttcccatataggcaaaaaattacacatgatcaaataactgcaatgcgatatgacaactgtgataatcaaaggaggaaaatgtcaactcttaaaagttttcatagatgtagccattgagctaatcttaaaggggcaaaatatgtaggagaatattaaagtttaaagaacccctaaggaagaaaaatcccaaaacaaagtgttgtttataattttaataacaattataataacatcaatacttactctatgctacacgttactctaattgattttacgtacattaattcagctaatgctaaaagcgatccctggtagtaagtaccattacgtattggtttattagggcttccataatacagtgcaagcataactctaagatatggaaggtttgacttcagaccaccacaataaaacaaacattctaataaaattagtcacgttaatattttgatttcccagtgcatataaaaagttatatttacactatattgtagtatatttatggtgcaataacattatgcctaagaataaaatgtacataccttatgttaaaaatactttatcctgaaaaatgctaagaatattctgaaccttcagcaagttgtgatcttttttctggtaggtcagacctctggtagatctagcaggttgatggttgctgaccgatcagggtgatggctgctgaagtttggagtggatgcaacaatttcttaaaacaagaaaaaaatagagtttgctacattgattgactcttcctttcaaaaaatatattcttgtagcatgtgatgctgtttgacagcattttgccgacagtagaacttcttgcaaatatggagtcaatcctctcaaaccctgctggtgctttattagataagtttatagaatattctaaatactttgttgtcagttcaacagtgttcagagcatcttcaccagaaataagtttcatctcaagaaaccattttctttgctcatccataagatgcaacccctcattcattcaaattttattatgggattgaataatttgtttccatcttcaggctctacttgtactccagttctcttgcaacttcccccacatttgcagtaactttatcccggaagtcttgaatcccctcaaagtcagccctgtggtttggattcaacttcttccacactctattaatattgatattttggccacctcccatgaaaattaatgttcttaattgtatctaaatagttaatcccttccaaaaggttttctattcattttgctcaaatttatcagaggaatcactgtatctcggctatacccttatggcatgtatttcttaaataatagcaattgaaagtcaaaactattccttaatccatgggctgccaaatggatgttgtgtaggcaggaatgaaagcaatattcatctccttgtgtatctccatcagagctcttgggtgaccttgtcaatatgcagaaatcttttgttttttttgaaggagtaggtctcaacagtggacttgaaatattcagtaaatcatggtataaacagatgtgctgtcatctaaacattgttctatttacagagaagaggcagagtaaatgtagtgtttttgatggcctttggacttttggaatggcttcaactaaataagtactggcttcaacttaaactcaccagctgcattagctcctaacaagagttagcctatcctttgaagctttaaagccagtcattgagttctttctagctaagaaagccctagatggcatcttccaatagaaggcaatttgtctaccttgaaaattgtttgtttagtgtaatggctttcatctattatcttagcaagatcttctggttaattttctgcagcttttccatcagaacttattgcttcacctggcacttttattttatgaagatgggctcttttcttaaatctcttgaacaactgccagattcaaacttttcttcttcaacttcctcactgctctcaggactcataaaattgaagagagctgcggccttgctctggattaggctttagcttaagggaagtttgtagctggtttgatcttctatccaaaccactaaaactttctccatatcggcaataaggctgtttcactttcttatcatttatgtgttcactggagtagcacttttaatttccttcaagaatttttcttttgcatttacagcttgactgtatttcacataaaaggcctagctatgttggctttggacatgctttcctcattattattcttacctctaatatttatctaatattattcctacctctaggtaattattcctacctcttgatttaaagtgactcttcctttcaattgaacatttataggccactgcagggttattaattgacctaatttcaatattgctatgtgccagagaatggggaggcctgaagagagggaggaggactgttggtgatggagacgtgagggaaggaggatggctggcaggtggagcagtcagaacatacacaaaacttcaccatcttatatggatgtggtttgtggcaccccaaaacaattacaagagtgacataaaaaatcactgatcacagatcataataagagatttagtaatattgcaaaagtttgaaatattgtgagaattaccaaactgttacagagacatgacacgaaaacatgctgttggaaaaatgtcactgagagacttctacaatgtggggttgccacaaaccttcaattggtaaacaatgtaatatctgcatagagcaataaattgaattgcaataaaatgtggtatacctgtgccacagactgggtagcttgaacaacagaattttttttttctcacaattctggaaaattaaagtctgagatcaaagtgtcaccagggttggtttcttttaaggcttcttcccttgacttgtaaatggccatctttttcctgtgttttcacatagtctcctctctgtccctgcccatgctcaaatttcctcttcttctaaggacttcattcatattggattctggcctactaatgtcttcatttcaacttaattatctctttaaagatcttatctccaaataaagtaagattctgaagtattaggagttagggcttaaacatttgaattttacagagacacagtttagctcatatgttataatccccacttcactgaaaagaagagtggagcacatgaagttaagtagcttgccccagtttgcagaattattaagtatcacaatcatctagctccagaatctgtgaggctaacctttagattgtatgattctctttttatattttaaaataagaaataaaattgatagacctattgaattaatttttaggacaactctttcatttgtggtacaccataattcacaaatagcaaaaatttgcctatgtctataccataggcgtaccaatttcttgacagcaaagcagggtctagtctggttagtacttggatgagagaccaaatagcaaatatttaaaatgtcttttctaaggaaattaaattggctcctgtattaagctgtagaactaatgatttctgctctgtgcaagtataatggccacaactaacctccctgcacgttaagcactgtccttagtgtacctgatctcatttatgtcttacagctctttgaagtttgttattatccacattttacagatgggtaaactgagacttccagagattatcttctctctcctcacaaaaatcaataacaggaatttgaaacaagttttcttaggaggaggttttgtatttctgacttctcttcttgctcccacatcccaaggccaaagttaggatgccttgtataagcctttgtgcttgtggaaattggactttcccgtcttgtatgttcatctggcaggttcttcctatgttcataacaagatatattgtactgctttccccaattcccctcactttcactgcctcttgtgaatgtgagctatttaggtccctttcagcactcttaaagtcacctcccaagtattctgtggccctcctcaggagggtattctaagttagtcatcatggatacatctaggcccagatccagaatctcatgttcatggcatcctctttgacctacttatctgttgccgcctcataccctactaagccagtgctggtctttggctcctcatagcctgtgaataaaaaagggtttcaattctacaaggataaatcatctgtctttagactactgttactagtgtttcacaactgtgccgtcaccctttcttacatactctgagagattttgtaatcaaattttgtcacataaggtgaaatcagaagatgcctagttctcacttctgtgtatagctttgaaaggcctgctaatgcttggaacaaaacatgaaagccttgtccacctttctgttttaattcctaattactaatttcttgcatgttagtggaaaagcattaaacttggaacagagcaccttgattctggtcctagctctgccagctgggtgttataataaaagtcacaggaatctaaaatggaacccgagatcttctactgctttctagttgagttactattggcaaactctttgactcaattttttttttctgtaaaatggaatcaataaaatattaagcaagatattgttcaaaggaaaacttcagccaacttaaatttaaaagagtttaattgagcaaagaacaatttatgaaccaggtagcttcctgagctagagtgggctcagattctctagcacagccacatggtggaagaagattaatgtacagaaaaagaaaaataacattaagaaaatggaagtgggggacagaaacagtcagattggttatagtttggtgtttgacttatttgaacatggtttgaacagctggccacctttgattagacaaaactcggtgattggcacaagaatagactatagtctgtttacaactccatttagtttatagttcacaatgtagagagaaacctttaggctgaacttaaaatatgtaggagacaactttcagctaaacttgatttaacaatatattaagagtttatattatagaaattgctttattgctaactttgtcatctgggttagattataaactcaagattattgggtagatagttggcacctaatctgtgtgcaaggcactgagaaaacaaaagataaaaagctgttgttcttcagctagttggcagcattgatattcctccaatgtacttgtgcctgctttgaaaacaacaatgcctctgcctctatttggattggctccctcacggtgaaagaaaaaggagtgattgtgatcctgaatttctgaaataaggagcatgtttaacggacaatctagcatctgttttctgtacctttcccaccctgttgacaaattctcctccatctgcatcgcttaaagcttagtcagaaagtaacagaaacctcctcatggagagaaaggaaggagagaacagaaacctagatagggaacactaaagtgtcagagaaagaaggagaagaactgggttctcatcttaactcagtcccttaccaactttgttcactactttctctctctctgcctttttttttaaagtatgatttcacattatctccttcgttgtatttcttatgctaatacatatcctttcctgatcttgtaatgtattcattgctgctccttgagtataaagtgtgtgagtcctgggtcctctgagaaaaggaacacttaaggtgtttaatgctaattaatgcaggtgtctgttggataaacagcttacatttctagatgaaggtcaagcagaacgtcttccgagagagaaaatctacacatcagactttggtagacgcatgtgcatacttgcaactgcagaaacactcctgtcatcctatgtaaacatacagagaacagggtatttactattattagtaacagagtgatagccaagaccccttgattccaatattggttgtaccgttaactgtgacctttggattcaaattttattttgcctctgtaaaatgaggggtttggaagggaagaaaacaaattactgctttttcagaactaagccaatcatttatattgtctcattttatccttaactattgttacttgacatttcacttccttattttatttttgttctcataaatacattaaaataaatagtaccatcccctttctataaatgagcacactgaggcttagagagttttactggattaattttaaatggaaatgtttattatcatttaaaaattacaagtttgttttaacaagtaactacttcaaaacaagtactacgtgaagaaataaataataaaaaaagaataaaaaatataggaatgcactggccttgctattgtacaactgcaattcaataaattttgagtgactagaaatttgagtggctggaggcatctcaagctgcagttctcaaagagagtatgattgtcacgtcatctgtcctggcctttcagaaagatgatatccaagaaaaataactccagattctcttgtattttcattatctcattattcccatggcttcaattattagctagaggttggtgacttctcaatttgtgtttccaaagttaatcttactctgaaatccagacccagatatctagcaaatgacctgacatccccactgaaatgtctcaaaaacatcttgcagcacagtacatctagaatcatgacatcaacatcctcccctaatattccacttcttcaaggatttctgtatctggtaatacaaacacttttctcagtagcataagccagaaaactgggcattttctgtggtacctggtccctcagttgaactgcttggatttccggacatcatcttttttcctggacataaattttctcaccgatttctttatcccccttgatgcctgcatatccaccaactcctattcttcctcagtcccttctctacaatgaaatctgtgtggtcttttacaaatgataatctgttcatgttatcattcaccatccaagatacaaatagttactttctaccactcttaggaaaaaaacacaaatctccctaacatggcctctgctaccctgcatgatttggcctcagttcaccttcctagactcatctggagctatttgctccttgatccctatagacatattggtcaatttttaggtccttgaatttgtcgcatacttccgatcaaagattctttccaaattccattctatccttcagaaatattcttctaccatttctctaaacagtcattcttcaactcttgaaggatgcaccatcaaagacttttcctcaggccacagacaggatgaggcttccccattaaatcctgttaccatattacatgcttccatatttgccagtccataactataggttgatttctgaaattgctagttagtgtctatctccaccactagactccaaatactatagggcagaaaacttcaccaatgctgggcacagagccagtttattatagatgtttaaaatatattcatttattttgaaatatatgaatgaatacataaataaaaaggtcttctattatatgtgtgtatgtaacttttttgtgtgtgtggtcatcgtggtggtagatgtgttacaacaaatcagttcccaaatatccaactatcttaaggcttccttgtttgttctttttttaaataaatatttattttataactattttatttgtaaaaatgttgcaaagatagaatggagagttccaacattttccatacccaattcccctattattaacatcttcccttggtatggaacattggtcaacattaaggaaccatgctgatacaattattatcaaccacagtcaatactttactttatttagattacttagtagttacctaatatcttcttctgcttcaggatcctacccaagatactacattacatttaatcatcctgtctccttaggttcctcttgcctattacagtttttaagacttaccttgttttttgatgaccttcacaacatcgaggagtgctgctcaggtattttgtaaaatgtcccacagttgatatttgtctgatttttttctcatgattaaactgggatatgtgttttgggatggacaaccatagaggtaaagcaccaatctcttcacattatatcaaatgtgtatagggactcaaaaatgtatcccaaagtatggtgccttgggatgctgagtattttgaagtaaaggagattggaattcctcagaagcaaagtctctggcccctctttctcctgtgaaataaaccatagaaactaaactccctcttccccaagattataaaaactagacccttcttttccaaaacaagccataaaccctaaaactattactatcatcttctcccacctttctgtatagcagctggccataaagaaatactctgacctacgttgtttgatagtaggccataaaacattcattgctaaggtcctgccctatatgtaggaggagggactgctgcacagagaggtcaagaagaatacaaacagacagggcttactgggttatttctctcagtctattaccatgagatcatactcttttgcccaaatttctgcaacactggccataagcataagatttaagcataaaaatagataattttccctgggtctttggctctcttttctgaagtctcccatgtcatataaaactttgattaaataatttattatgcttttctcttgttaatctgtcttttgttataggagtgttggccatgacccttatgatgggtagagagcaattatcacacctctatcaccccaaaagggccatgctattaacataacttaccattgtgaatgttaaccttgatcaccgggcagaggtagtgttggtcaagtttctcaaactgttaaacgatttcaccatgttttgatactgtactcttcgaaaagaagtcactgtgtgcatcccatacttagtcagtggggagttatatatagtaccttcaagacagagtatttacataattatttgaattcttttacatgacagatttatgtatttctctccatttattaatttatatatttatagattgtatctgtacagactcctctatatttattttataagactttattttgtggctcaaactcttccagctttagccttcaggagtgatttcagttgactactctgtccctttgacatatctctaacattgtgggtggttgtcgtttctttgaacatatccttactttatggcactgaaagatgctcaacattcatcttgtatatttcttaccccagccctagagcctgccgtttcttcgaggaaccccagttccctttattggagaatatttcttctgttctgcctacttttccttcttctggcattccaattatgcatatgttacattttttggaaattatcccataattcttaattattttttattctttctctttgcatttcagtttgggaagtttctactaacctaccctcaagctcactgattcttttcttgaccatatcaatgttagtgatatatacaacactgctggagtgtttttgatttctagactttctttcaattttttcttagggtttccatctttctgcttacattattcatgattttttgcatattatttactttttttattagaaatgttattctaatatgttaattttatattatgtataggtttttcaaattgatattattcacaattatttcagattccgtgtctcatagttccaaaatttatatcatatctaatatgatataaatgattctaatgattgctttatctcttcagattttttttcttctctgttgccatgccttgtaattttttattaaaagccatatgttttatcaggtaagataaactgaggtaaatgggcttttagtgtacaaatttatgttactctggcaaggagttgcacaatgtttaaatgtttgtcctagttgttacagttttgagatcagaggcctcaagtttctctaatgtatttgtttttgtctctattcttggttttgggttcccctatatagtcttcttcagagacagcttatgtatttcagctcttttagctgtaatccactgttgttatactggagctttgttggatgctggtaaagtatgagagaggggagtgttcaaaatattttaattaaatcttagtcctttagtaggccagtgcattggggcttcacaatacagctttttcttcttttgcctctgcccctctatatgcttccctggttgcagtatttctatttatttccttgaaactctgacccccgtggcttatatttacttcctcttaggtgagacaggaagactgaaagaggctggactgaaaggaattctcttcctgaaactgggataagtctctaacaatttcccctggatcatagggcttggatatggagaatgtcctgggcatatttcacaatggtcactctcctcctccctgtaacagagtaaggagagtatctttctgagttcttcaccataaaaacctggtggagttcctggaggtaaagccccaaacatgtggaagttcccctaagacagcagcacccgggaatttcccactatcatcactagtctagactcagtctccagccattcatcgaagtgtttcagtgttcctaccactttaggaatccagctgctcctgcccctggtaagaagatctcagctatgttcctctggatgaacccatctctccacttttgaggatggcagtttgccccgcaacttcaattttctcatgggtccaagaaaatttgttgattatgaatttgtctattattttcttattttaaggataagagtgaccagagtctttacatgtctgacctgaaatcagaggtcccatgccagcttttatttgtaaaacacatctttccatatttccatctgtggtcatctttatgtttttctaatttttctgtggtgaatttcactgttcctcagattttcagaaaaactatctagattcagttcaaattaagttttgctaaaaatatgactaccccctcctccccaaatgtcaatgtaattatctaagttaaacattaatattcccatgtgagctattctattcatggtctggtgaaattaactgaagttgagaatcactggtgaagaacttaatcaagattaataccttcatttgaaaaggttgatgatgtgggtgagcacattaatggtttcatccattaaatcttttggtgctgagaattgatgtccttgtcctacttaggtaaagaatttttatttcatggcagaaacaagattatttataaattgaactatagaagtaatttttctcgattgacaaaaggtacaatttttgcctcaagcctttatttagtggctcactgtatatcaggctgttcccaaatcagtcaaaatttgacaggggtggtggagggattatcagacagcctccttctcattttaaaaaattaatttaccaattgaaaacgcatggtttagtacaaataaaatgtctactaaaaattatctaaaatgtgatttccttttttggtaaaatacatgtagagtgttgtggatgcatattttaaaaactagatataacaaaagcatagagcaattacatgtgattttttcttttctcctttttgtttgtattttctctgttttacataacaaacaagtactgcttttgtaaaagaagaaaaccataaaagttaaaacaaaaggactagtttataaaatcataggactttaataaaatttggggtttattgtcaagccagtttctaatttcttctgttgaggaaactgaagcacagaaaaactaatcttcttaaatcttctaatttctcacttttgcctatcagaataataaccatcactaaaggcactgctcacatatacaagctttggcatttctaatacagcatatgttatgtctcatcaattttaaagtttttccagtatagtcataatacttaggagggggaagaagagaagagaggagctgtgagaaagataatagcttttatgtactatttggcaagcacttaactgtgtattttgtgttattttaattaatccttacattaccttcatggtataaatataattcccattttgtagaataaagaagatcaaacagatacaattttacaaatcttccctgtcgcaacctatagaactcgtatttttacacagttctttgtgtaagttgacctacagtagatactcagtaaatattcatttaataattgaactaatttagaaagcatttggtatgcatggaccagatttttagtgtttatcagtggactgccaattcttcactaaattcacaactgaaaaccaactttgaccacaagtagtgtttcaagttcagatcctctaataaacaaaattgttttctgtcatggaaaaaatcaacaccatttcttccacttggcttccttgttctcttcgttattgtgcttcaaaatgttgaaaatggttttctaaaattgtattcattttgtttgaagccttatcacttctttttcaataccaccttttctaccatgtaccaacctttgacctgctagcttaaaatgtacagctaagtaacgatagcttacttatttagtactttcacaaaaactatcatattggaaacaggtaggacatatattattactcttatttaaggatgaggaggctaagtctccaagttcagtgattttcttagagttatacagccagatgaaaacacagagctaggcttcaagaagagttccccaactccagctcttgtgttctttcttctatgtcatatgactcaataatgcaaagccattctctttgtcatattgttaatggctcgctataaactaccttacaacttgagtttctactccattcttactggacttttttcaatcctttaattttttagtttttgttccagtcaaagtttttagttgcatgaaacagaaactaactctgcctgatttaagtaggaaaagaatttgctgagaggctattgagtagctcacaaaatcatggagcagcaggctcagaaacaggtgagaataagcaagaagggcatcagctaagacagctgccaaaaccatgctatagaacacagggcacttgctgggcaatggattcctttgctggtacatctggctttgctgaccctgaaaactgaatattgttataccaactgccactgcccatttctaggatggtttctgattatccctgcttctttgtgtcactatctcctgtttcgaagtcatgaatgagtatgtcagattggcagaatatttatcatatggtcatactctaactttagaaaaagccgagaaacaaagtttaagtatctaaaccattgtcattggaggtaagctctgtctcccatcaagactcattaagcccacacttcacctatcacaacatgaatgtttaaattattgaaagcctcccaccagaaccaaaaaaatgaccaaattccagcactgtttccaatttagttttatatgttctttctctggtctttctttgggaatacatttaatttacaactatgactcaattgtcactcaaccaatagttacctttattttgcagcattctgaaggttcaaaacgcaatgtgtaagttttattcacctgctaagaattattttttcaaagcttgcctcaatatttattttaaatgagtgaacttcaaggcctgaaagaataaactgatactttatgaaatatttttgaagtataaagaatatattcaacatctttccatgtctccagattttaatatatgccttattttatttaaaaaattttcaaatgtttcttttatacacaatatgtttcttagtctgaataaccctttcctctgcagtatttttgagcagtggctccgaaggcaccgtcttcttcaagaagtttatccggaagccaatgcacccattggacataaccgggaatcctacatggttccttttataccactgtacagaaacggtgatttctttatttcatccaaagatctgggctatgactatagctatctacaagattcaggtaaagtttactttctttccgaggaaatgctgaatctagtgttaccaatttatttagagataacacaaaactttatgcttcgacaatgttattcctgaaccctttaaatcctgaaagtaccttataatccttaatttattaccaattcattatcacaggagtcaaattctgaagatctttaaagtcatagtcatggcaaccatgggaagagcagtcgaatcagaagaagaaaaaaaaaaggttttgagaaatgactctatcaactgactgtaatgtgacctggggaaatttgctctgcatccctgaatctcagtttattcacctgaaatcctgggaccagaacaccctaaagaattattgagaatgatacattaatgaacctagtacagtgtaacacagggtaaacatccagcagttttggaatcatttttggaagtttcttgctagggttaccaagaaaatttgtagaaatcttgaacttaagtgtagttaataataatagctattataatgtttattgctctatgatgaagatagcaatataaaaccccaggattagaattagatttgggctctaaataatcttcctgcatagaaccatgtcagtatcttcttgacaaaatgaggaacagatagtagtgtttccttctacctgaaagtccactacatgcatattctttacatgtattattaataaaccatataggaggtaagttttattcttccaagataaaggtgaggacactgatacccagagaatttaagtgactttctcaaaatcaaacaccaataatgtggagaagcaagatttcaattccaggaggtcctcctcatctcaccacactgtaattcacctaacacatgagggttaattatcaaaaacagtgtggcttgtgggtaggaggtatttaacaagcattgatgtttcattgtattcattgataatgacacataaatacataaataaataaaataaacaaatgaatgaaactcaaccctctcactcttgtgctcgaattcagtgatacatgactgccatagtttcatacctgaagaagctccagtgtggaagtaagacaattgtgcaaggaagtaaaaaacatcaggctgtgttatgtgcagtaaaagagtcataaagaaaatcccacagcagtgctaaagagaaagccatgacttttgaaggattcaacctaaaaagagaaaacgaggccttgagaatgagtaagcaggtagcagatagaaaagggcaggggatatgctaggcaaagagaatagcaagaacagtagaggtggaaaatgtacagcatatttatgaaatgctgaattattctatttgagtaggatgaacagtggaaaaggacacaaagaaaataagttgacccagtttataacagttaacacatactaagtattttttattagccaggaactcttctcaatgtgccctatgcattacttccttaaatcttcataattactctatgaagtaggtatcattatttctttttctttttcatagatgaggaaacagagtcataaagagtataaattgattttcccaggccacttacctagtatatggtatagtacatacacaatttagggttaacaggagagtctataggttatcaaccttgttctgccctttgagggatgattaattgaaaagatatgggtttaattgaacttttctgctttatcggaagactgtagacaatggacaaaatgctaacacagctgacaaagaagatcagtttttggaaaatcttaagatcactaggaacagagaaatttgcaaagggtggaggtgtggtaagaggaggggcttcctgtaagtctcaagtaacatgtcttctctttcttctatgaaaaccacagtacataaaaaagggagcttattggtaactatttttcaaagatgttccatttaggattctatgatttagtatctgtttccatttccaaaacatgctagactttcatgggttcatgcttttaaatatgctattgtttctgcctgaattctgactctacttctccatttgtcaaactctcagatataaaaatcattttatacttatagtgatgtttactcacgcctttctcatagttacatagcatttctttctatgtatgaatctgtcctgggttttattcttccccaaacccccaagatcagaatttatcttgcaagcttctccattctaagcatcacattgtatctggtatggactgaaatcaataaatcaatttgagtgcaagtgatatttatcatgaagtgtcatttctcttaactaatataaatgaagttttctagaaaaatgccacacctcttaatactcaggtcacttttggatatatattttaaaacactataagtattctatcatgccaggtgtttttttttttatgtgtctgtactgagtcgtttattctttacacacacatttattcaataagtactttgaataagacattgccttagatactatggatacaatggtaaacaacatagtctctatcttcacaaagtttataatggaagagaaagatcttaactgcttgcttaaaaactcatttatgtagagatatgtctaaatccaggggtcaatgaagtgatatttcagatgacatcaatatgacaggtagaattaactagttgaaaaagaggacatggttatgaatttgggccatattgttagaataatgctagccactgataaattttaagcaggttataatcaaatttgaattttcaaaagattattgcagcttcagtatgcagaaaaattttagtagttggaaagcacatgcagaaaggcagtgaaaatgctattataagagtctgaggaagaggtaaaggcagtttaagttgcagtggtggtggcaggaagggagatagaaagcatcattaatttgatattattttgaaggcaaaatttacagaacttggaaaattatttatataccagatgaaggagattaggaatggctttatgctttctggcctgtgaaactgatgaatggtagtataattcactcatataataacaagaggagcaaagaaagacatggaggaaagcttatggttttgttatacagtgaaatgaagttatatgggacggcaaggtaaatttctcttgggaagttggatacacaggcctgaaactcaaaaacagtgtctggccatcagatccgaatgtgagagacatcagcatataaattattgactcggctaatttttaaaacccatggaagggtgatttttattctgttttacaggtaagtaaattgagactcaggaagataaagtgattaattttaaactacaaagctagtaagtgtcaaatattgaatccaaaacttcatcactccatcactgcacagagaagagagctccctttaacccctatattgtcttctacacatatgctccacctctttgttccttccctagtgtccaaatggatactttttactacaaaggcaacaaaatttcctggatgagccaggggagaagaggctcaatgagtcatattagaggcttgaaggtatttatttccaattaaatttaaagaaacaatttatttgaaatgctttagagtaattttcacacagctttgaatttacaaagttaattttagagaagtttgactttaaaataagcaacagcagatacttaggaagctgaggcaggaggttctcttaagcccaggagtgtgaggccagtttgggcaacacagcaagactcatctctaaaaacaaagcaaaacaaaacagctaaactaagtaacaccaattgcctattttctattttatgaatttttccatattgttgcttctgttgtactttcaaggagtttaaaatttatctctattcatagctgaattttaagcttactaaaaatttatttaaaatttcttgatataattttgttcaaggggattattattcatcaaccaggtactcatgtttataattaattaagtggtttctgtaaaaaggcagctgatgtctgccatttatcaaactttttctcttataattgaatttagtgattctttagaaaattgagtagcaggtgattttctcatatgtataactaatttacaaggggaggccaaaaatctttggcaaagaaggattgtgtcctcaatgttgttgataaatgtaatcttactttctacatagcagaaaaactctgttgagagcttccttcttcccatacgttacaaaagacctggaaatttggtttcaaaaatgagaaggggaaacactgttcagagtaactgcagtgtcccattctgccaatggaatttgatgacacttctatcattcatgaatttgttcaatagctctgtttggctgtgtatacctgtgtgcatgctgttcctttctgcctaggatggattgccatcaacattatatgctcagagtctaattcattcttttactcagtgggacagtcttctggggtgccttccctaacttcacagagatgtaggaagtcttttctccatgatccctttgtatcttcatcagaacaacattactctcgaaatgagttgtttacctgccaggtgctgagggtgaaaaggtaaatgagacagagtgccccccaactccctgccgacaggtagtgtatctcaatgaatatgtggtattttaataaatgaattgaagaaagataaaacaagtaagacataatacttgctcttgagagtttgtgacaagcttgaaaaataagacatatataaatagatataattataataaatggacatttgtgccaaatatcacaaggcagcaaagaaactagtttgagaatccagaagagaatggagctgaggagtcagcagctgaagcaagtttggaaagaaaaactcatattgtaagctgatttagttgaaatattgatgaaactatcattctatcatgataagaatcaacagcagttgtaaattgttttctatatggtagacattgtaccaagggctatacatacattgtctagtttaatcactccaggcagactcctaattcattagagtaatggccactaactacttcatgtgtttgttttgtgaataaatgggcatgttaatgcgctttggaaatgatagagcataaaacaaaaatctacataattattctgaaaagaatggatgacaagaaaaataggacttcacatagggaaagatgaccaaaaaattacgacattggaacagaagaaaaaggtgcactattggggctcaaacacagatggcttagaaagaaagtctgaattttaagaatgttgagaaataaaaatgtctcaaggacagtcccttggtgacagtaaaaattgagaccacttggaatgaattgaagtggagcaatagtaagagaagctggagaacaggaccgacatagaaatagtatttagaagctgtgaaagcacttcagctgagcctttaacaaaaaagaaaatatttattatgtagcctctatgtatcctgcctttttttggacattttaaatgtactatgtattgaagccactaacagcaatttaagctaagtattatagtcccattttcaaaataattttaatatatattaaaaacagtaattttcaaggtctagggtttaccctggattatatagtccatgatggctcgccaacaacctgtctgtattctagctagtcagaaaggaaaaggtaaatggtcaaagatatacttttttctttttaagggaacttcccccaaagttatacatacatttttgctctagacttgagtcacataggcatgacttgctgcgaggtaagcccaggatgcactctcttctttatgctatgtcaaaaagtaaatttatagtatcttctgtgtatgttctacatacatatcttctatatacattatagagagcatcttctataaaggaattgttttgttagaaagaagccatttgctcttactgaacagatactcagtacagacttcctcatttactcaaatcttatagtctcctaaatagattctatagttatagttacataaaatttaaacatctctccttaactgttacatgccttaaatatgtagttgattgtgtgaatgagatttgtttttcattaaaacaaatcttcccatttccacagctgccattcagggacattccttcaacatatcttctgggtccaataacacattcagtcattcagtaaacatgttcattctctcatatgtgtttcagacactgtaccagattctagaattaaatcaatgatgtaagcatactattggccttcaaggagccattttaatagaaacaataggttaattgttgatgtacagggaagtttaatttatgtaatccttatctagcagtattttatttttttactaagcattatctgattatggatttcctaaatatatagttatatcatctattaattgcatcaggtacttttagtagcatgctttctaattgtatcagtaaaaagacttttttttttattttggaaaattaatagaataaaccaaaaataaaaatcacctgtaatcttattgttagattgatcacttgtgctgttttagtctccattgtactttttcttatacttttttccacatacacataagtttttaagcatatctcttaattaattttgctttatcaaatattatatgcatgttattttacaagccaaagaatgctgcaagtcttataacaaaaggtttatgcccctatatcagctactgtaacccttttagctatttattctgctatattgccctgtatttctaaatgatagggaaatattactctctgttaattcatcaagtttatctttggagttcctcatatttaaataatgattttaactctcttacagcttccctgttctttcattcatcttctcagtatagtattatcatatttgggggcaaatccacatctaggaattttattgtttttactactacaatattatttacagttcaaccaaatagcatgctatgattacatttgttttcctacattacttttctattggaattaagactcttttttttttttttcattttaaagcacccatcactgtttataccaaattttaaaaggaactgtaactactacctcataacatagtgaaatatgagtaatttataaattttttccctgggtgacatccttttgtgtacgtctccccttctcattccacagctgccattcagggacattccttcaccatatcttctgagtccaataacacattcagtcattcagtaaacatgttcattctctcatatgtgtttcagacactataccagattctagaattatatcaatgatgacaatatactattggccttcaatgagccattttaatagaaaaaaaattcatgtaatagataactggaatataatgtgatgggtacgataatagaggaaatgctaagccagtaacatattggatgctgtctctccccaatgccatgttcttatgtggtttgaaggaatataaataatcaggaggctaaagacttttccttgttcagaattattgttaaaatatatgtggtcaaaatctgttgttgctttttaaagcaatgtaaaatgattgaccactattcacctttatttacaataaaggaatcaacatacaattggataacattctgattactaccaagttattgtttttcctggtttctgctgaaccagcaaatcaaatattgaaaggactgagtctacatgtaaggaattagttaaggtaaagaaaaaatatgcaagtcaatacattacaaaagttgttcatctatttatggcagcagattctaaactgccaaatctccaaccatctgattgggttcctaaagccaagtcttcgacatcccatgaatcattaccttttagtcagtatagcacagggatttcaactttttgtaaaggaatggcctggtagaggaatctttaaatgtccattaaattaagtcttgtttagataattaaaacagagcgggatctgtctagttccctcatctggttggggaggttgttggtagtaataaaattattccttttaggaattttgcaaacaaactgttcatttatatgactaaaggtgtagatagggattcttatatggctactattaaatgattcatttaaattgtccaactaattatagaatcatctgttttatttgaaatgtatggcttcaggaaaattttgaatttaatttgatgtgatttatttcttaggttgctcagaatgatggcatctcaaaaacatgggcttacccgtgatttttgtttggtgaatgtttaaaaacaacacaaaaagccatttaagtacacattttaggcatacacacacacacacacaacccagaatggtccttaggctaaacgcaagttctgattgagtaatgactatggaaattttccccgacatttagaagtgctgttctctaatgcagaggaaataatacatcattttatgaatacatgcataaaataacaagatatcaaatgttcttttatgataaaggaagcaactacagaaagcttttatttgttcaaagtaaccagtggtattgatgaaaaaaaaaccacacacaccaaaaaaacccaactctcccaatactacttttaaaattaacatataaaaactgattttcattagaatgtagttattttcccacactagttaattaaaagccaagacccagattttatatatatatatacagatatatatatatatatatacagatatagatgatagatagatagatagatagatagatagatagatagatagatatcacaatgcaaacaattaagcttcatcatctggacaagaatgccaacttagtctctctttgtaaaaaaaattacaatttcaagacacttcatatttgcctcttttgccagcaccaagtcggcctgatgtgaatattcccatttcaggagaaacatccattctccactgctgcctgtggcaccaattattctttcaggatcaagatctctggtgaagcctcttggtttgtcggcagcatctcttgtcttctttgatttgctgtcattagattcattgtcagataaagactttctttctttttgtacttttttctttttttaccagctttttgagaattaaggaatgtttcaattaactctggacaatctaaattttctgagggttcccaagtactgtcaacatctgacgtctcttccacttcaggaaatgctccaccttcccttttgctataattggatccagtagtttttccacaaattcttcaggctctgcctcttcgacttttttacccttttcattctgtttttttccctccctttttaaaatatttatgtttattttttgcactgtagtttcatttaaggcttttggggtttttttgtttgttttgattgttgttgtttgattttggcagacctaaagggctattattcttacatatatcggctcccctaagccccgcccctccaggctttactttcagtgtcctgaggcctataaaggccaggcccctgccctccagcagggagtgcacctccgaggagaaacaaaggcccagagtgcgggcgctccagggtaccgcggcacagggcccgctcctatgccactgcggccgggtaaccaagagcgccccccacccctgaagccttaggacagagggacggcgcccatgcgccaaaatctgtttcaagatttaagactgtgacctctgtgaatacagagattgttcaaatgccctggggttcttgggaggcttctaagattactgagcatttgccaacattactattaatgtttgtcaaataattaaagactggattagtgaatggttaatgatataacagtgttctattgataattggaatagttacaacaaccttttacagaaaaagatggaaaaatcacagctaacatttaattgagtacacactatataccaggctctgaatcacttacggatgttatctataaaattcaaacgttccaacaaggggggtattattttcctatttttctggtgaagaaactgaggctttggagtattaggtataactttcccaagctcttacagctaataagtagtagagctggtcttcaaacccaggcgtctactccaaaggactgcgaaaggatgaagatgatggtgatcgtaacaatggtggtaacaataaaaacaatgggatgtctttttatttcagacccagactcttttcaagactacattaagtcctatttggaacaagcaagtcggatctggtcatggctccttggggcggccatggtaggggccgtcctcactgccctgctggcagggcttgtgagcttgctgtgtcgtcacaagagaaagcagcttcctgaagaaaagcagccactcctcatggagaaagaggattaccacagcttgtatcagagccatttataaaaggcttaggcaatagagtagggccaaaaagcctgacctcactctaactcaaagtaatgtccaggttcccagagaatatctgctgatatttttctgtaaagaccatttgcaaaattgtaacctaatacaaagtatagccttcttccaactcaggtagaacgcacctgtctttgtcttgctgttttcactcagcccttttaacattttcccctaagcccatatgtctaaggaaaggacgctatttggtaatgaggaactgttacttgtatgtgaattaaagtgctcttcttattttaaaaaattgaaataattttgatttttgccttctgattatttaaagatatatatatgttttattggccccttctttattttaataaaacagtgagaaatctacattaactgactcctttaggcttcagaaacacatttttattttcttcagaaaggatgatattcccccatattttacatttctgctccaaaatacattatggacttcaaatagaaaacaacctttagctctttcctgtcatagctctgacgatattttttaaggtcactgagaacaagggcccagcgtctaagtgcctgtctcaagatgtgtccattaaatattttaatgatgataactatattaacatcttttcaccttctaaaaagtatcttattagagaaagtttaaaatgcaatcaaacatttgaagtttgaacaattatctgaatattagcctttctgtagttctagtaaaataactcatttccattttccttgcctattaagatttcaaattagaatgttcagataatcctactacttaaattttggggccctattgatttccaaaaaaagtacaattgatattgcatttgtattatggctatgcatagcataaaagactaggaccagtaggaagaagttatagtgggcccattttagttcaataaggggaaacattgtttaatactccgagttacaaaatcaaaatggacacctttggacaataataagtggtaaccacaggaagtcttcacatactggattgggtggctaatttgatttggaatctatagagaaaatttaagcagtctgtctatattatatttatttaaattggctcagggttcttaccaactctccccactgtaaagcaaagctaaccatgctctattaaaagtacctattactcttccacattatttcaggggttttcaccattatttcttccagcctccaaccaaattaatttactttgtccaggtcttcccagtctcttcagtttccttatacctagttgtgcttgtctgcttaggattttcaaatagtatctcagtttgactacttttgtttccagtgtcatctttgaacaccatactttctctgtcccttggtggcatattaaaggcagacctactcaatccaggctcctagaaacctctctgggtctggcatctgagccctacatctctgggaaggtagttaagacacacaggtttttatgaggtacctttcagtcacaagattctataactactaaaaggtctgcagcatagcattctgatagtttataaatgcatttaaaaataaattggctgaaaaatttgagctcttggaaacatctttatctgtataaggctgacctaaaatcaagaccacataattttcaaatgattactttttatttcgtaccattttagatttcaaagagagacaaatatcatcctactttacacatgtcctaaccacacacatgtcctaaccacacattttggttaattttaaaatctacaataagtaaaaatttacagttatttctgaagttatcttattaatcatcagaaattcctaacggttactaaacttggtagcagagcagcagtcatcttctgactctcattagttgtcagacttaagctagcatgtctaatttctgatactgactgtaggaaaatctggcaagaagtggggagtagcacacatggacacagtggaagtctgtgggaggaaacgataaataccagggagtatatcctcaacttagtacacaaccagcaaaaaagatttcaagcagatcattaacaatggtgtctgaggattagagtcaattgtagatgggaattgaagctagttaaatgaagagcaagaaggaatgggaaaagaaatttgcacaatagtctgtagaagattctgaagaaggaataacggtgattgggggcacctttagtcacagatcacacgtgtgggcgggtctggcttacctaacaggggccaaggtgttgtggacactgcaaaacaactatgtgtgagtcacttatctaggaatgatttgaaggcaagattttagtccagggtggtatgtttaaatcattttggcaacacattttgaataaaagtccacctaagaaattgtcattgttactgagagggagccatataaagtcatttttttcctttgtcacaagcaattccctccatcactgcacctcaatctagaacatcattttgtttctctagagacttgagttgtctatttgtataaaagcagcatctatgatgaaaccatcatcactttaattccatggttttctcaatatggcatagaaattacatgactgatatttcaaactgacagttccattaaattataatcaacattatattctatggcttttttactgagacctttacaaattgcttcattttatgcttctgctctgattattttccattgctacattataagccacattctgttgaaaaaaaaaaagagaaataagcagctgctactctttctttaatctttctgtgttttgtaaaaaaaaaaaaaaaaaaaaaaaaaaaaaaaaaaaaaggatttttagtatccaacctttccaacaagtcaaatatataattctccatctgtagaaattacatttgcagttggcacaagtcatttcagccagtgtctccagcaggctaacaactggcattagtggcggatgtttttagctttttccttgtttgtgtaggctttgattttgtgggatttctttgtcatcataaaaagggcctaactggggccacctattgtgagtttgttttggaggacatgtcagtaaagcaaagttccactccccctctgattagatgccttctgaaagctgctgaaatgcaaatgtgaaaagagttttggttttctaataaactttttattgcttattttcaaaatcatttgccattttgtacaatgtaatgaaaattaaaattggctatggaaaccacttagacctcaagagctttcaaactattcagctatttaaaacaatatgggaagaatttaagtatttttttaaagaaaggcttgccaaaattctatattgttcatgtttatcttattgttttatgagttcttttcttaatagcaatgtaagaaattattcttatgacttcatgttcatcttccaatttttatgtttcataatcatgattataaggcatattcttatgatttctagtttttcaattagaaataagtaacaaagatgttacaatttagtcagtagttgtgatattcaaataactgtgctaggcactttcatgtatgttaactcatttaataatcgacatgttaccaatatgagaataagtactattcataatgtcaaaggaggaaattggttgaaatggggtaaacaccttcccaagtttacatgtctgctcagtagtttaggtaatttatcttggatttgagtttagttattcctaggtgattcttattataaatttaattgttatattttactcaattatgttgaagtgtaataaccaactccttgctactaaacagttttgatttagcttttgtcatcattttgtttaatattgtaatacatatcttggttcatataccattttatttatcttaggttattttccaggagtaggttctctgggtcaaagcacatgaatacttttcataacttttctaatggactgccacagcgctcttgaaaagggttgtgtggacttaaaaatgcaaagaaaagagtctaaaataaaggacatcgaaagaataaatgagaaaattaaaaggtaaagaacttagaagaaagaagacatgctgcagttatctttgaggggaactgaagagccttatttaagttagagccttaacttcatgtgaatttaacatggcataggctgagatattaagtgcattaaaggtatgagaaaatttttaacatatgtggcatctcaagtcagattctatgaatttcattcctggttcaatctctcactagctgcataaccttgtgtgagttatcttacctctgtgtgccccagttttatcattgttaaaatgcatgaaataatagtactttcctcagcatgtcctgaagagtaaatctgaagcctttacagtagtgcataagtattcattattatttcacaagttctcatagagtatgttaactcaacatgttacctgttttaagaaggaaagataaaaatataaccacacattttgtttttcaataataattttgccaaaccatgaatagtaatgtacctatttaataaaatgatattatgataaatttactttgaagacagagaaacatttggggactagaaatattaatcatgcaagtacatagacttctagctcataaacaaaagttggctattaaagcatctatgatgtggtactgggcttgaacctaaagcacatccttggccaactgtctctagcaggataaactcctctgagctagagagtgttggttcacttttaatcattcactcattcattcaaggaacaagtctttatagaacacctactctgtcttggcactttgctagaggtacaaatgttaataagatttagtctctattcacagtgaaatcacagtactctgagaaacaagcctatgagcacatcattgcaaaattataaataccatcataaaggaatattccatgttttatagaagtaatataattaatactgcaggggtacaatatcatcaggggagctgtagaaggtttcaaagaaaagctaataattgaatggtattcccagaagttcaccaggtagatgaggtgatcgataatctgagcaaaatgataacatgagcaaaggtaagtgccgacaagctatggctaatgggctaaatcctgcctggcagttgtttttgtaaatgaagctttattgaaacacagccaaactcattcatttacattacatatcatctattgatgttttaatgctacaatggtagagctaagtagttgcaacagcaaccatatggcccaaagcctacagtatttactatcttgcctttgattgaaaaagtctgctgacccctggcataaaccaaatcagaaaaattcagattagatgaagatagatcaatgtagataaaaaatcatgaaaaagaacttcaccttaacaattgagaaaacaatagttgattagggttttcgttattctactgttttgccagtttattttaaagatataaagtgctttggtgcagatatgtagacatagatatagtaacagacatacatacacacacagacacactctgaattatatgaataaggtatgtgggattttaaatatttttttctgccagaaaatctacaaatttcctagatttttgttttattgatcttctttttattccctactgtatcagtcaattttcacgctgctgatatagacatacctgagagttggcaacttacaaaagaaagaggtttaattggactcacagctgcacgtggctgggaaggcctcacaatcttggaggaaagcaaggagaacaaatcacatcttacatagatggtggcaggaagagagggaattcgtgcagggaaactccaccttatgaagccatcagatctcatgagacttattcactaccacgagaacaggatgggaaagacctgctcccatgattcaattacctcccactggtccctcccacaacacgtggcaattcaaggtgagatttgggtggggacacagccaaaccatatcactcactgttgccattaagtgtccttcctatggaacacccatctctttgtaagctcaggaacccaaccattctgaaattcctgagtttttgcttcactaattttcctcattcttccctgtgtcttcaacccttcccatactgtagggtccttaatgcttcagcattcagatatgcttaacttaaaaaagaaaagtcactctccattaatagcacatgagctaaaataagttatgcacaggtgagagtttctttgaccaagaaaggccaaaataaaaaaaaagctgaatttccacttagcttttgccctatttctttctatagccaaacttcttataaggctgtttatatttgtggtctttactgctatgtcttttactgactacttaacacacttcaattcgttttctgttctgcctctctatggacattttccttaccatggtcaccaaaggtgtctatactgacaaattagatgacatttttggtactcatttaacttgattctctcttctacgtaaacactctttccttatggtttctgagcagtaactcacctgtaggtgttttcttcctgtctgctttttccttcttggcatttccaaaaggttcaactcttctatctctagatgttgaaggttttttagtttgggttctctaaggcagatgtttgcatgcaggtggtttttagaaagtgtttgtaaaatttgttctcactcataagtaggagctaaataatgtgtacatatggacgcagagtttggaatgatggacaatgaggaatccacggggttgaggagtgggaggaggatggacaatggcaggtttcttggtgggtacaatgcacattgctccagtaatgaatgcactgaaggctctgacttcaccacaatgaactatgtcaatgtagcaaaaattgcacttctattccatgattataaataaataaaaattcaaataaaggaaataataaaagaagaaaaggaaaaatgcttgcagaactaatatctctaatggcgtaagagaagtacggagtgaaaggaagagaaaaagcaatgtagtagaggcttcagcccaccctatggggagctctgcagctaggagaaatatgaatatatatacaaacatataaacatacatataagcatatgtataaactttttataagaaatttgtctcacataattataggggttgactaaaccagtctgaattttgtagaacaaacaggaagggaagataagctgactgaaactagaacctcaaggacatgagctaatgcacaggtgaaagtttctttgacaaagaaaggtcaaaacccttttttaaagactttccaatggattaagctccacattgcagcttaaattatagatcccttgggttcacaattcattttagtcacccctaaactttcattgttgtttttcagcatcaatgtatcaatagcactcaaaaagagccacttcctttgaacttcccaaatccctaaattatgctttagttacaggtgcattcaattcttctataagcccattccagttaatactggtaaagtttttaacaattgcccactatgtcatgctaggagctatctgtattccaactactactagtgttggagttttcattgccaattaactggtggattatccagcagcaaaatcctatttcagagaatgcttcctaagactacttttggcaccagtagtcctcaggttccccagaagtctcaggtgatccaacagctatctgaagttgggatggtcttttagaactgccccacgtcaaagccaggagcttcagtatttgttttcccacattgtctagtcattgcatttgagctgccccaggcaagagactcaggccagagactcccttctgtgagcacacttcttgaagagggactcagctatgagcaatcagcagccaacactaacagtagctgggggaaatgaatgctttggtccttcaggaacaatctgttcagtacagcagagcatccactacatggggatgatcttattactgtcatcttgccattctacttcctgcttaagtattcttttctaaaattccagaattgttgatgactcccaagcttatatctctagtccaagcttcatcttagagcttctgattgatatatccaattgcttattttaaaatttacttaaatattttacaggaattaaaactgaacacatctaaaagtgaactcttactatcatcctaaatatcaattctcagtgaaatcatgtctcttgtagcaacatggatggaggttattattctaagtgaaataactcaggaatgaaccaaataccatatgctctcactaataaatgacagctaagccatatgctatgcaaaggcatatagagtggtgtaatggacatttgagactcagaaggtgggaggatgggaacagggtgagggataaaaaagttacctgttgggtataatgtatactgtttgggtgaggggtacacttaaaacccagacttcaccattatacaatttatccatgtaaccaaaaactacttgtacccctaaaaattattgaaaaaaattactttctcttccaaacttccacaacttaataaatggcacctgtacccaggttatttctcacacaataaacttggaagtcttctgtgatatagtttcccacacatctaatctatttgcagtagtcctatttctgcctgcaatatgcaatgactttggcatgtctctacttcattctaacatgccctcactgtcacatcacagccatctctctatttcagttctagactaagtcataatcttctgttgttgaaactactgcaatagccacttaacttaattctaactcccccacttgccttcttctaatccacagagcaattaaagtgaccatttaaaaagatgcttataacacttcagaagcttaatatttctctccagttaaattccaaatcctcaacaaaaacctcctgttttagcccctgcctgcctttccagttttatttcatgctattctgcaacttactttcagtactttggcaagtaaattcaatgaatccgtttccactagataataaatttcatgaagataaattctgcattaattttgagaaattagattcccaatgtctggtccatagtaagaataggataaatattaaatggaagaatgaaagtgaaactcatcaaaaattaaatctaagcaaatagagaaaagtaaaaacagaataaacgtattttatgcttaaaaaacaataagatctagccctcacttcagtatgtcaaggacttccaaaaagtgaagattgctgatagctctgaaagaagtccaggttgcattaaactaggtaatacttcaactaagaggaaatagagaacccaaactggtaaacatggtgacactgagaagtgggaactacttatagaaaaatcctcagtacaagttgaaggcatcttgatgtgataaatctttcagtgactctaaaagacaatgttctaagatggagatggtgaacatttccatcagagcttccatagcatgatagatcataaagaaaagttattaataataggcaatactggaataattcataaaaatagtttggttcaaaaaaattattttcagatatcaatggatgaaacatgagttgaaattagaacaccaggctaagatatgcggggctacagaagtagctagaaagaagttctggcccttaagatggtttcagcctaggaagaaatataaaaaatatttatactcccaagctataaaaatgtgatagatttggcttagggctatagaagaagagttatgaaagatgaaagattttatagacttaatacgtagggaggattttataatatgtgtcaagatctgggtattttacatatttgatctcattgcattatcactaaaattttgtgaatttattattattgtcacttgcaagataaagaaactgatatgctaagaggcttagtagcatgcccaaagtcatgctgccactatgaaattgagatccaaacctacagcttaactcaaagttcatagattttccaatatactgtgttggtagagattaccgccaggtgtgtgtgattgtttaatgtgtgtatatgtatctggtattagcatcaaggaaaaatcaaggaaataagtacatttaaactgatctttctggttattcaaatgactggtgtatcttaaatcaaggtttgaaggccaacaccaaaagtgtgttgagaattttaagtttgtgtcctttgataataatgtagcttttctagaaaagaaaccctgctctcctgcccgtcaaacaactacaggtcaccggggtgtgcaccttgtaaaacttcattaaggtacatacttacttgatgcctaaaaatattttgagtgtagacacagacattaagtaaaaaagaagaccaggagctatagatattaaaatttttattaaaaacatttacaagtacacatggaaaaaacattttttattgctagtagtctaatgttagtagtcttgaatttaatgctgctctatattagaaaatgaattaactagctggtgttaaattatctctaaaactaggatggtggccatggaaggagaaaaggacagatgtgagaaacctcaaaatgagaaaattaagaggacttagtgacataaataatagagaggaaaaatcaaaattcacattcaacttgaaactgttttttccctaagttttcctttttgtctaactagactaataactagtcttttctctaactagactattacctaatttttaagtactaaaaagtaatgcgttgatcatatacttaattaactgtttccatttagtttttctttataatattttaaggaaaactattaagattctttttatggttctaagtacccctaacaatactcaatatttcctattaggcatggcttttaggtataacaacacaatgagaattacatttaatttaccagttactgagaacttattgaaaatcagaaattttgctagaactcaggggtgaaaagatgattaagactctaaaaccatgtactactttgaagaaatgcacacttactggaggtgacaggcaagctgataaatacctatgaaattataatgaaaatgtaatcacttctgaaaaatattttaaaaacacactttcataaataagttcataatatagaaaaaataacaaactatccatagctcactacattatttcttcaggttggcccaatttctttcataattattataatagatgcctttctatcttttctatgttagacataattcaatcactattactatataattgacatatacttgtcacatacacaccggacatgagtatattatttcaattttaatgaggaggacacttgaagaacagagaacttcccaaagtcacacaactagtaaaaaggagagaccaggacttttaatcatacattcctgattttacatcctcatccttcgtgctatccatactatttccttgactttcaaattcatctttgtctaattagtaaaattatcattattaatagcatttagaatttactttgtgaccctagacaccttacagcttattgactcatgtaaccctcattctacagataaaaaaactaaagctgataatcatttttaaaacatcatccaaggtaacagagctcacattggtgcaggcaggattttaactccagcagtatgactttacattttagagattttgtctcagaagaaattgtaaccaccacattatatggtcagttctggaattcaataggtccagaaagatataaatctataaagtcaatcaaaagaaatcatcagccatcatcttgacagaaacctaaaagctcctggacaagcaattgaagcagcatcactgtgtcatgtattgaccttaaaattgctgtctcaggtaaactgtttattctgaatttaaaaaaataaacactggaagaaaaactcatcactggtagtatataaaaccatcataaagaacagctgatgaggtatattctatttttcctaggaatataacttgttgtctaggttaaggttggaattatgagattcaatgaaatgagatagattggagaatgcagggaagattactaagagaagaaagaagactttggaaaagctaattctaccaacacagatgacatctaccacaatccactttggaaaaagatgggaggagatgggttgagtagaaaaatgagcagagaaaaaagcaaggaatattagcgctttggtgatattataatgttttaactctgacctgccaatcacctctgttttgtgttagggaactgacagaggaatatacaataaacaatatgcaaaggggagagaaggttctattaacagcgatgtcagtgactaactttagtttggggttctctgctaaagctaggttggtgcacaagacttaagcaatagtctcaagtgaaactttcaatggttagaaaaaaatgactccaaatctggggcacttaccacccttagtctatcaaattgtgaaaggaaggcaaagagagaaaagaagcacaacaaagatgacagcaacctcaatgacagtctagcatatgtatggcatagaagaaatggaagagagaatgagaatatgggataaggtcctgcatccacttttctcccagggacaaaagacaatgagagatgaaggtactaagaggcacgcaaattgtgtcaggggtgcccagtatcacctaggtttactaattctctaaggatactcaagatctcagtatagttttactcacagctatgatttactacaatgaaagaatacaaagcaaaatcagcaaagggataaagtgtgtggggtgaagtccaggggaaatcaggcacaagcttccaagagtccttttcagtggagccacacaggatacacttaattcctccagcaacaagttgtgacttgcatgaagtgttgtctataaaggaagttcttttagacactcagtgcccaaggtttttattggaggttcatcacataggcatcttgcctagcacatatcacaattccagagtcccagaaaaaaagcaggtgttcagtataaaccttattgtttgcacgaaagttttgtaacattcagtcattgttatcatttagggtaatgagaattgtcctgaaatttcaagttcccaaatgccagccaagagacaagcttgcaagcacacttttctaaaaaggatatcagtctcaggcctggtgtattaactttttttctgcacacagatatatgtgtaatcctttacacacaagaatcatagctattaataaatgtgaccaataaaaatttcacaccctgtccaaattattgttctctattccctattcttgaaggcagaagaaagaaagggacgagaggaaaggccgaccaatcaaaatagaaaagcatctctgtctcctacagaaatgccgaagttggttcaaaaccagtaagtgaagaataaaaaataagatataaaaagttgcagaatcttccttcccagttaccacacctagaaaaaatagatactgtcaagcctcattatatgtagattccatatttgcaaatcacctgcttgctaaaaatttttgggacccccaaaattaatacctgctgcactttcatggttatttgcagccatgagcagagcagccaaacatttgtctctccaggctgacattcccagctgagccccaagtgtagtgaagttttgtttagtgttcctagggacgtcccattaaagtcttttttcagaataaaacaaaaagtctatcttcttgtcttgtggattatatatattagataaactttgtccagggatgagttcaatgttaattaatcaacaatatatattaaataaggtgtctttaaaaagaatcacacatatacaaggttatatattaaaaggttgacggaaatttgatcataggttcacgggagcctatctgagagtaatggtttgctattcactaattcagtctgtgtggcaaatttatagaacaaaactaccataaataatgagaattgactccacttcaaacatcacttcatacacaaagaacctctatctaccataaagtcaccgggttctgcagcacattgtgcacgttagggagctatagcaaccatgggcacagaaggggctgtgactgggcagggccagtgcctcaatgactcctctgagccctggggcagagaaaaactcagaatcaaggataataggctaattcaagcgctgaattggaaacagacaaactcagagcttggattaatccaaaaacccaaacaaataggcttttgccaattgtggcagcgaactttgggtcttaaagtctgtagctgggttattaaccaacagggaaaaacaaggttcaaggttaaagttaggttccaggaaataggtaaggaaaagagtttatattagaaaacaaaacaaaagatgtagtcatagtacaacttcaaggtatagctgtggctctcagggctctgtctgtctgttagccctaatttgaagcactcttcctgttactggtaggtaagggttaaagggaaggggtaactgccccaaaagacaaggcttaacaatgcccacatggtcataatatatattactagatattttgtttcaatctgctttggaaaacaggtataaggtaactatgccctcaatatttcccaagtgtcccattagatatttaaaataaataactaaacaaaccacttcctatgatcactgtaagagaaaaccaaggcacagaggctgctatttaaaaatcttgaaatctgagtttatttaccagtcaaaacctccattaaagtcttttatcaaaataaaacacaaatttaatttcagaaatcaccttgtcaaaatgcatgtgcatttggaatctgtcataattagcagttactctaagtgtattttttcacacaatatttgggtctatatctgaaatgcaaagccaattctggcatgtatgcttacatttcccagttgattacacatttatcagcaagctgcaaacttggcctctgcaacacaagccacttgtaaagatttctcagagattttcttgcctaatagaaagtctgatgagaaacttttactgtcacatattttcatatttttcagccctagcaaacacattcctgacacgtgaatcaatacaaataagggaagacatttcagagaaactgttagtcttcagaattgagatttgcatcaatgcctctctgatttgtgcatccttcaaatattttttccccaattatcttttgtgttactctctcgctggctgctgctgatgagtaattttacaacactggtgctattaaagcatgcactcatgaccccattgtgacacaaagcaaatagtgcacatagcgaatgcaagcacataactgctaatcttgccttttaaatgcatttgaacttgacctattgaaataaccattacagaatgtatgacagcttggcaaaatagaaggggcaagacaccatctcaggaaagcagactctttgaaaataaatcacgaaagactgcaatgtggtaggaattgattgagaaaaatgcagtaccacagtgaagtaacctgcttaaaccctacaaaacaagtcactacttctaaaagctctgtaagttagagctcagtggcatctgatttaatccataaatgactctaaaagaaaacaatggctaataatttaatgtaaagagcatatatttaaaaacatcaataatataatgtcttgtattctgaagcaaatatattttcttttttcttttcttctttctttttttttttttttttcccagatggagtttcagtcttgtcgcccaggccagagtgcaatggcacaatctcagctcactgcaacctccacctgcctggttcaagtgattctcctgtctcagcctcccgagtagctaggattacaagtgtgaaccaccatgcccggctaattttgtacttttagtagagatggggtttcaccatgttagccaggctggtcttgaatgcctgacttcaggtgatccacccacttcggcctcccaaagtgctgagattacaggtgtgagccaccatgcccaaccagcaaatatatgttcatgctgctgatgcaggaaagcatttcaacttggtatagcctaggcatatcttaggacctttaaaggtgcccacagtcatatatactgaagcatttttactcatcctatccactataaaattatcaatcctactgagagtcaaagtcaacatagaaacacaagctataatgattctcagagagcatttttagaaaaaagactgatatgcattttactgacaggaaaagtagttttcagatggtatcagaacactggtctctaggacagggcttatggcaaatggctcatatcccaccttggtaaatgttaggcacacttgacagtaactctactattattctttattttatgtcatttgaagattccaaaaaagggagattatgatgtgctggataaaataaacaaaaatctgtaagcaggagtttttacatgtgtgtaaatatgtactgtatactcaatgtttaggtaagattgactcctcaatggtcaaacataaaagctcaacatttaaacttcataatgaacatactatgttttattaattttctgtgcaaatatatatatttttaatattttaaaattatataaatatttaatgttcctatcttactgggcacaattatgagatttaaaaataataagaaaaaacaaaccaaaaataaaaccaaaatcccaaaccccgcatgttaaatttaaatatcagaatcctatcattcccaattacatatcctgctgtaaggaaaattacagaagcattgagtggcttggaaattagaacactttcgaagtgtttcaaaggagtagttcttaaatactacttttttattatcttcacatgtaagactgatccttctttaggatgaaaacaacactatgctcttctcaaaatcctagagaaaattcttgattattattgccaaaagtgcataattcccaatgaaaagagattttaagtatgtttgaacaaattttatttgtttcaattgtaagcactgtgtcatgttctaaagcaataaaggttttcctacatactatgactttatacatgctatgactttatagcaataaaattatatataaatatatgcatattttcgattatttacgaatattgaatttcatttagtgctttctcttcagcactgtataatgccacactttcatttaactagataacaaggatcaaatgccaaacctggattgctgagcatctcacacttggatgggaggactacactttctctaactgcaaacccgaaattgttgaatgctatgaaagctggagggtgttactaagcattattctagaatttcattttcactcgagtttttttttataatccaccataaaaatacacacatgcacacacacattatttaaatataaaaatatacaagataacatgagatttgatgaaaacccataatgtaaaatatctccagtaagagtaaacagctatacatttactttattcccatctaaaaaaaaaaaaagcagataaaacgtcttgcattttttgtaaatggaaggatttctagtgataagacataggtcttgaatttaattcagtagaacctctcataaacacctaaattttcctccattaaatcttaaataagtgggataacttatgctaccctctgcaattcctaacttaattttcataagtcaatacaattatctctagccatattgggcccgaccaaaactagctaagaggaattcagaaagcatatactagatttaacaaaagactttctttgtggggagcagaacaaagacagacagtggtgctggtttgctgtgtgtgtttctctactcgcccagaaaataaaattaaataatcaatctttcaggcacaatggactgcaactcataaaagcctgagttttactttcttacaacagtgtttgatttttactctgtcatcaaaagtctactaagggagatttgcctaggaaatctctctcttcaccacacttctcctccctcttccacatttttgccacactacaaccctggtagatattattcccatttttatgtgagtggtctaatatatttcagggatgaaggctccaaattttctgatttctctctcagaagcctatttactccataaccattgaatgtggctgaatagaatggtaacactggcactctctcagggtagaacagcatgtcatccaattgtatgcttaatttttaaagtgatttctacttttcccacctctaatttaatttttttattatttatttatttatttatttttgagaccgagtcttgctcctgtcccccaggctggagtgcaatggccaagcttggctcaccgcaacctccgcttcccaggttcaagtgattctcttgcctcagcctcccgagtagctgggattacgggtgcctgcccccatgccaagctaatttttgtatttttggtagagatggggtttcaccatgttggccaggctgatctcgaactcctgacctcagatgatctgcccgcctcagcctcccaaagtgctgggattacaggcgtgagccacagtgcccggccttaaaacaaattttaatgaaaagagaaaaaaaaaagataatcttctgctaacgccttttggtaagcagataattgtcatatttaaataaaggtgtaattgcacctggtgggcacccagttctgccattaaaaatgccacactgactgaagagattgtattttcctaaacctgttagtccctgggaacctaaagaataaactgtgcagcacatccaatcacagagtgtagggtatgtcccaggtcatgttctaacatacatgcggtaaggtattttacattcctttgaggttcagctgcagatagaaacctagaaaatttaacagctttgtctttagccaatgtgttggctgcagtaaatttttaagcaagtaagcaaagctcccatcttatgcactgtggatatttctcaccactaaaatgaattacatagtcatactaaattgatactaggttcaagcgaatatgctgttataagtaaatatatatacttttatgttacaacagagacaatgtgtgtatctcaatgtctacaattgttaagaaggttttcattccctgggtgaaaggataacggttgtgaaatatgaccttgcaatgacagaattttaatgcattgtgtatgtgactaaagcaatgcatggcatcctggccttctttattgctatgtatattagagtattttgcagtgctggctctcatctaagtgtcggggtcttctctaggtcaaatagcagctcgtcaatgctttatttcttaaagaacctagatgtaattttaatctaagataaagtttcttgctaaaattctaatgtcagtgaaaatgtgaaaagttccttaaaatctagccaaacatcacattctttcacattcttccaaaccagagaaatagccagtttactatgtatttaagcatcttttgagttataaaaggaaaaacattattatgtcctgatgtgttaaatgattttgctttccctgacaatttttattcctcctatgagacatttcttgcccttcctagttccaaaatgtgaattttaacactttgcatcaggttgttggtctccgttctaaagcaacattaaactttctgctaatttttataaaagatccacatggcctttttttctcttatcttataataaacccctctttcctaagtattagatgttttctgctttttctctttagaaaacttagtttagctagtctttgcaattctgtcctttgagaataaagaatataatagtatagaatagaataaagagtcttacagaatagaacaataaagttagcgcaatagagaggatatttagaagagaaataacagtgagttctcattgtcctgaggtggctgaagtaaatgccaatctcagtacatttgatttcatttatttcctgtctcactagtttacaaaatgctgactcttttctcctgggcaaaaagtgagttatggtcatgtgagtagtgaacaatagtcatttgttttgacaccagtttttcctgggtggttagaaagctggtgaagttatgattttcatctatcaacttgaatttaaaattatattattagcattttctagaaactacactattacagatttctccaatgcaaaactctggagaacacagtccctttaccacaattatcatacttaaaaacaggtatatgaaaatggtttttaataggcaaaacatactagactaacaaatttagaataagaagatagattcgtaagaagagtatagttttctgaatcagaatctggaattaacactcagtatcatattttccacatggcactaaacagggtttaacagggagattcaaactcacagcgcaagatatttttattagatgaagatttcatggggaggtgaagagcctttcaatagaagagattaaaaaaattgaactccaggacgggcacagtggctgacgccagtaatcccagaactttaggaggccgagacgggcggatcacaaggtcgggagatggagaccatcctggctaacacggtgaaaccccatctctactaaaaaaaagtacaaaaaattagccgggcgtgctggtgggagcctgtagtcccagctactcgggaggctgaggcaggagaatggcgtggacctgggaggcggagcttacagtgagccgagatcatcgcgccactgcactccagcctgggcgacactgcgagactctgtctcaaaatacataaataaataaataaataaataaataaataaataaataaataaataaaaataactgaattccagtctcaggtctgctacaaactcaatagatgacttgtagcaattttaggccttagttttcccaatcgtaaaataagactactcctaccttcagtattttatattcaacaatataactgtatatggaaaaagtcatagctagcacaagaaaaggaaacttcttaaagtgaacagcaacttaaaaatgttccccttggtttgtttagaaaactcactttttgtctagtataaccatccttaagaaacaaacctttttttcttaaaatgtcttctcttttttataatgaatattcttcatcactagcattatctgttaatgacaacagtccaattgcctccagtgaatctctttaacaacggctcataatttaaatccatcacccgctgtgaatgctccaagtaaacactgatttgtgggtttataaatcacatggctgtgtagattaaattgattcagcctgttccttgtctacattgcttttatgctgttgttttaaatgcctatactaccacagtcacccaactggcattttaacgtcactgaatgaagaactatcaagcatttctcttttaacttgaaatttttaaaaaagcaaatgaagtcccaattgtatctatctatatgtatggatttatgtagtatatatgtacaagtgtgtgtgtatgaatcatagttttttagaattatttatatttaaaaattatagccttcccttgcataaatcagggtgatacagcaagattaaaaaccaatggaaagtcctattgaattctctgtttggaaacatataaagagaatgctcttgtccacaaaataaatgtcttggtataatcctatagaaattggtagtttgggccaggcgtggtggctcacacctgtaatcccagcactttgagaggccaaggtgggagaatcacttaagcccgggagtttgagaccagcctggtcaacattgtgaaacccctgtctctactaaaaatacaaaaattggtggcgtgtgcctgtagtcccagttacttggtaggctgagatgggaggatcacctcagttcaggaggtggaggttgcagtgaactgagatcacatcactgcatgccagtgtggctggaagaccctgtctcaggaaaaaaaaaaaaaaagacagaaaaagaaaagaggtgtatgagtagaaagacctatagcaatagccattttgtttagaggttcttaaacaggtgtgcttctttctggagtgtgtttgtaggttccccaaaattgtagggatgtgctgtatgtcatactaaacattttaatcagattctcaaaaggatacactatccaaaaattaataaaatgacacattttagtctatgtatgagaagtaatttgacttagtcacaccattagcctgcaacaacattgatagttccagaactcagattcctaaggcttctcatgctagtgtgcactcaaatgctaattcctttttttttttttttttttttttttttgagacagagtctcactctgttgccagggcagggttggagtgcagtggcacaatctcagctcactgcaacctcggccttgcctccccagttcaagtgattctcgtgcctcagcctcccgagtagctgggactataggcacccaccaccatgtctggctaatttttgtatttttagtagagatggggtttcaccatgttggccaggttggtcttcaactcctgacctcaagcgatctgcctgcctcggcctcccaaagtgctgggattacaggtgtgagccaccacggccggtgcaaatgctaattcctgacaagcagagtgtgtttcctaaacttgcatcatcttgtgaacaaatgttgctgctttattagttccaaagttatagtgagcttatagaaatttcaaggacaccatttcaattttaacatttattgctactaaaattagtgatgtaaggcttgtaatataagaatgatccccagagaaataatccctcaaaaataaaacaaagttctcttaaacatgcaagatgaagccctgcagaagcaaagatgacctatgtttgtcatttaacatttgaacacctactggaacttaaataagcaaggaggctcatctagaatggcagacaagctttgaaacatcatctttcttttgaaaaatcttctacctgttttaatgaaattaggtctgttaatataatcacataaacatatgagcagtatagagtcagtattgcacattaagcctggactaactcgaagtttcttttcactagttctttctgttaaatgttttcatgaaaattctttttaatctaaagactgttgtcaagacatactagttattaaatatgccttcagagctaaatctgcatgagcattccacatttcctgtcactttttggggttcatcttctttccacagaaaggagaatttcaaggaaaggaagaaatatctacaagtaaatatcattcagtatgggttagcatgcttgattgctattggtgaattatagcaaaaaaaggccttagcatctataatgttatgtttcatgtaacattttaacaatggcaaggtaagtcacactgctgatttcagcaatgtgttatatttgatagcaattgatagctgactactaaacaaaatcacttaactgtatgaatgttttaattctttttttttttttttttttttttttgagatggaatcttgctctgtcacccaggctggagcgcagtggtgcaatcttggctcactgcaacctctgcccaccgggttcaagcgattctctgcctcagtctcccgagtagctgggattataggcgcccacgaccacacccgcctaatttttgtatttttagtagtgatggggtttcaccaacttggtcaggctggtcttgaacactgacctcgtgatccacccaccttggcctcctaaagtgccgggattacaggtgtgagccatgaatgccttaattcttaagatagtaatggggaatattgttctgagccaagaatatgatagccagggaacataagtttataagatcacacagtgtagttccaacagtaactttaaacccaatagttccctatggaaactcaggataccaaaaagtgcaactgtaatattctggattctaaacttaagtttgaataagaatatcatatttcctcttagttaaaaggtaaaatacaggttttactgttcatgaatgtgactagactttcaatatctccatcataaaccaatgtgtgacaaaggagataaatcttatattcagtccctactgacacacatgatgtcctttgttctcaaagtgcaaattaactaactatccttagaggctacagcctaagacaaaccctacctgggaaaaaaacaataataataacagagacaaaaatgctgaaaaaaggaaaaagttatcagtatatgtgtatatatataatatatccctttataatttatagtaggaatattttcattaccatgcaattgtgatagatttaaataaagatgaaaggaacctattaaatcattatgtctaatgcatgctaagggaaggcatatttccctagagagaggaataaaaagaaaaaatatataaaaatagatactataacaacgtttgaggaaggttcagttagcatatagtcttcagatatcaaatagaggtattagcataagtagtggagacgattagatattgacacaaagtacccgtataaatacagagtcttgtgctgtgttttcaaacatctaatatatttgcctggagtgcttgcaaattaaagctactctatttatacacaacatagaaaatggaattagagcttcaatgaatttttaattttgttcaatcttgcatttgttcaaccaaaaacaatttaaagaggaacacgacaatcagccttagactgagcaagttcagctcctcactagggggttcttgaatccaccataaaaatcaacagtgtgcatctaatagttttcttttaatttgagaactgaaaagtgaatcatcacatcaaatattcttcagggtctctttggtttccagattaaacatgtaatgtgaccggtcatcttgccagattctcacatttccattttaaataatcataaattagaaaaccttactattctttggcataacacagctgtctgattccgctgagttccaaagtcttagaaattgcactcattccttctttagagtcctgcttcatggcaaaagttttcagctgaaagactctttattgtattcaaatctcgtcccatatgagttgttctggtttctcagtttatgaagagtcttagatagtgaattgggtccacaacagaaaacaccaactgttttcctagaacaagagcggagaaaatggaaaatcaggtgcaaaattaggcagaacatgacaagaagtatgctttatgagcatggtttaaagtattaacaaagttgatttcttgctattttacatattgaaaacaattttctaattatttccaaatataaatgtcaaccaggaaaatattttatttacctcatacttttcattctagaatttaggataattcaaagaatgtacctatgagcacaaatatgcttattatcaggcagagatttatcagtttgccttagtcttttcatgacttgtcatcggtgaaaccagcaacctcattaagagcagtaattgatagatgtcaattgctaaacaggtgacctctgaatagatgttcagtccacactggacaatgtacattcttcttttattagacactttacacatagttatctaaaattcctacatggatttgcaaaagcagtgatgaataaggaaggaaagaaaaaagatattaccaatttgaaataataattttaagtggctaatttatattcacagtaaaacgaaaaacatattcatctagttcttttttatttatgcactgcaataatggtaacaaattccaagcagtttttattattctctaatataaaattttagtagttaaataatacgtatctctaacaaatagactaaataaatcccaggaaataaataatatttcaaattgaccttcttcccaagtttgatttgcatttgattcttcctaggatgtcaaaatgattaatatttcatctcatatcttgggaaaatccagtatgacttaattatctcagaataactcatgctgaacaaaagacattgaatccattaaaactggtaccaaaaattaatagtaaatactgaaaaaaaaagttattaaaactttttaccttgaaaaatgaaactaaaagctgtgaaaatataattttacttgcagccatgatggggtaatagggagtagatctaccctcttacattaaaaatctagaaaaaagcaaacaaaatagatgaagtaagtattttcggacactgaataataggtagcatggaactatgatccctgagaaaagggaagaaaacaagctaagcacagtcaccctctttgcttattgcctggaggcaatctactggctgcagcagacaggggaaactccagcaaagattggtgattacactgaggagacaaagaacggagttcattaaggaccaaacagctggaacttgtggagcagaatatggaagggaagggagatccacagaaagacgcctcggagattcgtagcggagaatcctcaagtctttgattaataatcagttcatatacgataagaaacttcatgaatgtgagtaaagagctatcagagatcaataggacaaataattgccagagtttacacaggactgcaaataatttgtattcacacacaccagaatagaaagtcctataaatacagggcaatgggttgtattctcagaaatgtaccaccttatttgcaaggagtagaggggatattggtaaaattagccttggactgaaggctgctctgaacttccactaacaaatcttaaaagtgagccttgtaaggatcaaactgaacccgagtaacttaactgcatgtcagaacaagtccaacactattaaataaatcaaaatttggcacctaatatttaaactttaaaatgtacagaaatcaacaaaaaagtaccaggaattcaaaaagcaagaaagtatgaactataactaagagtgttatgggctgaagtgtgcccctccaaaacccatatgttgaagtcctaaccctcagtgattcaggatgtgactgcatctggagataaggcttttaaggaggcaatttaagttaaaatgaaggtactagggtaggccctaatccagtctgaatggtgtacttacaagaagtaatttgaacacaaaaagagacaccagggaagtgcatgcacagagaaaaagccacctgaagaggcatcaagaacatagccatctgcaagtcaaggagagagatctcaggaaaccagtcctgcctgcattttgatcttaaacttccagcccccagaactatgaaaaaataaattgctgttgtttaatccaccagtctgtggtatattgctatggtagccctagcaaactaatacaagaagaaagagcattcaacagaaacaggctcagaatgatagagacgacagacgtggtcattgaaacagtgatgatacacaggcttcatatattcaaagaaaagcataatcatgatgagatgataaatggaatatttttaaggcccaaacataaattctagagatggaatgcaatatttgaaatgataaatatactagatgaggtaataaaagaataggcattgctgaagaaaaagtaaacttgaagaaaaagcattagaatctatccaaattgaagcccacagagaacaaaaactgaaaaaaaaaaaaaaaaagaagaagaacagagcataagtggcctgtgggacaataccaactagtcaaaaatacatgtaaccgcagtccaacatgagagaagaccaagggagaagaaaaaaaaaaaataaaagatctcattaaatctcaaggagaataaacacaaaggaaactatacctaggcaattgataataaaatactaaaaacgagtgacaaaaagaaaaacaaaaaaccaaacagactaggggaaaagacacattacaaatcatcaacagaaaatataagaatgaaatataagaatgaaagtgaactttttgtcataaactgtgtaagtcagaaggcaatgaagtgatatcttcaaagtactaaaatataaatcaagacatcaactattatatatcaagcaaattttatgccaaacaaaaatgatttttcagaaatgaagatggaataaaaactgtatacaaacaaaagctgaaagaattgtcagcaaaccagcactataaaggacactaaagaaaactactcaagaagtaggaatataaaattagatagaaatttgaatcaaccaaaggaaagaaggacaccaaaatagtaaaatctgtcagtaaatataaaatatttattttgtctaatttctaatatttttaatatatgttagatgtttaaaacaaaaaatactaataatgagaattataacatatgtatatgtaagatgaatgcaaaaatagcaaaagggatggaagaaatggaagtacatgaagtgttacaatattattcaaagtaccagcctggccaacagagtgagatcccattcctacaaaaaattttaaaagttagctaagcatggtggtatgcaactgtagttccagctactcaggagactgaggtgggaagagctcttgagcccaggaattcaaggttgcagtgagtctagatcatgtcactgcactctggcctgggcaacagagcaatactctgtctctaaaaaataaacataaacataaacataaaaaataaaataggctgtgataagctaatgatgtatactgtaaacttagaacaatgtttctttaattttggcttcatcagaatcattttagagacttcatagaacacaaatagttaggtctccccatccctagtttctgatttggcagatcttggatagggctcaagaatttgcttttctaacaagattccaattgatgctggtctaaggaatccagttcaggaaccaacaacctaaagcaattactaaaaagaaaaaaaaaatacagaggcatgtctaactttagagaaaaaagtggaattataaaaaatactcaacccaaatcaaggtaaaaaaagaaaataaaacaaagaaagaacaaatagataagtacaaagcaatggtgaactgctagatttaaagccaactgtattttcattaaattaaatgtaaatgatttaaacaccgaaactaaaaagcttcaacataaagcaaacactgatggaactgtaaagacagataaattcataattatagttaattatttcaatactcttctctcagtaattaatacaagcagccagaaattcagtaagcctattgaaaacttgaacatcactatcaacctattggaactaattggcatttgtagaatgttctatctaacaataatggaatacaaattctttttaagtgcatatggaacattcaccaagattgaacatattctgggcaataaaacaggtgtcaatacattttaagggattagaatcacaaggagttcatttttagatcaaatcccaattgaactagaaattaagaacaaaaagatatctggaaaatttctgcatttttggaaattaaacaacatttttaaataacccatgggtcaaagaaaaaacataaaaaataaaacatatttgaacgagatgaaaatgaaaacaaatcaaaatgtataagatttagcaaaagtggtgtttagaggaaaatgtatagcattaaacacttttattaagaaaaacagtctgaaatcaatgacctatgtttccattttaagaaactagtaaaaattaagaaaagctaattaaacccaaaatgagcaaaagaaataaaaatatatgaaaataaatgatgctatacttaataaaatttaaattactactgaaacataatgtagcttccattaaaatgaaaagagaattgagtcattttgtttctttgtataaactttctgtcaacaccatatgatggcaataagataccattattttcttgcttggctttgacagggcaattgtagagttagtttggcaagtttttcagatttcctaaaggcacttcttaaatacttgataataaaatcaagtattaattataaaataaataataataaaatcattatttttaaatcacacaggatattatgatttttgtgtttctttaacattttcttttgcaattattaactagcttaactctctgatatcctttttgtgtgtgtgcgatttgaggattccctaatgtcactctcactaacttaatgaaatcttacttttttttttctttttcgaattctacaaggaatctttgcaattcatttgtactaaatttgcattagaatgctgcaatccaacaattatctggagacctgtctacacgacctttgatggaatgagtggaggtacattcgggtactaagtagaaaatgtggtttggggtagacattagaaactagttctataaatgttcatacttgctttttcatgtagacttgtaaacgcagaatcttacataatgagaacttaatcactccggagagcttattcactcgttgtattacagatccaggagaactgagtcacttgactcagggtcacaggagtaaatgtgagagactaaacttagttattcttaatttgtattgtttgaaaacactacaaggcagtaaaataaagatataatctcaaagatttcacccaatcccagagtagtaattctctactcaaaaagccaaataaagttcaacttttctttctctctttgcatcatgcataaacttcacagctcaaaacaggatatacattttaattacaaacaataggaaaccaagttggggttagatataataaataattttctaatagtttattaaatactaaatggtttacaatgtaatatttagaatatctgtatttcaacaaaattagttattaattcttttagtgttacagttaacattctgctacagcattcttagtaaacatgggagtttcctggagcacctccctacctcccatctaaggggaacatgctaaaataagattgccactctttatctgtgacaagctgattatgacctgctgtaaagcacaatgaacttgcagtcaggacatttgtgttcatatctgcattctggctcattaaccatggcttttgataaatcattatattttgaggtcctagcttcttcatttgtaaaataaaaatgaaggcaggttgactcctaaagctccttcactttccatgatcatgtaataccatcatataattcagtttctgaatttaaaaaaagcaacaaagaaatgaatgactgtcacacacatgtggaaagtaaattaattctgacttttagtttttgtagagcagtacctaaatgtgcatacctgttgagccagcaattccaactcaaagatcttaatctactgcaatactctcacatgagaaagtatgtacaaagataattaccacagcactatttttaactataaagaaatataagtaatctaaatataaagaattagggtagtagcagtcatgttattcatactctagaatactttgaggtacaattacacagaaattgtccacgatcgaaagaagcacatcattaaaaagttagttggttcttcctagcaaagccaagaaaaaaataaaacaacaagaacaacaaagtaagctgaagaattacttggcatagattcaatttttgttaaaaaactaaggttttgattttaaatatatatcacacacacacatacaaacatatgtttacatatactttcataagtacacacacacacactctcacacaaacttacaaaagcttctgtaagaatacataacgaagagttaccaatcattacctctgggccaggagtgtttaatgcaatttaaatttgtattctacatagtatactaacctaatgcctactggtaatcattttctgaatgcctactggtaaaaatatgtaatcattttctgaaagttaaaaaatgttgcccaacacatgatattttaaaatcttaacttatatgcctgtcttccctactgttatctccatatgttttcagcaatttgtgtgcatgaggttaatcaaaatgctacattgtaaatgaaaccatccatttacacagtgcctttgtccagttaataagacctgaagaatgttgattcattcttttcctaagtatgctacataaaaatccttcagaaaatgtaaacacatttaaggcacctgcctgagaacaaatacacaaagtcaaagtgttgtacaaaatgtcaacagcagatggtgcacatttgctcttcttaaacaagttttccattttttccagaaaaagaacaaactactaaatatatacacacacacaaatggctctaaaacacaaacagcctaacaaatgagacttcttgagaactaacagtaggaaccaacagcctcaatctatttccctgtaaataatctgctctttagggatttggtttctgaattcagccaaagaacctatcagttttcagcaatatacaatgaaaatcaacaaaaaaattcttgtcagaagcagtaaatggcactaaagaggaacatgtctgcaatgcatagcaagagacagatgagtatgacaagattatcacatctaagatgggtgatactggagaaagatgggaaaggaagatagccaaaagtgggttgaaatcatttttttctaaatttcaactctgaatattacaaaaaagttctgctttgtaaatcatgcttacatcttcatccctaatactacaaaagtgttttaaacatgactgtaatctgaatcacatgggtaacattattccttcataaattttgcttcccaggctccattctgtaatttctaaaacaaaatctttgaaggtagagatagggatcatcttgaatcagtgatttcttcaataaattatattcatccatgatttcctaaattgcatttttaaaaaaaaatccatttaataagctggcctgtgcatttataatcaaatatccttttgatgtttataaaaatatatttttaaaattatgaagtgttcaactatataaagtaattgaaatgataactcaagccagaagtaaaaattaatactagagccttataattacagaaaattttaaaatgaaatatttaatttatgttcattctttttgctgaagtatgattaggattaggttagcaataaaaatatgattagttcaaatgtaaaaaattaattgaattttgataaaattatatgggttaatgggacagaaatacaacttaaatgaaagaaaaagaatgatgtaaaacatccaactgctaaaagaaaagtttatgtatttttgtaataaatgataatatcatctagctatatttatattccagtggatatgtttaaagaaattatgttaattacaaaatgtcaatatctgcgatatgttagaaatcacatcttttacaactatgtaaacttatgatgaaactatttagatgtaaacctaaaaatatgtgagtggttatatagttttcaaaatcttcttagaattcttatagatcagtgctctgcactatgataaatttacaaaagacaaatgggctggctggtctgtgccctaaaatgaaagctttccttctcagtaatttcttcagatcatagacacatagtccataagaacaagattctttataaaattatagtttctaaataatatttttggaaatattctaggtttaaagacggcatattacaatgcagagggtttttttaaaaaacaaataaacaaacaaaaaacatattcattatggtaaaaaaaggtacaaaaaatgtgatttttaaatgaattcattgttagaactaattgtaaagttctttgtttggaaacatgattttgaaaacttttcctaggatcacctgatatatgctgtgggagcgaatacccatttttaatataggcctatacaaatttataatcagataggagagtttagttcataaatacattatagactatttctaagccaaactttaattatttggaattacagaaatgtaggacgatacttgccttacttcttcctttgatagtgaaagagtgtttcagtgaatttgtcatttgtaaactcattgccaattcattttcaaacttcatgtaattatttgaaaatattttaattaatttattagccacatatcaaatttttgaggtatagtacttaccctctgttatattttgctatttcatcaaacaaaagtttccaccgaggacgtccaagaaacagtcttgaattcagtgcatgatatttttctccaattatcttctgccaaaaagaaagcactatattattcgagatttagttaagtaacctagttctctaacatcgtttctactggtgctgcggcttcccaccaaattgctgtgatataaagaatgtaagtatcaaatggcaacctattacgtagaattatttcaaaatatcgtttcctttctcctttcttttaaaatccattatctccttgaattccatgtgtttgtttttaaacaaacaaacaaaatctattctggtaaaaaggtacaaaaatttgatttttaaatgaattaattgttagaactaattgttagaactaatctccttgaatgccattctgacaaatggctaattttcttagatttcagttagtcgtttcatctttaaagaactgcaatgtaagacaaagaatgaattctaattggtcaatctcaaaaaggctcagcacatggatttcaattgaagtattttggcaccacagatacagttgtcatatttggctcattatgtaagtaaaatactacaaattgtcatcgtaaatttggggaaatgatcctagacaagacagctcacaacagcagaactccaaaattgggtctatcaacaaatggctgtgaacgggcttctgtttgcaattaagagagcattagatctaaatcaatgtgaagagtcagagtgaactgcggagaaaggaggaagtatctgagtcccaggcaggcaaactgagaaccagatacaaattatgcttcataccttaattatcgcaataccaggaggaaaagtgatattgacttacttcatgagactggtaaaatgaaatactttttacataccaagtagggtagaaatatgactgggaaaattagagttagattagttttgaggtaactgaaaacattcaaattttatattcaaagtattgtgaaaatgtatgacaaaaagtactaaaataaaatttgtgaatgcattcatgcctagatttatacaccagtccagctcttcaatgttgtcttcaaatattagtttcatcacttgcaaaatgggaataacattaactgcttaactctgttttaattacataaactaatatatgtgaaattattagcacagttcctaaaacagtaaataaataatgtatgatggctatcattattttttagttttctttgtctagaaataagcttaattgtatatgaactcatcttctcactccacataaaacgtgccctcaataaaaagaaatcacaaggctgttcatgtgtagtctgaatttcagaagaacttgaggcgatagtgaagaggggaggggcagaccttatgagtctgccccagctccctgtgaggacaaatggaaggcataatatggttgacttcaaggacaagctatgacttttctggacatattccaaaggaggctttcctctaggaaacttctgttcgaaccacctgaaggaattttcttccaccacagctcctacagtaaatctattatcaacaggcttgtttaatttacgataacatcaaccacatacctgtatcccatctgtttgactgaggtacagctggatgttgacatagtcaggtctgttctcttgccaaaactgagaggacagaaaaaggaatagacttattacaattctgtgggtatactcagattttctcctattctaacatgtgattctagaatttaacacaacctagcttatcatagtcaatatctataagaaaatgaatacacacacacacatacacacaaatatatataacagattctaatgttaataatctggcctcttggtatgaattaggtctgatgatggtagtggtagggaataattttctgttatctttatagatagaaaatttagcatgctaaatgctatacaaatattagtctttctgaaatactccttattttattccttaagagtctcaaaattgtaccagtttactcatcaagaacatgaatttcttgagaaaaaaagacaatagtgatttaatttatgcatgctagcaaatataaaacaacgcaaatagatactttttcctgttcctgccttccgcttattcagcaatgggctctggtttctcttgcacaaaaatgcacgaggcaaaaatatacctgcaaaaataaatagtctagaaaaaaatatggaacaacaaccccctcatttcccgctccccgaaggctttggcaacctgagaggattttactgtatctgaattgtttgaaatatttttagcaaggatgcatatgtagagactattctacttcctgcctctgcaaattaaactactctagggacctcctataagtgacagcataatatatttgtgctttcgtgtctggcatatttcatttagcattatgtcttcaaagttcatccatgtactatgtgtcataatttccttcctttttaaggctgaatagttttgcattgtacgtatatatcataatttgtttatccattcaactattgatgaatatttgggttgtttccatcctttggctattgtgaataatgcttctattggcattggcatacaaatatctgtccaattgcctgcttttaattcttctaggtacatatccagaacgaatgttttcatttatttttatttatttattttgcataaagtctggaggacttacataatccacctcttcccagaaaagcacagataccacctctctaattgcctgtcctactattctttctcttgcttactctgcttcatccacacagatctcctttctcttctttcaggacaccaagcataccgctgcctcagagcccttgcctatgaagttaggtttctctatcttgattttttttctccaaaatatgtgtctagtctgctcattcacttcagtcaagtctgctcaaatggcattatagcattttgtttgatggttgttcctgaacgtgcaatataaagtaacacactctctactgtttatgctgctttactcctactttcccttccttctttgtcctaacccgaatctcagaacctgatgctcaatgtatttattggttgttgtctatcttgcccccttagaatgtaaaccacatgagatcagaaacttggttttattttgccacctgatgaggtttcagatcctagaatagtttcagattgatagttagcagttaataaatatacactgaatgatagaatgactgactgaatgagtgaatgcatgcacaaagaggtatatataatgatatccatttcagcattctttgtaataaaaaagtatctaacattagagaattgttcagtaagctagatatatctatacaatgaaatactctaaaagaatcaggtgggtctatcatctctaattgttggcaccgggaaaaacaatgaggcagttctatatgcactaataccaaaaaatagtcaagacatagtaatcaattaataaaggaatttgcataaacaatatagatagtatgatataatttatagaacacttaagagttacctctgtttacatagattaggtagggaaggtagtaagagaggattttactttatcagaattgtttgaaatatttgtagcaaggatgcatatgtgtatcacttgtataatgtgaataaagataaataggtcaaatgttacaggtaggataggaaaagattcctgctttatctctgcaaaaaataaaacacagaatttgggattgttgagatttgtatcgtataccaaaaagtctggtgatttgcagtattaaagatggcaatcaagggtaagtgctaacagaacaaaggatggaaggtgttacagcaggagccttctggtaattccctccattgtcttccctcatcacctttagccatatgcatacatttcaatgtgaaacaccctatgttaaaacatagaaatgaatgtttctatgttaaaatatatactcacaaatatccatatctgaaaagatgtgtgcctaattgctaacagatattatctctgattttttatgtttaagagacttatttctttccttgctacttatctgcataatttctatggtttattctatggcgagcatttattgctcttgtaatataaaagctataacatttttaatttgaaaaattgcaaaactagaaccaaccctaatgttaccttgttatgcaacatacagagtaagtctgcaaaccaatggaaggactggatatctctgcatgcccaaataaagtatagtcttctaagcttgtatggtttccagtcatccctttaaaattaaaataacatgatagtgattaggatggcaaacacaaatattaaagaattcatatatctttgaaagtttccttttcattagtaagcaaccaatagaaatatccaatagaaaccaatagaaaaatcagtcatttacattctagcatctgatagcacaagacctaaatgaatttaatatgcaatatactgactcaaggatatgacatacttcatgaatttaggtgtttaagtgttaaatgaatttaagtgtgaataatattgacaagtatgaatatcatccatttccagttgaaggccataactgaactggaccagaataatattgggctctgcatcacagaaaaaaacaagttttcaactttcagtgaattctatcacagactcagtagggctccaaaggtcattcagtcttgccctggatttttggcaaaatgagccaaaaccattccagaaacttggttgtttatcccctcttaaaaatcattaaagaaagagatttcacaatcatgtatgatgtaatgcattccagcaactcataattccaagtttggatccctatttataaagtaggtttgaggttaagaaaatgttcttcctttttcataacattaggtatccaaataacttgtaatgtgttgtcagaaacaaactatttctggcttggagcatgatcatttttgtaagaaccaccagaaagtaccaaatttacatctagtatttaaaactgaaataaaatatcattcaaccacatcacttaaatttattattgcttttttggttctgcaaaaaaaaaagtaaatggaatagatatgagaataactttctactttttattttgctttgtgttttcataagaatatcaatcaattaacttttgcttacaatcctgaaactaaaataagttttagtttagtatttcctggtcagacaatttcacctttttttttttttttttttgcagagtcttgctctgtcacccaggctggagtgcagtggtgccgtctccccacactgcaacctccacctcccaggttcaagagattctcgtgcctcagcctctggagtagctgggattacaggcatgcacaaccacgcctggttgctttctgtattgttagtagagacagggtttcaccatgttggccagactgatcttgaactcctgccatcaagcgatccacctgcctcggcctcccaaagtgctgggattacaggtgtgagccaatgtgcccggccacaatttcacctttgaagttactttctttagtctgttgtaaatttgctaagtaacaaatgaaggaatgatgtgttcagttgtcatctcagaaaagcctgaccatatttcaacaataaacccaaccctttatttccatatccattaatgtctaccttttgtcaaaattctaatattttctgaaataattttatttatatttttcattgctttcttttttacctgccccatttgaacgcaagctttttaagggcagggtctctgttttcattcattgctgtcttcccaatacctgtaagacctattggcacatgggtgctcaaaaatatttgttgactgaatgaatgagtagaaccacttgccgctgatgaggacacagaaaatgaaggatggaggcgaatggcttttaacaaaggaaaaggacagaggagtgcataactgtgatatgacatctttctacaagagaatatgctaggagccacagaccacatgttgagaatcactgaattattcccctcatcaatcagtaaatggaggtccttgatcaacaagtagaataattcaataaggaattattttatactaaaaagagagatatcagaaatattggcagttctctatttggattaacaaaatagatcaaaatgacatacaacagggtgttgagtatttatgcaaatggagttactccaatgactccagccatgcagaggctgacctcatagttcagtgattcctcaaatggacttccaaaaggaccatcaatatacagcctgtagagcagtcagaaaaaggcgggaaaaaaatgaaaataagtgaaattaattttctgtaccatagagcaaacatgctgaatgcaatctctagattttgtgatgggtcaggccttatttcatggtttctcatagtgattagtttaaaggagtagcagatgttgtttatgaagggtcaagattaaaacaaatacatctgtttctaagtgtgccttttttgagggaaccattaattaaaagtatagggtaatgtaaatatgatcatgccaggtagctaaggactaagctctgatcatattagattactatatatgactaaattaaagtaagaattgctttactgtatctaaattcaataaacattttttcaatggctagatcagtacaggaaatacttatttaaacatttactatgtgaacagaaaaataatgaggagtaaggaaaagaatctaacaccgtccctcctcttgccctggttgttcataagtatagaactttacttacgaaccgatagttctttagctgtaaaggacaatcacaaaggaagctctgaagctctaactactctgctcatgtttatatattcaagtatgtgagtgtgagacagagagagagagagagagcatagagaaatccttcttaactgcaatggaaatgctaattgttcatataatattcatcctcccattctttcttagtaacagacaattaattttattcagggaagcataaagtccagccaaaatactacatttctcagactccctacatctgttttggttgtgtgactatattttggccactgccccctccttcctactggtctgctttctgagctacacaccccacacacacacacacacacacacaccccactccccacaaagctactctttggtgttttgaaataactttggacaggacgactagaactcagcgttctagtcatttactaaggctgggattccagacaagtaacttgtcctcctaaagtggatttctttcatctacaaaagggtcaataagatgggatgctacagaaaaaaagtgtgctaagaattgtagagggccacacaaatatcagaaatacattttgttaacggcatcaatgagtacctacagtatactgacaggccttctgtgaggcccagtattgatgcaagaaatgggctaagtccagtatgagctgggaaatgtaggtgggaatttggtttcaaggcccttagagaatcagttttcatttgaaatggttttgtttttttttttgtaccaggagagagaaaattttgcttttcttggaaaaaataagaagataaaattattagtatttgattacttcatgacatctagttttttgagggagatggaaatggaaactacttaaaccacttttttttacatatttaatctgattaatgtgtgaaatacactgcctttcatttatgagcagtgactttctccctatcatacatagtacatgttctttaaaagaatgttatgttgctattgtcataatatatgtaaccagattgtagaaattaaaggcaactctttaaagtcttgctataacatagtagagatgaaatgaacttcatatatttttaaatttcagttgataactaatgaaaagatcctttatgaaggattgtgtatctaagataattctaaggataagagatatcttcttccctgacccactcaaaagtatataaacattttttgacatttaagtttctcctttgaaagtagaatttatttacattttaaaaaactgatttaaaccttttattaagcttaatgagtttcaagctacgtttctgttttatgtggctgagtgtgaatatacttgttaaagcttttaacatggtgcctgaacatagtaagaacctgataaatattagatatttaagaataatataataaatattatactattattaaaagtaaaggtttgtaatttacaacatttaatgttcatataagtgtaaatttttgaaaaatatttgccttttaaaatcttctctgatcatgtgtcactttaaacagttcttttaattaataaaaaatttcaagggtctggtgcagtggctcacacctgtaatcccagcagttagggaggctgaggcaggaggattgcttagggccagaattttgggcccagcctgagcaacaaaatgagacccttgtcttaagtattagctgggcacggtggcacgtgcttgtaatcccaggtactagggaggctgaggcaggaggatggcttgagtccaggaggttgagactgcagtgagctatgatcacaccactgcactcctgcctgggtgacagagtaaaactcagtgtccaaaattttttttctttttcaagacatgcctgagactcttacctcagaaacctaaaataagctatattaacaatggatactcttcactgaacatttaatccaaggttggtactgaatgttctatgtataccttcactgttaatccacacaacaactttcataggaaagtataatgcctattttattgcattgggaactaaaactaaaaaaggttaaataattttcttaaggtcacacttatattaaggggggatgacttttactaaattcattctgagtctaactccaaagcttagtttgttaataatcagataataatctttacaattaccaattattttggtgaggggtattatataaaggtaaaaacaaaaaaagtttccaggacaattatcatctaacaattctctcttcatgtaggaaaaaagtgagtgtgataaactattcctcaggagaggatgttattgcagttttagaccattctagtctcaggagctaatcatatcaatagaaacaacaaacaaaaggagtgagtttagaaagctcacgatggttctcccttgatggctttcaaattttactgtgtatcaaaatttcctgcaggcttgttaaaacacagaatgctaggccctaccccgagacttgctgactcagaaatctgagcatttgtagttttcaccattcccccaggagctactgatgttgctgatagagcaggtaaggaggatcaggagtgagctagtgcaggtggtgattttacagagggtccccaacttaggatggttcaatttaattttttttaactttatgatggagtgaaagcaatatatattcaatagagactgtacttaaaattttgaattttgaccttttcctgcactagtagtatttggtacaatattctctcatgatgctgggcagctgccacagcttccagccagacacatgatcatgagcttaaacaaccaatactgtactctgcagtgtacagcagcattcaatacaggtaggtaatttttttcaatccctgcccctttccctcccacatcttgtattccccagtgtctattgtttccatcttcatgtctatgtgtacccaatgtttagttttctgtttttgcatgtaaacataaataaaaacaaataacctattttcatctcaatagatgcagaaaaagtttttgataaaatccaacatccctttatggtaaaaaccctcaataaactgggcatataaggaatatacctcaaaataataagagccatctatgacaaacccacaaccaacacgatcctgaattggcaaaaggtggatgtgtttcccttgagaaccagaacaagacaaggacgtccactctcaccactcttattcaacatagcactggaagtcctagccagagcaatcaagtaggagaaagaaaggaaaggcatccaaataagaaatgaagtcatactatctctctttgctgatgatttgcttctatacctagaaaaacctactctgccaagagaactgataaatgacttcagtagtttcagtatacaaagtcagtgcacaaaaatcagcagcatttccatataccagtaatattcaagctgagagccaaatcaagaactcaagcccacttacaataatttgtaattattatctaatgcaatctcatgttaaaaggaacactggaaaaataacaatttgatgtttatctcttggaattctgaatgattcagtcaaggccttacaaattaattaatttaaagtctgcaaggataaaagttctttggcaaggagtccccataaaataatcatgctaacaaaattatactccaataaccattatgaatggatacatttaatataagattttttaacaaaggaaggacttcaggctactttgtcgactgacaatctctgcccaaaaaaaaaaaaaaaaaaaaaaaaaacaaaaaaccccaaataaacaacaaaaatccctcaaacctaaaaactaaagagtctgaaaagatgtatggcagctgaatgcaggatggggtaacaaagaaagaaaatgtctctcaaaggcactagacggagaattacctgtgcttaatctatctccagaaagtggctacatccccaacttgttctgaaattttagccacctaacctccagctatagactcagcttggccctgtccttcaaccaattcttatctgagtcaggaatgagttgtgctctcagtcagcactaaggctcgtttattgcttgctcattagccttgcactaacacagcttcttgacttacatctctgagccaaaatctttacaatttaagcagtgcctcagttttacagtcctgatgacagggttttgccttgtgaatcccagcccaggggttgggatccactacccgctgatagaccagagttctttggacatcctacttgcctagttttgcaaacatcaatagcattaggcattcttataactacattccacactctagtcagaatactaccttttagatctcttgccatccaggtattcgaatttcacatactatataaaagaaagcctaaatttaaggattagaagatgaaagacagtaattctctaatgaaagacaatatgtatactgtggaaaatcttatgaattactgtgcttgtagaaactgtaccagaataaccactaccacaaataggcagacacacaagggaaagggctccttcctgactaatccaagcagagcatatcacccagagccacctctaccagataggacaatgcatcccttctgacaggatttagaatggattgaagatacaaaagcagcccacatggcagagcctttccccctgccctgaggcaagcaatggttttgagaaatggcataacagagctgacaatgagaatggtgatgaaaattcacttttgcaagaggccaggtgctttctatgcttttatttaaatatcgcaaagacttacaagaaagaattgtgtcatgcattgggcattcctcaaagcaacattagaaggaagatatctccattatcatcatttgtaatacagaacaaaaagtcaacataaagttgctcagatagccactctccctcaatcatgaggacttaaaccagaatgtgactcaagtgaaaaagcttgaagccacccaaagctccttccttctccctctctctcctcctctccttcttgcataatagtcatcacattctgttaattatgcctcctaacacccttagacatctatctgatcttccatattactattaccacagtacgaatccattatcatttcctgcctgaatatgaaattgccaactagcttgtgtgctggccccatgtagtacctcatgtacctctctactttcatgagaaatctataaaactgtaagtctgattatctttctccttggcttaaaatcctttcatgggtcttcattgtctttacaacaaagtccaaggtcatttaagtggcagtccaggccagatgcagtggctcatatctgtaatcccaatattttgggaggctgaggtgggatgatggcttgaggctaggagttcaagactagcctgtgcaacaaagaccaggcctgtgataacaatgtgataagacctatgtctctggccaggtgtggtggcttatgcctgtaatcccagcacttcgggaggtcaaggcaggcggatcaccagaatcaggagttcaagatgagcctggccaatatggtgaaaccttgtctctactaaaaatacaaaaagtagctgggcaaggtagcacacgcctgtaatcccagctacttgggaggctgaggcaggaaaatttcttgaatcggggaggcagaagttgcagtgagcagagatcgtaccattgcactccaacctgggtaacagagtaagactccatctcaaaaaaaaaaaaaaaaaaaaaaaaaactatgtatctaaaaaaaaaaattgtatatatatgtatgccaggcctggtggcacacacctgtggtcccagctacactggaggccaaggcatgaggttcgcttaagcccaagatgttgaggctgcagtgggctgtgcttgcaccactgcactacagcttgggtgacagagtgagaccttgcctcagaaaacaaaaggtattctaggccctgtccacatttctccttatacctcgactccaagtgtatgtgtgcttcacatgcatcacacatgtgctagcacacatacacagttttcagccacctgggagtaagccctcaatgacccaccacttctaagttaagtataatttgaggggccaaacacatctggattggagacccagctctgccatgtgactttgggtagggcatttacctctttgaatctcagtccccttatctgtaaaattagggaaacagtactacctaacttatagaggaatagtaagaattaaattaataatgcatataaagcacaattcctggcatgcgtagtgttcattatgtgttactattacaaacaaaaataacttgggccaggcacagtggctcacacctgtaatcccagcgttttgggagaccaagacaggtagatcaccaggtcaggagttcgagaccagcctggccactatggtgaaactttgtctctattaaaaatacaaaaattagcccggcgtggtggcacgcacctgtaaacccttctactcgggaggctgaggcagaagaattgcttgaacccgggaggcggagcttgcagtgagccgaaatcacaccactgcactctggcctaggtgacagagcgagactctgtctaaaaaataaaataaaatataataaaataacttggctcaggatcagatgacaagtacattacagacatgcagattgaacagaaattattaaagatagatgatgtcttgaagaagaactcaaaacttggctaggaaagagaaaggaggataagctggagaacagactgcggaaaggtcatctgaggctttgcagtttaagggtattaccccaaatcaccatttgaagtcatttttacgtagcccattagaaatgagattgaggtagaacattgcttttattgtccaaacaatgaaggttgttctttggcagcaaaccaagtcaaaaaagaacagctctaaaatttgtcataaatgatattcccctctctaaacagttctggtattaggaagctcagagaacttgatctttatgagaaccaagtagaaacagtttattcttgtattttcacaatatttttacatacgttgtggttaaaacttccagagccactgggtcatgttttgctggtttaattgccaaaatggttgcaagtaatttatggataaaattatatcagatgtacttaaacattttacatgtccaagctgtatttacaaggataaaaatatattataactactctctagtctacatatgttatgaacctaaatccttcagagtttattagcaataaaacttgtttctttatctccatttgtttcctccaacctataagtcaacaatatgcattttgtattagatacacattctttttttattcctttccactcatctatctctttctgacaattatcacacctattcgtgctctgagaattttcatggaacaatgtctacaattacatcctgaggagaatggatgccctggctttggcaatgagtcaaataagagctcacaaatgtaaaaattgattaatgaacattcttgtattttagaagagtgttcccaagcaccattgcaggtgatattttttaaatgcctttcctttaaacatacacatacatacacatatacatttcagaactagtcagttctcttcatgaatatttttcacctaaataaaggacatacatttccatatttcaatatttgttagacgtctcttggtaacagaaagttaaagattatagggacactatgttgactaaatagaaaccccagtccaaatccaaactactacagctcacactaaccagtgcacaatgagttcatgttagtaatattatgatctatgttggttatgcaatgatctgtaaatagtctgtgatatggtataattttatagggcaaggaagttgctttgtaacccatattttaggtcttaaaacatatttcaaacagaaaaatgaggaaaaaatctcaatgtagatacatataacagtggttgtgaatgaaatacattctaattgtttgactcgtttgactcatttttcaactttacagaattttttttatgttacaaagctacaaattctttgactttcagttatctgcaatgatgaattaaatgtgtgtgttctgactgcaactaccaatcatttctccttctcattcccttacctgggaccatcctcttccctgagacaaaacaatattgaatttaggccaattaacaactctaaaatggcctctaagtttcaagtgaaaggagagttgcatgtctcttacttcaatcaaaaattggacatgattaaacttagtgaggaaggcatgttgaaagctgagataggcataaagttaggcttcttgtgccaaacagtgagccaaattgctaatggaagggaaaaagtttttgaagaaaattaaaagtgctacttcagtgaacatatgaataataagaaagcaaaacagccttattgctgatatggagaaagttttagtggtctggatgattaaaccagccacaacacaacattctcttaagccaaagactaatccagaacaaggccctaactctgttctattccatgaaggctgacagagatgtggaagctgcagaagaaaagtctgaagctagaagaggttggttcatgaggcttaagaaaagaagccatctctataatataaaagttcaaagcaaagcagcaagtgctgatggagaagttgcagtatattatccagaagatctagctgacataatagatgaaggtgactatactaaacaacagattttcaatgtagacaagacagccatcaagtggtagatgccatctacggcattcacagctggaaaggagcagtcaatgcctggtttcaaagcttcaaaggatagactgactcttgtctatggactaatgtagctggtcactttaagttgaagccaatgctcatttaccattctgaaaaacttaaggcccataagaattatgctaaatctactctgtctgtactctataaataaaagaacaaagtccagatgaaaacacatctgtttatagatagcgtggtttactgaatattttaagcccaccagaaaaaaaaaaagaagattctatctaaagtattactactcacataggcagtaagcaaagctcacaccggaacaataacaatgaaatggattcaaactaattgtccatcaatggatgattggataaagaaaatactgtatatatacataatcaaatactattcaggaacaaaaaagaacaaaataatgacttttgcagcaatatggataaaactgtagaccattaccctgaatgaaataactcagacacagaaagtcaaatacttcatgttctcacttaaaagtgggagctagatgatgtgtacacatggacgtagagtatggaatgatagacagtggagacttgaaatgttgcaggggggctaggaagtgggtgaataatgagaaattacttattgcatacaatgtatgttattctggtgatggataccctaaaagccctgacttggctactacacaatctatccatgtatcaaaattacatatgtaccacatacatttatacaaataaatttttaaaattactgctcattgacaatgcacctagtcaaccaagagctatgatgtagatgtacaaggagatgaatgttgtttgcaggcctgctaacattacatccgttttgcaatccatggatcaaagagaaattctgactttcaattgttattatttaagaaatacttttcataaggctatagctaccatagacagtgatgcctctggtagatctgggcaatgtaaatttaaaaacatcctgaaaattattcaccttctagatggtattaagaacattcatgattcatgggaggaagtcataatatcaacattaataggagtttggaagaagtgatttgagccctcgtggataactttgaggggtccatgacttcagtggaggaagtaacaacaaacatagtataaatagagaactagaattataagtggagcctgaatatatgaccgaattgctgcaatctcatgatataatgttaataaatgaaaagttgcttactatggatgagcaaataaagtagttttggttttgttgtttgttttgttttttgtttgtttgtttgtttttggagatagagtttcactctgttgcccaggctggagcgcagtggcacaatctcagctcactgcaacctccacctcctcggctcaagcaattctcccacctcagcctcccaagtagctggaaatacaggcgtgtgccaccacagccggctaatttttatatttttagtagagatggggtttcaccttgttggcaaagctggtctaaaactcctgtcctcaggtgatccacctgcctcggcttcccaaagtgctgggattacaggaagaaaatagtttttttgagataaaatctactcctggtaaagaagctatgaaaatgctgaaatgacaatttacttgataaagcaacatcagggtttgagaggatttactacaatttttagagaagttaggctgtgggtaaaatgctatcaaacagcatcacatgctacagagaaatcttttgtaaaaggaagagccaactgatgcagcaaacttcatggttttatactaagaaactgctgcaggtgcccctaactttaacaaccaccttcctaatcagtcagcaaccatcaacatagaggaaagatcctctaccagcaaaaagtttatgacttgctgaaggcttagatgatttttagcatttttaacaataaagtatattttaattaagggatgtaaatagtatttctagacatatcgaggctactgcacacttaaaagactacagaatactgttaaaattacttttatatgcactgagaaactaaaaaaaaaaagtgtgacagctttattgcagtattgactttattgcagtggcctagaatcaaaccctcaatatctctgaggtattcctgtagctgcaaatagataaccacctgagaaactactatgactaccctcttcaagcaaaggcattaggcaaactgtaagcctaagaggcagaaaagcaggcatcatcagcctctgccaacagccactgtaagtaaaaatacaaataggtgtgcaccaatccttttgggcacattcatgctcctggtcaacatgtacatatagagcaaagtatgcattcaaggctgtataggcacatgtatgtctctgtgtgtgttatcaggggattgcaagtttattgctaaaaatgaagcctggattaaaatttgaaacaatgcacaagaaatataattaggattctgcatttatttttgtgatcataattaagtgagtattatcaaaggtaagtattagagggaaaataatttccccagaaagcaaagtttatgaatacttgaaaaaactctcaaagcgatcaaagaatttggcatagtgattagatgaaatatgtataaaccaaattctattcctttaagttgatggcctttcttttctatttcagatattagtttatttattctttagcctgttccacactaactattaaagagagttaaacactcatagaggaggccccaggatgccacaggaatgatcaagattcagcatgcatcagtctttagggaagaagatgtgttataagagtcctggtatttccttaaccttcaggaagatgaaggcatattccttcaacaaggacatacgcttggggcatctatgagaaggaaaggtctgcttcatataacaaagcgtcagaagatttcacatccccagttttcaatatgataaataagaatgtatagagattgtcaaaaatcttatcaagcccatggctattttgaaaatgacttgctacaatataaatgaatctttgcatttaaaggacagtaaatagaaaaccagatgaggtatcaccgacaaaatactgtccctgttgatacggcatcaagcaaaaagaaccagacacagatgcacacagcatgttgtctgcactgtgcagcagctcctcagtcaaagctgggttgcaattacaagtaagtatttcttctatgacccagctgcaaggagcctgagacattatattgcagaagatgtcttagttagttagggtaagttattcaggattttcagaaatcttaagaaagattacattttgtttttgcccgcccaaatctctccctgcactatgcccattgcctcatcaaaacccagtgaactccttttgcttacttgggataatttctagattgaatgaagggcagaatttcggagtcttgactagatggaggcagtagtaaatctcgaaatcgttctgtcaaaagaaaagtaaacatcaagctgtgaaaagataaaagtcatgaaaataatttcaaaatggaagtatttcctattgatttattttgttagccattttgactgtatatccatcctttattagaaatttacccaccattttatgtattagtaatatatatgtagtgtatgtatgtgtgtgtgtgtatatgtatatagatggattataataatttaatcataaatatatatgtagccattaagaataggtataaatatataaataatatatattcgtgtatatatttattttaaatacataaaattaagcctggattaatatttgaaatagttatatttatcctataaatatacatatatatacatttctacatatacatatttctcatatataaatacaaaaatatttttttttccttaatggtaacatatatctttatgatcaaatcttatcattgaaaggttagagaaaatatacatgaccaataaacatactaagagatgcacagtctcattagtaacccgtgcaatgtgaatcaaaaccagacaccattaactagcatttacatcatgtagcattcaatcgacagaaattagtctcccaagaccaagtgttggagaggatgttgatcaacctaagctcttatacactgctggtgggagtccaaattggtacaatagcttttgaagacaatttggctttatcatttatgttttacttttgcaaagtctgtggcccaatatttccattctcagggatacaccctcagaaactttaacatgtgtcttagacagcaagtatgagaatgttcacagtagcaccactcacagaacaacataaatggaagcagctcagttgctcattgacatgagagaatggacatttgtgcttattcacaaaatgaagtactaactgaagtgaaactgaatgattttagttacaaataaaaacctaatgaatcatattaatataatgttgagtgaaataaaatgtcagcagattacatataacagaacataatttttattgagttaaaaaaactaagcaatgtattatttaagtatgatatatatgaaataaagcaaaccaattaaaaaggaaggacatgcacaattcagaataatgattatttttaggaaaggtagggggatgaaataggagagaagcaaaagggtaaatgtaactaattgttggtgtttcatatgtattaattgtaatatcacaaatgaataaatgaataagtgaatgacagccaggaaaagaccaataatgactgcatatcatgagctaagaactgatttagtaaacttcagtgcatatgaattcataatgaagaaaagagagaaaataggagggggaggggaagaggaagggagaaagaaaagggaaaaaaaagaaggacaaaggaaaaaatcctagatgttaccttggaaatacttacattgcatagctatctgcatggcatagagtatgcacattttcaggaataggtatgcattacctctagagtcatacctatggaaaggcttccttgatccctccattacttttttgttctctcctcctgcccaatttggaataggctggacctactgtatattcccagcacaacttgtgcctccactttctcagagtttatcacactatgttttattgttatatgtatttatctctctatccctctttcttcttctagtatgagtattatgccaccaagatacagaacattatctgatacataattaaggtgctggataaatatttgttgaagaaatctttccaacatctatttttactggagaaaactgtttgttaaggttaatcataataactcccagcagagaccaaacggtcatatatcaaccatgaatagcaagtggacccatactcccgtcttgacacagtcgcacagtcaggattagatagtatgcaaagctaacactccgcagctgcagtaaatccttcactaactgaaggtgagcatttccacaaaatgatgaaaatatacacttgatgacaattgccatttcctagtttatgaatagctagatgttaattatttggaatacggcagtcacaaagtggccagtgcttcctgagaagcagaatgtatattttatcttcatatttactaaaacgtactgaatcagagatacgtaactggcttctactgtttttttctcttaaaattctgacatttcgtacaatataggtgaggaggaactaatgagatccaaacacagatgtgcttacactctttagtctagaaatccaaaaaaacactctgtgtttttctctaattatactctttaatattagttcacatttttaaatattatattattggctgatatttgtgctattactctttttaatttataaaattaacatttctttcaatcaagtgactagtaaactttctgatgataaataacccttggttttcagtctacctgccaatttatggggtactcattaaatgagtaatgtgtaatgctctatcttttcaatttttttcccacttagccttttcctaaaatgaaaaatcaagccaaaacccaacagcaaacaagaactgtacatatcaagtaaagaactgttaaatcaaacagctatatgtgttatgatattccttgaaaggtaatagtataaattaaagtttagtgaatttctcccaaacttgttaaaagcaaacaaaaatcagaattcttagtgcacacaactataatataatacatccttttcatagcaataagtttttctctttttatacaaccataaaggacatatgacaataattctggagaaaagaatctctgcagatgatatattgacaggactaaaaacacatacacagatgcacacgtgtgtgtgcatacacacacacacagagcaaaagcagcataaaagacatcacttataaagctgtaaggaaatctatacctaatgttcctatatttggaacatcctttaatcagattatcataaatacaaagaataccaagcaaacatatcttgaatagctatcatggttgtcaaaaagagttcataggcagggcatggtggctcacacccataatcccagcactttgggaggctgaggcgtgtggatcacctgaggtcaggagtttgagactagcctgaccaacatggtgaaaccctgtctctactaaaaatacaaaaaattagtcgggcgtagtggtgggtgcctgtaatcccagctactcaggaggctgaggcaggagaatcacttgaacccaggaggcggaggttgcagtgagccgagatcctgccattacactccatcctg

SEQ ID NO: 237 - DNA, 1533 bp, Homo sapiens
ctgcccccgccggtcgcgccgcagaggccggtgagcgcgggcggccacgcgcggaaggcgcgggctgagcagagccggcgttggagcccgcgcgcgcatggaggcgttgccggcagccccctgagggcagcgtggagacaagacccggcgacctccgcgcatccctcgagccgccacgcgctctcgccaccgggcggcgacgggccgcggagccggcgcggccatggcgacgggcggccagcagaaggagaacacgctgcttcacctcttcgccggcgggtgtggaggcacagttggtgctattttcacttgtccactagaagtcattaagacacggttgcagtctttaagattagctctccggacagtctactatcctcaggttcatctggggaccattagtggagctggaatggtgagaccaacatccgtgacacctggactctttcaggttctgaagtcgatcttggagaaagagggaccaaagtcactttttagaggcttgggtccaaatttggttggagttgcaccatcaagggctgtatactttgcatgttactccaaagccaaagagcaatttaatggcattttcgtgcctaacagcaatattgtgcatattttctcagctggctctgcagcttttatcacaaattccttaatgaatcctatatggatggttaaaacccgaatgcagctagaacagaaagtgaggggctttaagcaggtgaatacactccagtgtgctcgttacgtttaccagaccgaaggcattcgtggcttctatagaggattaactgcctcgtatgctggaatttccgaaactataatctgctttgctatttatgaaagtttaaagaagtatctgaaagaagctccattagcctcttctgcaaatgggactgagaaaaattccacaagtttttttggacttatggcagctgctgctctttctaagggctgtgcctcctgcattgcttatccacacgaagttataaggacgaggctccgggaagagggcaccaagtacaagtcttttgtccagacggcgcgcctggtgttccaggaagaaggctacctcgccttttatagaggactgtttgcccagcttatccggcggatcccaaatactgccattgtgttgtctacttatgagttaattgtgtacctgttagaagaccgtactcagtaacaggccggaaaattgtgctctagaagaataaaactgaaaaactctaaaaaaaaaaaaaaaaaaaaaaagttgttgcttagggcttagggatatagtactgggaatatttcagtgaggaggttggaaaccagaaagtattgtctgctatgacaagagtgttgggtatgtgaaagtgtgcctgtactacatatgctcactttgaacttacttaactgttattaccttgaataatgagttttactttatagcacttaaagacacctttctccatcagatacaggttcttggtctttgactgaagatataaaaatcatataaatgattaaagatataaaaagagataa

SEQ ID NO: 238 - protein, 315 aa, Homo sapiens
MATGGQQKENTLLHLFAGGCGGTVGAIFTCPLEVIKTRLQSLRLALRTVYYPQVHLGTISGAGMVRPTSVTPGLFQVLKSIKEGPKSLFRGLGPNLVGVAPSRAVYFACKAKEQFNGIFVPNSNIVHIFSAGSAAFITNSLMNPIWMVKTRMQLEQKVRGFKQVNTLQCARYVYQTEGIRGFYRGLTASYAGISETIICFAIYESLKKYLKEAPLASSANGTEKNSTSFFGLMAAAALSKGCASCIAYFVIRTRLREEGTKYKSFVQTARLVFQEEGYLAFYRGLFAQLIRRIPNTAIVLSTYELIVYLLEDRTQ

SEQ ID NO: 239 - DNA, 1387 bp, Homo sapiens
ctgcccccgccggtcgcgccgcagaggccggtgagcgcgggcggccacgcgcggaaggcgcgggctgagcagagccggcgttggagcccgcgcgcgcatggaggcgttgccggcagccccctgagggcagcgtggagacaagacccggcgacctccgcgcatccctcgagccgccacgcgctctcgccaccgggcggcgacgggccgcggagccggcgcggccatggcgacgggcggccagcagaaggagaacacgctgcttcacctcttcgccggcgggtgtggaggcacagttggtgctattttcacttgtccactagaagtcattaagacacggttgcagtctttaagattagctctccggacagtctactatcctcaggttcatctggggaccattagtggagctggaatggtgagaccaacatccgtgacacctggactctttcaggttctgaagtcgatcttggagaaagagggaccaaagtcactttttagaggcttgggtccaaatttggttggagttgcaccatcaagggctgtatactttgcatgttactccaaagccaaagagcaatttaatggcattttcgtgcctaacagcaatattgtgcatattttctcagctggctctgcagcttttatcacaaattccttaatgaatcctatatggatggttaaaacccgaatgcagctagaacagaaagtgaggggctttaagcaggtgaatacactccagtgtgctcgttacgtttaccagaccgaaggcattcgtggcttctatagaggattaactgcctcgtatgctggaatttccgaaactataatctgctttgctatttatgaaagtttaaagaagtatctgaaagaagctccattagcctcttctgcaaatgggactgagaaaaattccacaagtttttttggacttatggcagctgctgctctttctaagggctgtgcctcctgcattgcttatccacacgaagttataaggacgaggctccgggaagagggcaccaagtacaagtcttttgtccagacggcgcgcctggtgttccaggaagaaggctacctcgccttttatagaggactgtttgcccagcttatccggcggatcccaaatactgccattgtgttgtctacttatgagttaattgtgtacctgttagaagaccgtactcagtaacaggccggaaaattgtgctctagaagaataaaactgaaaaactctagcaggcggatcaccagaatcaggagttcaagatgagcctggccaatatggtgaaaccttgtctctactaaaaatacaaaaagtagctgggcaaggtagcacacgcctgtaatcccagctacttgggaggctgaggcaggaaaatttcttgaa

SEQ ID NO: 240 - protein, 315 aa, Homo sapiens; identical to SEQ ID NO: 238

SEQ ID NO: 241 - DNA, 26407 bp, Mus musculus
  misc_feature (1)...(26407): n = A, C, G or T/U
tattgaaggggctttcgtttttggggctgggcgctgggcgcttgccctcctggctcccaaagatgtaagcaataaagttttgccgcagaagattctggtctgttgcgtctttcctggccgggcgtgagaatgcgtctaataacattacttgacagcacaggatctcacctctgatcatctgcttttgatggacttcctcctgagtgagggatggccaagggaaagcaccaggttgtcctcagctttatcagtaaggccatcgtgctgacctgcggtccattctgttgttctccagggctgctattggccgtctccaggctgcatccaggcgcctgcaaacagagctagagaacgagaaagatctgcagtccaaaatcacagccatgctgaaggacagcgagtaagtttgcaagagcctgaaagacgggctttgtaagttagcacctggctaacttacacaggacacagacctcagagcagtttgtgggacagtttctaatttgagtataaagggtaatttgcttttcactttctagatgcttaggaattaatgaaaaggtgacatgttaaagcagctgaaaggaaaacttttacactgaatttttttcagtctcctcacttttgtttataatcttagtaactaaaacaacaaatgttccattttcacaaggaatgccatgtggcacattgagatccagaaggggcaatttgaggatgtccggaagcaccatgaagcagaggcagaagctagacagaggggccttgaggtacactctgctcggcagcttcaaagggaaagagaagccatggagaagtcagaaaagaaccgcctgctgagggcccggtaagcgccacccagacctggccatagccagttccttcatgttctacacccaggctctctagaaccagctcacagttccctctttgcatccgtgccacgggtcctgcaatggctccatgttacgtgcccacagtcaccactgacctgcaccatcagacccttccctctgcgtattcctttattccttccagctgtgctgttctctggctccatcacacatctggatacccctttccctacacaagcctcagagagcactgagtcctacctctgcttaaccaccgacccccagggacttcagggctactggattctccagatagagaagcccctctcacctctttatgccaccgtctttgctgatctcttctcctgtcagattcctgcccagcctgcgtcaagccctgtttttggtgacttcctcacactggaggtcccagctgcactttaatatctgtgacaggcaagtatatgtgacacttattcctgtttctgcttgtgtcactgcaggaaatctttgcatacacaaaaggagctggggctgagacatcagaagctagtggaagatgcccagagaaaccacaggatcgcagtgaagttcctgaaggcctctctgggaaggtgggttctcaccttaaatctttcttccatcaatgcccttggggaatacaggaatgtgggttcctagatttcactttgagatcttctaattaagtcattaactaattatcagaaacaaatatatctgcagttttattttaagaagctatttgtatttgcaagaggagcatgagacacaatgaagccctagagtgtagggaacatcccagctacgggtctcatgggcacagccctgacagagagcctacccatgcaccctcacattgtcagcatttatagaggtgatcagcacctaaggctcctatagctctgtaatcgccggcagtgcctgcacacatccctagtgaaagtgcacgtttcaccgggcacagtggcacacccttcaattccagcactcaggagacaggcaggttgatctctgagtttgggaccagcctagtctacatagcaagttccagaacagctggggatccatagagaaacctggacacaaaagagacaaacaaaagtaaaaaataaacaaaatgcacattactgcagagttcgtgagcgagagcagaaggaagagatggagtcgcgcacgcacatgcaacggcgcatggatgccgtgctgtccctgaagaacaacatcactgccagtcgggtaggaccagcctctccagtatatctaaccaactggctacctacccccctgggtcttgctcttgggagccagaattcttctatccttgggctctggccatgagcctgccagcctgctcagcctgacggtttaccacgcctctaccacaggcttcctagctggactgcagacaggaaccatgatccagcagaaagagaacaatttagcactgttctgagagggcctcatctcagtgcaacagtggtcacagggcccaatgcagtgtgagggccagctcgagggctcagaactgggttagggaagagtgggccacatcatgaagactcagggcacggtaaccaataggagagggccaacatgcacaccactgcaaagtcaatatgctcaccactgcacagggtcaacatgcacacagctgcacagggtcaacatgcacaccactgcacagaattctagacccagggggcgggcccagggctgcgtgttaggtgagaaacacgtggaaaattatgggtgttgaactgcctactatgggacccatatgcttcagcattgatttaaagacatccattcaaagaaaatatctgagtatgagtatatgcaaagttgtgtgtgtgtgtcatatgctgatactgtgactttagagttccctatttccaggaaacactaaaaaagttccaagcatggggccaaaccagggcagatctggctaagcagaaggcccttacagagaaagaagtgatcctatcccaaggcggagatgccttcaagtacctttttcatcaacgcaggcaccaggaactagaagcccagaagcggtgagacacctgtctgggaagtgggcacagagaaagccggaaggctcagcacgcatcacctgatagtaacaaagctcattcctccccagacttttcctggaaagctgacgtgggttgtgggagaggactgcagcactccatccccaactcccaagaaaagtctccagggagttctgccacttgggggctttatgtagaggcccttagtggggataggacacatctttcctcatttctcttagcttcctgaactcctgtgaccacctccaccctgggggtttgcctggggctcatttctcacaaaccacccttctgcttcattctttggtctcccccaggcttggtcccacagagattccaaaggggcctgccacatatctggatttttccaccttccacacaccagcttctcggtgtctctgcctaaagttatctcattccgaaggaccaagccctttctcccaagtccctgttccctactagtcactgtataggatctgcttggatattgcctgctagctttcttgctacagcgcatcctcctcatcatagtgtctcacaaatatgcaacacacacacacacacacacacacacactctacaatggccaccagagttttgatgtgtcctgttagtctgcctatgtgtgtttgatatatatcgtttgcctgagtggtgcctcccccccccccccggggggaaatggctattaaaaaaatcagagactgagtgagaggtcaccacaccctcatattgccctgctttttgtatcaccaaggactcctcagcagccagtctagaaactagggtgggaaggctcatgagggccagggtttgctgtagagacttgtagactgggcaaagtgagacatttcaaaactagacagatcaaatgcagagctggacagggcagggagggttaaggcgaggtgagagttgaagttacacctccagtcactttgcccttatgaagtttatctgttctagtgtccatggagcttggagcttgcccaagacagggtatccttacaccagttccctcctaggctggacctgagctcttggcttcccagagagctaagagtaccacacataaccctagtagccactgagtgcccagcttgcaggtgctgcaccggctcttgtctgagaagcgcctcccacagggcttttgaagaggagcagaaactcaggaagcaggagattgtaaatcggattttgaaagaggaagctgaggaagaacaaaggaaaaggagacagcatccgctctctaaacccataaaccgccggactctgagagacaagacctggcagtacatctctgacttttgcgaagggaagagtgtgctgaccagccagcaggtgtgtaggaagctgccctctcaagctgaggtcaggctctggacactgcaggtgggagggccgagggttcagctgggaagagaaggctgtcccctgtccccagggccatggccctgtgaggcccaccagggtcctcttctccctcatgtaagttcctcacattggccaacggtactactgcagccctgcagagctgcctgtctcgagacaggggaaagtccctcctccatccctgcatacaatgtggagacagcctcatgaggaaggatgtgtgtagccagtccatacacatggtgtcccaccactgccaggtgtctcctagtgtctccctgaacgctgaatattgctctccttgagggtgtggtgtaaggacattggctggcccgtaacccagcgccctgcaccctacatgagccccgttcttgggctacctggtctttggcctctgaagcattttcctttgtgtttcagtgacacaccacaggctgttttctgtttcttgtctctctgggccaggtggggcctctacctcccagccacttccaccgtggggcccatcagtcctttgcaactgtcctcccttgggggcacattctacatactttctgcaatctctattctgagtggccttccctgtcacatttctaatggtcctgccccacagtttttttctactgggaacacatcccagggttcgcagagatcaccttacctccaggagggaaggccctggtttccccccaacccccaccgctccaacaaagccaggacagccgtcttttcccagggttggtgtgccgtccctcacgaaaattcagcacattgagcatggcagccgtagaagaaagaaacagtagagaaaaatcacaagtatccacgactcacactattttcccacgaacaagactttgcagtggtctctgctgaacactgtaagaaggcatttggtaatccagggatgtgtgttgtcaggctccacactctgcgatgagtgtgtgctgtccggctcagctgcacacagcacacggtccattctgtaatgcatgtgtcttactgcatttgctcttctgctggcaggagcgtgagcgtgagctgctattatacccaaagactgtgtgtgtaataaaagccatctctagtgagtctgttcaagtggacctaggaagcatcagtacagaggacgaggtactggctgaaccagatatttcagggctttggaacaaagagtcataccaggtaacagctttcttccatcaggtcctcggcagggggtcaccctgagccacatgagattccggattcccagatgtaattgcccaccttcatgccccattctgtaccagccactgcctcctccaaactctaggtccttctccccttttaatccctaagagaaatggcctgtgtcaggcagtggtggcgcatgcctccaatagaggcagcagcaggcagatctctgagttcaaggccgacctggtctacagagcaacttctagtacaccgagaaaccctgtctcaaaaaaccaagacagacagacagaggcagagaggcagagctggggtgtgcatgatgatcccacactcctagactcttctccctggggtgcagggttcagccatgtactgctgcacatagcctggagcaacagaggtgctggaaggctcccaagacaggcttgtgtcactgcttactactgagaaaatacttcttcctaaaaagtattttatttttactgtgcatgtacccacaggcactcatggagaccagaggtgtcagatgtcttgtagctagatcacaggtagttttaagctgccagatataggtgctaggaatcaaactagggttttctggaagagcagttatgtagttttaactgctgagccatccctctggtccaagaaaacttatttctataaaaatccatgagttcaaacttgctttaatggcccttttcaagaaacacgcctcacacaggatgctggttctctggactacagtttacaagaggcgcaggcttatatagagccccatccctaagcagaatttctcagcctctgtaaacgttagttagcatcactaccagagcaaagagatttgattctcctgcttctagagaagaaatgaagaaagcaggctgggttacccattccatttaaattcagcagaaaggtggtgggcctaggcaggcaccaggcactcaccaccccggaaaatcagggagaaatccaaccagtggcctgatgcccagggtcttcaggcagacttcacacagatgtcaaaaggaaaattttaggcccatcttggattgcactttttccaattgctaacattagttagtgaggttgcctgatttgcactaacattgccattcaagaaaactgtgtcctgcagaattccccaaatcttcctgttgccctgactcaatcatctaaaacagtagtttctgctgttgctgctcagggagtcttacatacttctgcttttctctctttctgtctcttcccctctgtctctttctctgtctctcccctctgtgtgtgtctctctctctgtctttgtcactgtgtctctgtccatctctgtccctgctactctctgcttctctgtgcctctctgactctgtgtgtctccctctgtttttgtttctgtgtgtctctgtctttctgtgtgtgtctctgtctctgtttctgtctctctgtctctgtgtgtgtttctgcctctctttgcctgtgtctgtctctgtgtgtgtctctctgtgtctttttgtatatgtttctgtttatgtctctctctgtctctgtctctctcactctggggtccctcagagaagtctcctgggtgcaagctctccttctttgccaggttaggccctgcactttgttcactatggggctttgaacaaacatggacctctgtctgtttgaactcaaggtgcccaaggaggacatggaacgaaaacctgtgggcggaagtaagatggaaaaggatatcctggctcggactatggagcagctgcgcagtggggtggttcaaaagcaggtggtatctggtcgggagttcaagggccgcccattcaatagcaagcctgaggtcatccacttcaaggtgagccttgaggggtggacagcaaggcaagcctgttatcactctcctgcctctgatgctttctgtttccaccatgggaaacccagaaaagtctttagctttggggctggtgtgcagggctgggtttacagcagaaggtacaggaagcacctgggccctccatgacaggggcctggacttctgagaaggaaaacaatagcataattacctgttaggcaggccccttctgcttggcaaattccaccttctcatgaggtgccccaaggacccaacacccactaccagctagctaatattagcatttacagagggtagactaagatacacagccggtgcttccatcctctctcccacccaaccagtcccccataaaactcatatcctgctgaggagaaagttctcatgaggtagacccttccctgtccttctcagacctcaaggtgggcatcatgacccaagggaaaccttttctacctcaggatccttaacctctcctgagtcagcgccagggtagacccctcttcccatgaccatttcttgaatctttcttgggggctgccctctctatctctgcaggactttgatattggcaaagtatacaagaagaaaatcacgctgatcaatgctacttacacaatcaactattgcaagctggtgggtgtggaggagaacctgaaggacttcatccacattgagtgagtctttcagagtctgggcatgagaccatgggccagcttgccttaaagaactggagagatcacagagaccagcccagttcctctgaacacatgaccaagctttcagatgggctgcctaagtcttctaacaccttcactgtgtgttgtgtttggctgcaaacgagtccccgttggcagctggaatgctctctcactataaagatttcaagaatgcttttctgaaccataatttactttttctttttgtgctagtgtttcaattttcttcttcttcttggactcttctagtggacatactgttacttctttgccggcatttttggtgtgtgttttgcggttccctttgatgcttactgcttctccatcccacgccacccctcctaccttgcaacatttttgacactctattttgttgctcagcatctgaccttcatctttcttttctatttttcctttttttttttctttttgttgtttttgaaacggggtcttgctttgtagctgacctgtattcatcatgtagtccaggctgctctcaaaccttcaatcctcctgcctcagttcccaaagagctgacactacagttgtttcactgtatccagattataggcaggtcagttcatagctcaggccacctagcagcaacatctatcactgtgtgtgatacgcaatttctaaaatggggactcctctgttcagggtggaagaattattttatttgcctgaggtatttgtcatctcagaggtttactgcctccatctgctaacctaggcctagtcctgggagcgtctagccttggtacagtcttatctaggcctagaatgtttttggcctgagacttgctgctgaataagctcaccctttctagctctttctgaactctggatggctggtcaactctgcagttgtggctcaaactcctctctgcactgactgattcaaactggcttctctcagcgtctgacggaattgctctgcttggcctcatactaactttggcaatatgtccttatcttctggctccttctgattctctggcaagttctcttgttctctctctctctctctctctctctttctctctctccaacctgtctctgtacaactatcctggtaaaactttcatctcccctcctctctttctacactgctctctcttaagtagtctatctttctctctgttctggtgagagttgggcatatcctattctgtcaaaactttctctgattcatcactttgtcttcacttaattatgcctcactttcaaacatgggtacttccttctacaaactaactttacctttatagtttgggattaaaggtgtgtactaagggtgagtctgtattccagccagagtagccatgttcctggattaaaatccctctacgccagggctccctttcaagatgtcttcatggggctgctcccggagactacattgctttatcgtttttccttgggcagcactggctggcagagctctgataggcacttcccacctgagaggtgctgtcctcctgggaactgagtggaagtgaccagtagcatctttggttctcgtccctctttctggaaatttgtagaatctcctagctatctgcaaagtgcttgcatggagagaatattgctaaaaattgtttattttacgcaccatgttcatttgagatccgagagcttttctgtcttttagcatgatgagtcacttgcttctgttagcctgtgtgatttctgaagagcgtatggaagacccaggttaggtggttatcattacctcagctaccacaaagccctccttcccaggcctggattaaagatcctctatcctctccatttctgtcttctgatttctttcttttcttttctttttttctttttcttttttttttttttttttttttttgagacagggtttctctgtgtagccctggctgtcctggaactcactctgtagaccaggctgtcctcgaactcagaaatccgcctgcctctgcctcccaaatgctgggattaaaggtgtgcgccaccactgctcggcttgttttttttggtttttgtttttttgttttttgttttttgttttttgttttttgttttttgtttttttttgttttttttttttttttggagacggttcctctgtgcagtcctggctgtcctcgaactcagaaatccacctgcctctgtctcccaggtgcttaaagtgggattaaaggcatgcgccaccacttcccagctgccttctgatttcttttgctgttgtagctgtgtctgtctagagtgttcctggccctgtgtcctggagcccctacttcagcatgcccgaatcatttgattctctttagattcattgtacatcttggatctgaggttcatatctctgagcagctctagaaatgtcttattcctagccggcaaatatcatctctccctgtttgtcacctctccccatgactctttgccctgctcctcccatgcggagccttcgccttcacattccagcctccctgtccttacagcacctgcttcacactctctgcctattcggggagtgtatgtgacgtccccagcttactggtcttttcagctgtgtctagctggctgcagaaactgctgactgtgtgtcttgtttcagtactttcttgtttctaaaaattcctagttctttttcagatgagctggcatttcttaacagtgtccttttctttcctcctgcccataactctgtatctttatgactttcctatttttaccacacgccttttagaagctccattcagtcatgcaatggtgtcaatagttaatcgtgtgtgttcttaagagtttagccttgcttctcactgcgttggttcatgaacatcccacatgtgcatagccttggattcttaccattgtctgtagggtgagggcccagggatcttcctgtctctgcctcccctaaccctaatctccgccccgnnnnnnnnnnnnnnnnnnnnnnnnnnnnnnnnnnnnnnnnnnnnnnnnnnnnnnnnnnnnnnnnnnnnnnnnnnnnnnnnnnnnnnnnnnnnnnnnnnnnnnnnnnnnnnnnnnnnnnnnnnnnnnnnnnnnnnnnnnnnnnnnnnnnnnnnnnnnnnnnnnnnnnnnnnnnnnnnnnnnnnnnnnnnnnnnnnnnnnnnnnnnnnnnnnnnnnnnnnnnnnnnnnnnnnnnnnnnnnnnnnnnnnnnnnnnnnnnnnnnnnnnnnnnnnnnnnnntccagtacccagagacacatttttatattaagtttttgtgtatttccaagccatgcaaaatatctaaaatccaacattgtaaaaatatgcctgatgccgggcggtggtggtgcacgcctttaatcccagcacttgggagtcagaggcaggcagatttttggttttgaggacagcctggtctacaaagtgagttccaggacagccaggactacacagagaaaccctgtctcgaaaaaccaaaacccaaaaaccaacccccccccaaaaaatatatatgcctgatattaggaattttgtaggaagaccctttcactcacccagaagatgcagtcagaagggagcacagcaggcctggggttgccagtgcaccccggcagaggcactgtctcagctcaggtttctactgctggggtaaaacatcgtaaccaaggcaggctggggaggaaaaggtttattcccccccccacacacttccacatcatagtccattatcaaaggaaatcagaacaagaactcagacaggaggaacctgaaggcacaagctgatgcagagaccatggaggagggctgcttactctctttgctgaccatggcttgctcagcctgctttcttataaaaccaggattatcagcccagggatggcaccacccacagtgggctagggccctcccacatcaatcactaataaaatgtcatacaggcttgcttgtagccggatcttatggaggcattttctcaattgaggtttttatctctcaaatacctctatcctgtgttaatttgacataaaactagctagcacagtgtggtacctggaacagaaagagaaaagactacaaaggtcccagctgagtatatagtgagtatctcctttccacagtgacctaactacccatgtgctgtgaatccctgtttctgcagctttgaaccccctggtcccatgtcagccggcatgtcctgtgaagtccttgtcaccttcaaacctatggtaagtcaaaggtcacagaggggtgctggctttttttctagcttaacaacaacagcaaactcagcatcattctgcaatgctggtggaataaagccaggtttgatctgacccgagggactcctgaaggctgtgacatgtgtttcctcaggatctgctcatgtggagcactttgggactcttcccctgggatctgctagacaagtagcagtaactgggattgctttgttttttagataaataaagatctggaaggaaatgtctcgtttttggctcagacgggcagcttttctgttccactgaaatgttcaacgaaaaaatgttctgtaagtttcaattccctgaatctctctccagagtgagggccttggagtactgaggacatgaggccggagctccaccacagaagtatatctacctctacctctacctctacctctacctctacctctacctctacctctacctctacctctaggcagggtcccactatgcatctctggctgtccttgaactcgctgtgtagaccaggttggcctcaaactcagagaaatccaccagcctctgcctcctgagtgctgacattaaagatgtacaccaccactactggtttccagacattttcattgtgagtaaatttttaaacctactgaagaacagaatcatgcagtgaatttccatatgctcactacctacataggaaagttttcaacactgccatgttggcttcatctttacacagcttattgttgtgggaccacttcataggaaattaccaacatcagactcaacacccttaagaaacacggaacccaccataccatcgtgcctttccagtgacacagcacagcacacagactcagtgtttgcaacagactgcaacatggctttagtcccacaaaggcttataagcctgtcacaggtttattatgatatgacaaacgtgggctgagcagggtcagggggctctgcccccgcatctcaccatggccttctgagagtaacttctagcctctgtctagcatgaagttctcatggaaaatggctggacatacagaaatcaaagccagcagtaccagcactcctacacatctcccagggatttttgggccaaatccgggcacacgtacaagttcaaaaccaggggggcagagacagggcttctcccgtgtgataggtggaagagagggccgagagctgaggtaagagtctgcgtcacaccagcaggactaacacagctcctgattgtcaccagccatagccgaagtgtccactgtccacacactgccctttacagagcagttacttctgacgcactgcctcacatttgatggtttttgacctagaatagcaaccccttctccagtgttgggccataaagccttacttggccaactctagaacactgtgtgtttgtgtgactgccccccccccccgttatcacagtcacggtgtccccgctgtcccctgtgttcctttaaattagatactaggtcaaattagattttaaaactacttgcttgttgctctcaaagatgttcctagcgcccacatggtgctatgccttcttctgaactccgtgggcatgcatgtgcacgcacacatgcaggaaaaacactcgtgcataaaataaggcagaagtagttgtaacactttcctacatgtatagagtacattgggattacttcaagtccctcccacctttaatcctctctcctccctataagtaggaaccattttgaggaagctggtgctctgtgtgtcatgggtcccacactcgctcctgctgtgtgccaagttcctgtcacagacaccgaggcccacctatagaagagggcagatctagggtgggctgcaaaaatagagctctgtctcgagtggggaaaatggcagcccttgccagtcgtcagtggtgggcacccgtggccttgcctctctggcctgaatctggactactctgttttatactttggtgtgcctgtttctgtgccccattgtcacgtctctggaaagaggtagtgcaggtggagccctggctttagactcagtgtcccaaaacagacttgtgagagatggctgtttgtggaaccatggtgacacccaggcatggtgcactcagcttgagcacagaaagtctgcagcctatagccacggaggccatgaatgacacagtcccactctgaaaactagcactttccaggccctgtatctatctgttcctcagcttacatcaaccaggagtgacagctgtcagcttgcccaccactcccagactctcccctctttgaattattgtcatctctcaatcagggagctgctggtttgactttcttaaaactagacccaggagccccaagtcgccctggttactatgagtctgtgatttcttaagtgggctttgtccccgatggacagtgcagacagaggcccgtgaacccctcctgtcccgactggagccggatgcaggcgcccccgtgaagaagagtcaggtcccccggcttgttgggactgcatctgatattcaggagaggaaaccttctcctaatgagacattgggtcctctggtcctcgattcccgcaagggcctgtcctccctttgtgactgaggatccagccagctgagaggccaccatgacttacacttgtgttctttggcagctgtcccttgacaaggagctcattgattttgggacctacgtggtgggtgagaccacatctcggatcatcacactgaccaatgtcgggggcctgggcaccaaattcaagtttctccccgattctgagttctatgagatggatgagtcccagcccgccatgaaaatagtgagtgttctgtcagcctctgaccatgattaccgaggacagggtgggaagcctcctggccatgtgtacaacctcacatgtatcccagtacaacctcgcagcatgtaagaacaggatgcgtacaacctcgaatgtataaaaatggatgagcagccgggcgtggtggtgcacgcctttaatcccagcacttgggaggcagaggcaggcggatttcttagttcgaggccagtctggtctacagagtgagtttcaggacagccagggctacacagagaaaccctatcttgaagaaaacaacaacaaaaacaaaaacaaaaaaaggatgagcaaaaaaggctgtcagcaaatgggcggtgggggagagggagagggaaatgtcaagatagcctcaagtcagtgagagcagaacgtcggacacacatgcagtctggcttcaggggctacagcagcagaatggaggtagaatccaatcggacagctccatgagaggccacggccatcttcccaaggcacaaaaagaactttttgcctttttccaagaagactgtgcaggggctgtagtgaggcaacagcctcagggtggggaatgggggcggggggtggggtgggaggtggagtcgtactcaagaaatgggctccccatgctcatggattgtggagaaccccagatgcttctaaaatatttgaccagtcttttgagaagcatggaaggatcctattggctctgctcaggtgctccaataaagaccccagaaagaatctcacccaagagatggcagggcaaccagggcggctgtggccaaggcaggatgagtggcgagctgctgtgggggaaggaaccagggagcgaggcaggtggaacggggagactgggaaccaggcttgctttgggcaggaagatgggttgttcaggaagcatctagaagctctgcctccaaccacctgtagagaaaggaaagtcaactcaacccaggcaagagcagagccagcctcaggacaaatgaccaagtagaatgtatagagggccgactcagctgctcacaggtggaagggatctatgagagagcatagatgctgataacagagaggagccaggttggctaagctaaaatagtcattcttagcctaggcaagttgatgctgtggcctaatgacccaggatagactgaacgagagccatagacacatgggtccggagccctgggaacagatacattgtatcttctcctgggacaagggtatctgcaaagttgaatgggcactgaagacactaaccttcctttcagagcagcctcttcacctgtgaggaaaaaattatatatgagaagatcatgaccagtctttctgagcagcagcttgaagtcaatgactcttccctagtggacctccagagcctgaaagagtctgagaagcagctggatggtaagggctgggagactagcgtgttaccttgtaagtaagaggcacctacctcaaacctcctgcattgatttctgagccagccaggacacttggcctcagatgcatactgaataggcaacgaagagggctggcatggacacaagggcctcccaaaggtaagccgcccaggagccactctcagcacagccacaccaccttctggtcaaccagaaggaccagagagccagggtctcaactaaagaccaacaggcctgtgacccgaggagcgctgggagtcaaagtgcagagttttctcggggcttcagttatgagacagtaaatataaaaagcactcagatgtgcaaatgtgcactgggtgcagtgtgcattggaattctatttgtgttgaatctaacagcatcaacagaagccccagctatggacagccaggctggacacagggtgtgcaggtttgagggctttgaaggccccacatatgctccctgctggtgcagggtgtttatcagggcaaccaggctctgaggagggttcttggttctcaccgcacagaagtagtgatgatatacagggacagtttttaaaactgagcaatcctggtgctgagtggaaaaataagtatcttgtgaaggcactgaccctgactgtaatgcagcctgctggctgccctgtaccctgccagggcttgtctcatcgtttacccatctccctccgtcctgcattggttcttggacaaacacaaaaatggtcttcaggaattaacacctctctacactcatataggcaaaagttaccatatcaaacaaagtcacaaatgatagtgggtttttaaagattactaaagtttatatagacagctttgtgttgctttgggtgtgaatgataaaatccctcattcaaaaggaatgaaaaattccgtttgattccttccttacacgaccacaaagcacttaacatgtacaacagctctgttcaacccattcccgaaacagggcaaacccttcttccaaggcccagacctctccattcaacaggttcccccagactcctccatccaacaggtttcccaagactttgacagcacactgtcatcctannnnnnnnnnnnnnnnnnnnccctccctcccctccttcctttccttctatcttccctccctccctcccttgattcttgttttgtattgttgttggttttttgtttttgtttttttttttttcaaaaaacagatttctctttgtagccctagctatcctggagctcacactgtaaaccaggctagtcttgaactcagagatccaactgctgatgcctccctagctttgactaaaggcatgcagctgtagtttttattttaagatttccaaacttgggctggagagatggctcagcggttaagagcactgactgctcttccaaaggtcctgagttcaaatcccagcaaccacatggtggctcacaaccatctgcaatgagatctgacaccctcgtctggagtgtctgaagacagctacagtgtagttacatataataaatgaataaataaatctttaaaagaaaaaagaagatttccaaacttaccatttgttttggctgtgtgtatgccctttgagctgtccacccccatccccatccccgtgccagtgtcgcacaactgtgacacatacaccttagagttaagtcagtagtctattccaaatttttaaaaagttgtgttgaggagttcctctctgtttactgtagtctaaactccgctcattctgagggattgtcccttaagcctcagagccacagcacttaaaacccatgaatccccaacagatcgatcacccttagctgactgatctctgcccagcactggcacgcattctctcagcatgaggctgaagctgagttacttctccatattctgtgcgtgtgatgaccctaccgttgcacactttgttcttacaggccttccatgggttctttttatcattctcagcagcaggaaatgatgtgtgtgagagtcttcctgccatctctgttcaattcttacatggatataattgtcatgcccaggaggaagcaggtcatcaaccttacctgggtcagcaaaggggtcacaagagtagaggactagacagggaatgacgttcctttgtggaaactggctgcaggcaggttggaacacagggtaggacatcaatggagaggcagctgcgtgagcgagcactggctcattcacatcagcttctgtatgtgacacttagcagggactgagtctcagtctctgtgaggatagcctcttgttcttgaaactttcactgacatatacgtttggactgggcagaggtggccaacacctttaatcctagcattcaggaggcagaggcaaatggatctctgagtttgagtcaagcttggtctacaaagcaagttccaggacagccagggttacacaaagatgggttacttatgctagcaatctattgactatctaagcaagaatctaccttaggctctcttttctgaccagttgatcaatttatcttatactaatatactttcttggttatcgtgaacttagactaagtcttgaagccaggaagtgcctgttacccaactttgtgttttcaaagtagttgctttgcattacattggttcctttcattacctgatacattttagaattagtttcttggtttacacatacacacacacacacacacacacatgcacgcgcacgcacacacacacaaagtcagacatgctggtacattgatacatatctataatatatatatatcccatatatatcccagcacctaggaggtagaggcaaaaggatcaggagttgaaggtcattgagttcaaggccatccctgggctaagccagaccttatctttaaaaaaaagaaagaaaaagaaggctgggtgtggtggctcatcccagtcctgtggaaacagaggcaggcagatctcaatgagtttgaggccaacctggtcctcgaacaaatcaagtccaggacagccaaagatacacagagataccgtcttaaaaaatataagaataaagaaaataaaaacaaagaaaaaaggcctgggatgaatataattggtatagtttcgaatatgtcatcagtttgggaataatatcttgccatattgagtcttcaacccataaggatggtgatccagtgggttgcatgatctttatttttttcttagcagtgcctcagagtctgcagcaagaaagtcttcttcattctgatgctctttgactttttttttccagactgattattgatatagacttctttgtcttccagacccagaggttactacagctgcagtcagtgccatgaccatgattcccagtgaggagcaggcagagatcacactgggggaggtcagtccacctgccccaccaggtagcagctcatctttctccagccctagccacaccctctttaatcgacgacctccctactctcagggggctctttcatctgtccagagccagcctaaacccacagtctctaggcacctgttgtctagtaccaatgtatccccttccccatgtcgaacgtaggaaagactggagcagcttagagaggacaccgacaatgggctgaaatgtggagggagatgcagagaaaggttcgggctgcttttcttgtcggactgtgaaccttagaatcagggatgggatctttgaaactccaggagcttggaggtcggatagggtggtgaggaattgcgtgccctatacacacacgatagaaaacgaggccagcttctaccaagctcttcccacttctaatgcgggtgggaagggcctggcttctgaggtgggctgaggatgtgtggaaagcacacaggtgactcactgttgagtggatccccaacttccagtctgttgggacttcacagcggtaagccctcgagagcagagacagccttagaactaataatacctgtatgtaaggacatagtcctgctaccccccatccatgcagtggtagcaagcatagggttagtaggaaacatcctaataaaaaccacaacgcctctgttctgacccgatggccccctctccttacacaggtgacagagggggaaatcggtcccttcagttccgtcaaagtacccattaccttcaccccagttatcccaggagaagtccaaactaaattcaaggtcatgtttaagaatccacagagtccaccggtgagtacccctgcctgaggtgactggtctccacagctacatcagacagctgcttttggtgacatgaggtttccacttgctcttgcttagatctttagtgggtggtacagacagctgacacctcagccaataacacgcatgtccacatacgtgttcagatgctcacctacaaagtactttgcttttctcctcttcctctcctctcctccatatatacatctaccgttggagatcaaactcagaacctagagcaagcgctctgccagggagtgagcctcacctcgagctccagcccgtgctcttgtttgtaagttttgctgtatttggtgtacatgcctgtgaatgggcgctcacacatatggtcttacatgtgtgtacaaacgtgcgtgtatgtttgtctacagaggccagaggttgatactgggcctcttccttgatcgctatttactttatattgggaggcaaggtctctgacttgaaccagagcacaatgatgcagctagctagctagtcagcttgcatcctgggattacaggggggccaccatgcccactgagcttctctgtgggggctgagaacccaaactctagcctaatgcttacacagccagactttcacctgttgagctgtttctccagctctcctaaccccctgctcttaattattagaaatgtctttcttaatttataatcttatagatttactaaattatgatcagagaagatgatgtgaactccccaggaatgggtaaagaagcaatctcaggggctggagaggtggctcgctggttaaaagcactgactgttcttgtagaagacccaggtttgattcacaaccatctgtaactccagttccagagtatctgacgccttctcctggcctccacaggcactgcatgtacattggtgcacaggtatacatggaggaaaacacacccacacacataaaataaagatcaataattaagccaggcattggtgtcccacacctttaatcctagcatttgggaggcagacgcaaatggatctgtgaggccagcctgacctacagagtgagtccacaacatccaggactacacagagaaaccctgtctggagggggaaaaaaatcatgaaaactgatcaactctctaccaaatgggtcaagaaagaaagaaagaaagaaagaaagaaagaaagaaaggaaggaaggaaggaaggaaggaaggaaggaaggaaggaaagaaggaaagaaagaaagaaagaaagaaagaaagaaagaaagaaagaaagaaagaaaagaaataaaagaaagaaactagagagtgcatgcacaacatgtgcaaacttatgggacacaatgaaagtggtgctaagaggaaagtttatagcactgagtgccttcataatgaacctggagagatttcatacaagcgactcaacagcacacctgaaagagcaaacacacacagaggagcagatggcagaaaacaacccaacagagagttgaatccaaagacagcagtacaaagactcaatgaaacaaagagccggttctttgagaaaatccacaagctagacaaacccttaaccaaactaaccaaaagacagagggaccgtatctgtactggctggttttgtgccaactttccacaggattgagttaccacagagaaaggagcttcagttggggacatgcctccatgagatccagctgtaaggcattttctcaattagtgatcaagggggtagggggggaggtccccttgtgggtggtgccatctctgggctggtagtcttgggttctataagagagcaggctgagcaagccaggggaagcaagccagtaaagaacatccctccatggcctctgcatcagctcctgctttctgacctgcttgagttccagtcctgacttcctttggttatgaacagcagcatggaagtgtaagctgaataaaccctttcctccccaacttgcttcttggtcatgatgtttgtgcaggaatagaaaccctgactaagacagtatccaaatcaacaaaaccagaaatgaaaagggagacataacaagagaccacagaaatccaaagaatcattaggtcttacttcaaaaacctgtggtacacaaaattggaaaacctaaaagaaatggataatttttgatagataccatttaccaaagttatatcagataaacaattaaataggctgatgacctcccaaaagtagtagaagcagtcattgaaattctcccattcaaaaagaacccagagtcagactttcaaagagctaaatccaatactcctcaagttattccacaaaacagacacaggaggaacattgccaaatttattttgtgaggccatggtcaccctgatacccaaatcacacaaaggtacaacaaagaaagataattacagataaaatttcctcatgaatatagatgtaaaaatactcaataaaatacttgcaaaccaaatccaagaacacatcagaataatcatccaccatgatctagtaagcttcaccccagagattcagcgatggttcaacatatgaaaatctgtaaatgtaatccaccatataaataaacaagagaccatacaatcatctctgctcttctgaaggtcctgagttcaaatcccagcaaccacatgatggctcacaaccatctgtacagctacagtgtgctcatatatatataatagataaataaatctttaaaaaattaattttttaacccattgaatcaaagaaaggcgattgtctctcatctggcagccatccactgccagggttaggattagggttagggttagggttagggtgttgtctaaccgcctcctaaatatttatatttacagaatgtataaatctgtgctggtcccaacctcggtcagaaaagcttctgactgctgcgggtcgttaacgagggaccaagcgctatcagtcagggactgactgctcagctgtgactggatcatcaccgctggttcccagtctgttttctctggacttgatgatgttaccatctgctgttatttgttcttttgcttggaagattcatccagagagatactctgctctctttccaagacactctgtgggaactccagctgactgactcaacaaggcaccccagttgacttctgatgtatttttgttgtggtggtggtggtgatggtggtggtggtggtggtgatggtggtggtggtggtggtggtggtggtggtggtgatggtggtggtggtggtggtggtggtggtggtggtgatggtggtggtggtggtggtggtggtggtggtggtgatggtggtggtggtggtggtggtggtgatggtggtggtggtggtggtggtggtggtggtggtggtggtggtggtggtggtggtgatggtggtggtggtggtggtgatggtggtgatggtggtggtggtggtgatggtggtggtggtggtggtggtggtggtggtggtggcggcggcggcgactgggcttctttcttggcttggaactctcaatttagactgcaaaggtctcagatacacagagatctgcttgtctctgcctcccaagtaataggactaaagatgtgcaccaccacatcctaaattgactggatattttgagcaccaaatctgatgttttactaccaactatggatcaatctgccttttaccttggcttcctggacacctaataaaaccagaggtatcactattatagattattctctgtcagtgttttgggtaactcggacaattgaacgaagaaagaaagacaagatatgtttcaggcttctcagcagcggggagtcagcctctgcaggactggaccgcaaacccgctttgcagagcctctttatcgtttacacaaagacacttctagcaagtcagtttgtgcacaccaaacacatcttatcagatgcaggaattgtccgaaggaaccgacagaagacttcctggtctgccaagtacatctcttcttgggactaagttatccaaagactgaatctttccaaaggaacccccataaaacctcaggtgcaatcactgactgtttacgaaaggctacttcagagcctaggagccattattctgggactcatgccatacacagcgactctgcaaaaactctgcaacaatcctctggatccagcagaaaaggataatcacatgaaaaaaatcacaaaacccttaaactcatgtaatgtttaattattaacctcatacttgtcatatagcaagttgcaaaaatcaagccatgaaactgtttgctaagtattgtgttaacactcattgtggtctcctacattgaaatttaaacatatgttgggcttacatattctgcctcagttatatttcagagccaccggtactgccatagatgtgccagtctgggtgccaaaggccacggtggacctgaagatctgcatgtatgaccgactctaccaggactccatcactgtccacacaaggtgagcctcacagtgccctgtaggagtatcatgcccaaagctgaccaaacaccggtctgatggtcaccttagatggtagaggactaggcagctgattaggctctggaccttgaagaaagtaatcctaactatccaggagatcctagtgttatcgagtcattgtagaggaacccaggggagtcaaggacagagacagatatgaagtcagaggaagggaccacgagctatggcattcctgaggtcctgagttcaattcccagcaaccatgtggtggctcacaaccatctataatggaatctaatgccttcttctgttgtatttgaagacaggtatggtgtactcatatatatataaaataaataaataattctttttaaaaaaagaaaagattttcccctgcaatctccacaaggaaccagttctacctcatcttgacctttaatctagctagtgcccctttggcctctgtcctctgagatgctcagaaacttactcataatgtgctaggtctgagtttgtggaaaccatttcagcagccatagcacacttgctgcatgccctgggtactaggcaagtgtctcaagtgccctcaaggatatagaacatagtagcatcagggagagcagacgaggccctacagaagacatcagacgttagattagaagtattttccttgaagtacaacctgagagaaaagtatccaaggtttcacgacttcatcagctttgaaccactgggcgccagaccagaaggcagatgctgtctgcaccaagccccaagcctcgtcacccatggcaagtgtcgcatatgacttggaagaaccgtacccccgcccccacgacgtggttctcaccaagctttctctggctccatgaaggtgaagcttgtgatgcacccccaaattcctccttgggagccataggatgacagtgtgctgtcaaagtcttgggaaacctgttggatggaggagtctgggggaacctgttgaatggagaggtctgggccttggaagaagggtttgccctgtttcgggaatgggttgaacagagctgttgtacatgttaagtgctttgtggtcgtgtaaggaaggaatcaaacggaatttttcattccttttgaatgagggattttatcattcacacccaaagcaacacaaagctgtctatataaactttagtaatcttt

SEQ ID NO: 242 - DNA, 2839 bp, Mus musculus
tattgaaggggctttcgtttttggggctgggcgctgggcgcttgccctcctggctcccaaagatgtaagcaataaagttttgccgcagaagattctggtctgttgcgtctttcctggccgggcgtgagaatgcgtctaataacattacttgacagcacaggatctcacctctgatcatctgcttttgatggacttcctcctgagtgagggatggccaagggaaagcaccaggttgtcctcagctttatcagtaaggccatcgtgctgacctgcggtccattctgttgttctccagggctgctattggccgtctccaggctgcatccaggcgcctgcaaacagagctagagaacgagaaagatctgcagtccaaaatcacagccatgctgaaggacagcgagaatgccatgtggcacattgagatccagaaggggcaatttgaggatgtccggaagcaccatgaagcagaggcagaagctagacagaggggccttgaggtacactctgctcggcagcttcaaagggaaagagaagccatggagaagtcagaaaagaaccgcctgctgagggcccggaaatctttgcatacacaaaaggagctggggctgagacatcagaagctagtggaagatgcccagagaaaccacaggatcgcagtgaagttcctgaaggcctctctgggaagagttcgtgagcgagagcagaaggaagagatggagtcgcgcacgcacatgcaacggcgcatggatgccgtgctgtccctgaagaacaacatcactgccagtcgggaaacactaaaaaagttccaagcatggggccaaaccagggcagatctggctaagcagaaggcccttacagagaaagaagtgatcctatcccaaggcggagatgccttcaagtacctttttcatcaacgcaggcaccaggaactagaagcccagaagcgggcttttgaagaggagcagaaactcaggaagcaggagattgtaaatcggattttgaaagaggaagctgaggaagaacaaaggaaaaggagacagcatccgctctctaaacccataaaccgccggactctgagagacaagacctggcagtacatctctgacttttgcgaagggaagagtgtgctgaccagccagcaggagcgtgagcgtgagctgctattatacccaaagactgtgtgtgtaataaaagccatctctagtgagtctgttcaagtggacctaggaagcatcagtacagaggacgaggtactggctgaaccagatatttcagggctttggaacaaagagtcataccaggtgcccaaggaggacatggaacgaaaacctgtgggcggaagtaagatggaaaaggatatcctggctcggactatggagcagctgcgcagtggggtggttcaaaagcaggtggtatctggtcgggagttcaagggccgcccattcaatagcaagcctgaggtcatccacttcaaggactttgatattggcaaagtatacaagaagaaaatcacgctgatcaatgctacttacacaatcaactattgcaagctggtgggtgtggaggagaacctgaaggacttcatccacattgactttgaaccccctggtcccatgtcagccggcatgtcctgtgaagtccttgtcaccttcaaacctatgataaataaagatctggaaggaaatgtctcgtttttggctcagacgggcagcttttctgttccactgaaatgttcaacgaaaaaatgttctctgtcccttgacaaggagctcattgattttgggacctacgtggtgggtgagaccacatctcggatcatcacactgaccaatgtcgggggcctgggcaccaaattcaagtttctccccgattctgagttctatgagatggatgagtcccagcccgccatgaaaataagcagcctcttcacctgtgaggaaaaaattatatatgagaagatcatgaccagtctttctgagcagcagcttgaagtcaatgactcttccctagtggacctccagagcctgaaagagtctgagaagcagctggatgacccagaggttactacagctgcagtcagtgccatgaccatgattcccagtgaggagcaggcagagatcacactgggggaggtgacagagggggaaatcggtcccttcagttccgtcaaagtacccattaccttcaccccagttatcccaggagaagtccaaactaaattcaaggtcatgtttaagaatccacagagtccaccgttatatttcagagccaccggtactgccatagatgtgccagtctgggtgccaaaggccacggtggacctgaagatctgcatgtatgaccgactctaccaggactccatcactgtccacacaagctttgaaccactgggcgccagaccagaaggcagatgctgtctgcaccaagccccaagcctcgtcacccatggcaagtgtcgcatatgacttggaagaaccgtacccccgcccccacgacgtggttctcaccaagctttctctggctccatgaaggtgaagcttgtgatgcacccccaaattcctccttgggagccataggatgacagtgtgctgtcaaagtcttgggaaacctgttggatggaggagtctgggggaacctgttgaatggagaggtctgggccttggaagaagggtttgccctgtttcgggaatgggttgaacagagctgttgtacatgttaagtgctttgtggtcgtgtaaggaaggaatcaaacggaatttttcattccttttgaatgagggattttatcattcacacccaaagcaacacaaagctgtctatataaactttagtaatcttt

SEQ ID NO: 243 - protein, 693 aa, Mus musculus
MLKDSENAMWHIEIQKGQFEDVRKHHEAEAEARQRGLEVHSARQLQREREAMEKSEKNRLLRARKSLHTQKELGLRHQKLVEDAQRNHRIAVKFLKASLGRVREREQKEEMESRTHMQRRMDAVLSLKNNITASRETLKKFQAWGQTRADLAKQKALTEKEVILSQGGDAFKYLFHQRRHQELEAQKRAFEEEQKLRKQEIVNRILKEEAEEEQRKRRQHPLSKPINRRTLRDKTWQYISDFCEGKSVLTSQQERERELLLYPKTVCVIKAISSESVQVDLGSISTEDEVLAEPDISGLWNKESYQVPKEDMERKPVGGSKMEKDILARTMEQLRSGVVQKQVVSGREFKGRPFNSKPEVIHFKDFDIGKVYKKKITLINATYTINYCKLVGVEENLKDFIHIDFEPPGPMSAGMSCEVLVTFKPMINKDLEGNVSFLAQTGSFSVPLKCSTKKCSLSLDKELIDFGTYVVGETTSRIITLTNVGGLGTKFKFLPDSEFYEMDESQPAMKISSLFTCEEKIIYEKIMTSLSEQQLEVNDSSLVDLQSLKESEKQLDDPEVTTAAVSAMTMIPSEEQAEITLGEVTEGEIGPFSSVKVPITFTPVIPGEVQTKFKVMFKNPQSPPLYFRATGTAIDVPVWVPKATVDLKICMYDRLYQDSITVHTSFEPLGARPEGRCCLHQAPSLVTHGKCRI

SEQ ID NO: 244 - DNA, 52644 bp, Homo sapiens
caaagtgctgggattacaggcgtgagccaccgcgcccaggctatttatttagactttcttttagaaaaaacttttattatggaaaattgcaaagtcaaaaaagtaaagagaatgataatacgaagccccaggtgcccgtccctgcctcagcaactatcagcctcacagcattcctctcccattacccctccctacgtgtagatctggactagcatgtttcaaagaaaatcccaggcgatatatcatttcacctgtaaaaacctttgcagatgcctctgacagatagaaactcatttttagcataaccacaaaatcatcatcaaccccaatacaattaataatttcttgttttttttgagatgaagtctcgctctgtcacccaggctggagtgcaatggcacgatcttggctcactgcaacctctgcctcccagattcaagtgattcttctgcctcagcctccgaagtagctgggattacaggtgcccgccaccacactcggctaatttttgtatttttagtagagatgaggttttaccatattggccaggcaggtctcgaactcctgacctcaggtgatccacccgcctcagcctcccaaagtgctgggattataggcatgagccaccacgcccggcccacattgataatttcttaatggaaactaatgccagtttgtgctcactttcaggaattgtctcaaaaatgtcttttacagctggtttgcttgaatcgagatttgaacaagatccccaggttgcatgtggccgacttgtctcttgaggctcttttcacttaaagacctccccttccttattttcctccaggccatttatttgttgaagaaatgggtcgtttgttccatttatttttatgtctgtctcctttcatgctgcccgagggggttcctcgcattctctgtagaggtctgtgtgtcttttgttgtatttcttcttgagtacttcatggtttttgatgtgattataaacggtagcttttctaaatctcattttctcattatttcttctgataaatagaaatatacttgcttttcattattgaagttgtaccaagcaacattactaagttgttttaattaaataacttatctgtatatttgtttggattttctatgtagagtcattttatctgaaataatgaccatttttcccttccattccttatgccttttatttccttttttttttttttgagacggagtttcgctcttgtcgcccaggctggagtgcagtggctcaatctcagctcactgcaacctccgcctcctgggttcaaacgtttctcctgcctcagcctcccaagtagctgggattacaggcgtgcgccaccacgcctggctaattttgtatttttggtagaggcggggtttccccacattggtcaggctggtctcgaactcctgacctcaggtgatccaccaaccttagcctcccaaagtgctgggattacaggcgtgcgccaccgcgcccggccgccttttatttcttttacatctgattgttctggctggggacgtgatgaatactgagaagtggttttagagagcgtccctgttttgttctcggtcttaagggaatgtttttaatgtttaagtgtgacgtttgctgtggtaatttttggtatatatatactctatcacattacagatgttcatttcttcttcttctttttttttttctttttttttttttttgagacagagtcttgctctgtcacccaggctggagtgcagtggcatgatcttggctcactgcaacctccacctcctgagtttaagcgattctcctgcctcagcctcctgagtagctgggatgacaggtgcctgccaccacacccagctaatttttgtatttttagtagagacggggtttcaccatgttggtcaggctggtctcaaactccggacctcaagtgatccacccgcctcggcctccaaaagtgctgagatcacagacatgagcgcccgcacccggccagtatttcaggagaccttctttctgttactgccagtccacttagaagcccacatgagattacacacacttaatctgattttttctctattttttcgtatgtttaaagtagctcccatagtgaataatctgatcaatcaacgtgaagtgcagaattgaagctgctgagtcttcctggtgaattgaacatgcggttagaatgtgtccccactgccgttcctgctttttgcctaagttttttgtctgtttctagacaactccactaacttcctgtttatgcttcctgcctttctttctgacgcaatgcttcttaagcttgtgttttagacgtctctctcttaaactgtagagagtttgggcaggcacagtggttcacacctgtaatcccagcacttcggaaggctgaggcgggcggattacccgaggtcttgagtttgaaaccagcctggccaacatgatgaaactccgtctctattaaaaatacaaaaattagccaggcgtggtggcctgtgcctgtaatcccagctgcccaggaggctggggtacaagaattgcttgactccgggaggcagaggttgcagtgagccgagatcgtacctctgcactccagcgtgggcgacagagtgagactctgcctcaaaaaacaaaaacaaaaacaaaaaaagttagtttgattttttttggttgttcttgggtttgttgttgttgttgttttcattttgtttgtttgtttgagacggagtctcgctctgtcgcccaggctggagtgcagtggtgcaatctcggctcactgcaagttccgcctcccgggttcatgccattctcctgcctcagcctcctgagtagctgggactacaggtgcccgccaccacacccggctaaattttgtatttttagtagagacggggtttcaccgtgttagccaggatggtctcgatctcctgacctcgtgatccacccacctctgcctcccaaaatgctgggattacaggcgtgagccaccgagcccggcctgttcttagtttttaatgcaactcgataatatacttccctttagcttgcttatttaatctatatttttacttaggttttaacctgaaagtttcttattttgtccgttcttcaactgttttttttttcttttttttgagactgagtctcattctgtcgcccaggctggagtgcagtggtatgatctcagctcactgcaacctccgcctcccgggttcaaacgattctcctgtctcagcctcctaagtagctgggattacagggatgcgccatcacgcccggctaatttttgtatttttagtagagacggggtttcactatgttggccaggctggtctcaaaccttaagtgatccgcccacctcggcttcccaaagtgctgggattacaggtgtgagccacctcacctggtttgttcttcaacatttttacgagaattaaagtacagtcctatccggcatttctgatgattttcagtgtgatgccagcacactggctagccatgtcaccacagtggaacttccactgcttcttcagcacgctttcctgggtctctcagttcccaatcccactgctcccactggaggaccacctgaagctgcccagtcctgaacctttcacagctgtgtggcgacgtcgggtttgttctcagcttctcctgcagagggtcagccagcgcctctgtctgcagggacagctaccctcatccctccacctcccgcttctctttgctcctgtttctcccaatgacccttgccctggtagattcatgtactgaaaacaataaatctaccccctgttgttagtgaggactcaggagagatcagaggtggctgcctgttggaagtgccgtctttaaccggatgctcagtgtatatggtttagtgtgatcatcttcagaggaactgtgtgtgtgcaatgacaccttttagaagactgacatccacggggtgtccagcaaaatgaggtcgcggaggccgcgtggaattcacaagcacagagctgaataggtttggccattttctaaatagtttctgaaaatcctgccattcaaagactagcagcttaatcagttctttcaagtggaaaaaatattgttggaattttacaagatgccttaaaattctgcctcccaggactttaaaatgcaattgtttctttgtaagtttaaaaaattactggcattgatacattaataatttatccaagaaacattgctaggcactgaaaatatttttagtgaattattctgaagcgattgctaagttaagcaatgaaacacagtcctctacaattttacagttttagcatctcatacataatgtcaacatttatgtacatttcacccggaattactcattatttcaatgcaaaatggtagtgctaattcccaatgttaaatgtctgtctctatactaggtacattgacttaaagcttttttttttttttttttttaacccttttagagtcagggtcttgctctgtcacccaggctggcctgcagtggcacaatcacagctcacggcagcctcgacctcctgggctcaagtgatcctcccaccgcagcctcctgaataggtgggactacaggtgcccaccaccacacctggctacatttttttatttttattttatttttattttttttgagacggagtcttgctctgtcgcccaggctggagtgcagtggtgtgatctcggctcactgcaagctccgcctcccgggttcacgccattctcctgcctcagcctcccgagtagctgggactataggcgcccgccaccacgcccggctaattttttgtatttttagtagaggtggggtttcattgtgttagccaggatggtctcgatctcctgacctcgtgatccacctgcctcggcctcccaaagtgctgggattgcaggcgtgagccactgtgccctgctgatttataagcatttgacatcagctgttttgtatattaatcatggtacaagcacaatgtgattaataggcgttaaaaccaatcacatatttaaggtctaatagaaaacagccaccggccgggcacggtggctcacgcctctagttctaacacttgggaaggccaaggcaggtggatcacttgatcccaaaagtttgagaccagcctgggcaacatggcaaaaccctgtctctacagaaaatacaaaaatcagttgggtgtggtggtgcgtgcctgtagtcccagctcctttgggaggctgaagcaggaggatcaattgagcccaggagttggaggctgcagtgagctgtgatcgcaccactgcactccagcctgggtgacagagtcaaaccctgtctcaaaaaaataaaagaaagttagccattaaatttaattctcaccagaaaaaaataagtaaagagtttgtgattttaacattgtttcttttttttttttttttttttgagacagtcttcccctgtcgcccaggctagaatgcagtggcgtgatctcggctcactgcaacctccgcctcctgggctcaagcaattctcgggcctcagcctcccaagtagctgggactacaggtgcctgccaccatacctggctagtttttgtatttttagtagagatggggtttcaccatgctggccaggctggtctcaaattcctgacctcaagtgatctgcccaccttggcctcccaaagtgctgggattataagcgcgagccactgtgcccggcctgtttcttaagtgaaattatttagttccaacatctggacacagaagattcggtaccaagagttccacacgagcaagctcctaacattcccaaaatgataagcaaagtgtaatgataattttgaaattatttaagaattgtttttgggccaggcgtggtggctcacgcctgtaatcccagcactttgggaggccgagacaggtgggtcacgaggtcaggagatcgagaccatcctggctaacacagtgaaaccccatctctaataaaaatacaaaaaaattagctgggcgtagtggtgggcgcctgtagtcccagctactcgggaggctgagacaggagaggggcgtgaacccaggaggcagagcttgcagtgagccaagatcccgccactgcactccagcctgggagactgagcgagacttcatctccaaaaaaaaaaaaattgtttttggtgccagatgtagtggctcaagcttgtaatcccagcactttgggaggttgaggtgggtgaatcctggctgagaccaggagttcaagactagcctgggcaacaaagagagacccaccatctcaaccaataatttgaaaattacctgggcatggcggcatgtgcgtgtagtcttagcacttgtgaagctgaggcgggaagattgcttgagcccagaagtttgaggctgcagtaaactgtgattgcgtcactgcactccagcctgggcaacagagtgagaccctgtcacaaaagaaaacagaaattgcccaacagtgttccagagtatccctttacactcccaccagcaacgcgtgacgatgccagcccttccatagccttgccagtgctcactgttggcagcgttttgatctcaggcatttttttttttttgagacggagtctcgctctgtcacccaggctggagtgcagtggcgcgatctcggctcactgcaagctccgcctcctgggttcacaccattctcctgcctcagcctcccgagtagctgggaccgcaggcgcctgccaccatgcccggctaattttttctgttttttagtagagacggggtttcactgtgctagccaggatggtctcgatctcctgaccttgtgatccgcccaccttggcctcccaaagtgctgggattacaggtgtgagccaccacgcccggccaatctcaggcattctactcagtatataatagtatctcattatggcttgattcatatttccttaaagacactgatgttacacagtttcacatgcatattggccatttgtatatctcttttcttatggaattccaaatcttttgacatttttttcttgagatggagtctcgctcttgtccccaggctggagtgcagtggcactatctcggctcactgcaacctctgcctcccgggttcaagcaattctcctgcctcagcctcctgagtagctgggattataggcatgcgccaccacacccagctaatgttgtatttcattattttaatttggtatttgctggtgggagtgtaaagtgatactcggggatactgttgggcagtttcttttttcttttgtgacagggtctcactctgttgcccaggctggagtgcagtggtgccatcacagctcactgtagcctcaccacgttggccaggctggtctggaactcctgacctcaggtgatccacctgcctcggcctcccaaagtgctgggattacaggcgtgagccaccgcgcccggcctctttgaccttttaaactggagtttggacttcatgtggttgataggagctcttcatgtgttccagatgtaagacttgtgtcagatatgtgtgtgctgcaaatattttttcctaatctgtcgtttgttttcttaatgccttctttaagagaaatggttaattcaccgtcttttaaatctatgattttattgatctatattttgcgatcatcttttgcagctaatttctatctcccagcatggaggatgacggcagcctgctccctgaggacgagcttttggccgatgcccttcttttggaagatggtaataaagcttctttcacagtaacagaagtttcagcaaaaagacaaacaaatgacatgcttcatagtagccctttaattccctttatttctgggagagggtatcttttacactcatatttttctctcaaagagggagcttatattattgtctttatttgaaagaaagataaattgtggctgagatgttgaaggcggcagaccatagttttctagtttccaacatcagtattgagaaatctgatgccatttttatcccaatcctttgaatgtgacctatttttgttttcttttcctggaagctgtttttaaaaaatctctgatgatctgaaatgttactgagacgtgccttgatttggttctagttctgggcacaggcaggccatcgcaatctgggaacgcatttccttcccacccccaccccactccccaccccgttttgggttctgttgtgtgctgagtcagctcctggcgctgtgtggccttctcccccctgccccccgccactgtctccctctcccgccccccttgtgactgtggctttctgccttttccatcatttttactgagatttaatgaagggaagaaaaactgtgttccctttgccgtgttttgccggaagtccgctgtaatcttctgagatagtgaccttcagcctcttttgtctgagaacccctttacattcttaaaaattattgaagacacagagaacatttgtttatgttgcctgtatctttccatacttactgtatcaaaaattaaagctggaaacattttaatacgtagccacttaaaatagcaataacgaacctattggcagtaacgttaagagttgggtttaatggaagacagctggagtcttagagctgtctgttgtgacgtcacctgtcatgcagcctctggaaaacgccactgtcctctcatgggaagagagtgaggagacaaatggcgtgcgagtgtgatcatgaagacagttttcacctcacaggccctgaaggacactaagggaccctcagggttcctcggattttgctttgagaaccatcaagttagacttgtcaagatttatcctaacactggccgggtgcggtaccaccaagttagtgcgtgtcaagatttatcctaacacgggccgggtgtggtggcccacgcctgtcatcccagcacttggggaggccgagacgggtggctcacttgaggtcaggagtccaagaccagcctggtcatcatagggaaaccctctctctactaaaaatataaaaattagctgggcatggtaggacacatctgtagcctcagctactcgggaggctgaggtgggaggatcccttgaacctgggaggcgaaggtggcagagagccaagatcgcgccaccgcactccagcctgggcaacagagactccacgtcaggttcatgactacgccgaacgtcatgttgaggtccaaagggagtgggtggatgagcagaaggaacgctcgggggccgtaggcaggtgaaaaaggattttattcagcagcagctctccccaacggctttgtctcacaccgtccgccctgtcctggctggttagtccggcggctcccacacacacagctgcgtggccggctctcccttgacttcagggtcagcagcttaactctttctctggacaccagccaagcggtgctgtgcccttgctccccgctgtccgtctgcaaagacggatgtccctgactctctctctctctctcaaggcgccagcgccccagtcccactgagtcacccaggctgtttacctctgcctgtgcttgtgtggctgcagtgcagcaggttccttacaccctgtcccaaaaaaagaaaaagatttatcctaaaacttcagatgcaaatgtttgatctgcttttttttttttttaaactcttgccttgatttctagaaagagatgaattagaggatccggagtttgacatcaaatgtcttctacaggaagctgaggatgacgtggacccgggacacagcaggtaactcggaggatcgggggtggaggtgggtgtgggggggtgggggtgggggtgggggtgggggggtgggtgaagggagcggggcggctgcttcctccctcccacaggctgtagctcccgcagctcccgccctgaagcagaactgtcaggcacctaccccggcagccacaccgaggaatgagttctgagcctgcagctggggtggtggcagctgacgtccttttcatcctaagctcagtgaaagaactagatactgatgctgataaattgaagaagaaaacagctgaggacagaacgcaggcatttcacctgcggcagaacctgagcgccctggataagatgcatgaggagcaagagcttttcactgagaagatgaggtgagctggggctgaggccgctgcacctgcacctcttgatgccccccaggccgtgacatgggtgcagcaggggtggtcctgtacctgtcgtcaccctgagggcctgcaagggagggtcgcacagggtctccatggaggagcagttctgcaagccccacccgggagctagtgcccagcgctcccagcccccttcccacagaaaaggcggaaacaagtggccccgctgcccccagcgccacccagagttgccacctgtcaagctttcgttgtagcttctttctgtgtttgtgtgtgtttgtattttatatctatgggattttgtgctaaattatgttaaagcaaatcacagacatgatacgtcactcctaaatatttcagcgtctcctaaaaactaaaaacattcagcggagagtggtggcgcacgcctgtggtcccagtgacttgggaggctgaggccagaggatggcttgagcccaggaggtcaaggctgcagcaagcctgggtgacagagcaagaccctgtctctaaaaataaaaaactgaaagacaaatgttcttctgcataacttcttgcccataactcgggcacctaacttgggtacttcacccggggaaactacgatttccctcctcggctccggcagcgcccgtgtgttttccaagtgaccgtcatggccgggcgcggtggctcacacctgtaatcccagcactttgggaggccaaggtgggtggatcacgaggtcaggagtttgagaccagcctggccaatatggtgaaaccccgtctctactaaaaatacaaaaattagctgtgcgtggtggtgggcgcctgtagtcccagccacttgggaggctgagacagcagaatcgcttgaacctggggggcggaggttgcagtgagccgagatcgcgccactgcactccagcctgggtgacaagcgaggctctgtctcgggaaaaaaaaaagcgacctccagagttcatgctctgggctttgctccgttgtttgtacctgaggcctgagtcgcccccaggagctaccatgtgaactggattctgtcccggcccatgccccactggtgacctgggcctgcctggcccgctctctggaagatggtggaggagctccagctcctcccctcccgtgggccccagacctcccaccacgtgcccttcacacgcaggagtgcgcttgtttatgcagacccaggttccctcccgctcctgcaccgtcctcggccctggggagcatgtcaccttcgggtgggggccacacagctgcccctgggcagttttccaaaaatggacgacaagaccctgcttgtgtggcttgaaggtgttagagagacccctggcccgggtgaggggggctctgggggtctggctctgcctcacctggccccattgccacgcccactgtcactttggaggctggagtttcagggaaccatcatctgacctttgcttccctgttccagaggggagctgcgcgcctgtcggcagaggcgggacctgatcgacaagcagcaggaggctgtggcagccgagatcgccacagaggaagaggcgggcaacatgtaggtggccctcgccagggggcagggaaccgggcatgaggtcagggccggaggttcactggttcacccaaagtgaggcgtgaagcacctgctgtgttcaggccaatgaggagccccagtgtgaggccacaacacgaacatgcagaagcatgtgaggtcggcactgctggggcctggagggcaccggggctggatctctgggaggcaaggccgagtgggtcagcagtcaggggaaggcctcttgggccactcttgcctggagcagcagggtgaggcagctgagggcgaggtgagaggtgagaggcctgcatgcgtcccacactcccaggtgggaggggcctgggggacgctggaaacgccaacactcaccaacaggcattgctccgggagcctggatggctccacggctgcagctctggcctcgcctcaccctctgggggcaccaggtgcctgcagggcctgccgagttcagcccagccctggaaggccccagcagggtgcccgtcctggaggggctagtgcagccatggggagcagagggccagcagccaggggcaagggaaccagcaggtcctcccggccctggggggtgaggggcttcgggccactgcaacctctgcccctccaggtttaagcaattctctgctgcagcctccggagtagctgggattacaggcatgtgccaccacacctggctaatttttttttgtatttttagtagagacagggtttcaccatcttggccaggctggtcttgaactcctgaccttgtgatccacccgcctcggcctcccaaattgctggaattacaggcgtgagccaccgcacccagccctctgcagggttttgacctgcctcattcctggactgtggcacccaggatctaggggtgactgccatacccggccagctgctcaaagcccaccacccgtgtccacatggccgggacctctggccagcatcacactgtgccgctctcgtgggcaaccgcccaccgcccgggaagtggtctctaggaacgtggctgggctggcactggatgtgtgctggggtggatgatgcccaggaggggaacaggagggagggaggggacccagggcgccctgacgcgagggcttggggcttgtcgcacgtgctgggtccttcccgggtcacaggcctggatggctgctgcccccaggggcttcatgcaggggccactgagggtccagggcaggctccccaagccctcactccccctggggctgtgccatgtgggcactgcctgcccagcggaaaggggcatgtggagagcctcccgccagccccacgctccattggctaggtggcccagtgccgagatttccctcctgagcgagaggaggccagggagtgccaggtgaacctggatggcccctggatgactgaggcctgacacacgcccggcctgtccgttcaccactgcagggccgctgtgggccgcctccaggccgtgtccagacgcctgtttgcagagctggagaacgagagagacctgcagtcgaggactgaggccgtgctgaaggagagcgagtgagtcggtgtgcagccgggactggcagcaggcaggccccagaacggtgcgagtccttcccatctgggggcagagagcaagatctggggggttttgcacctgaccggcaaactgcggggaagtggaaaggggactcggtgaatgcagtggttggaagggttagtcttcacgttgcctttttcagtttctctgggtttgtttatgttcctaggaactccaaaatcaggttctttttcctctttcctcgtttctcatgctttgtgcttccacagaacagcgagctgggttttcaaagcccaggagagagacagctgcctcgtcctaaatgctttcctgtggagttgggttggatgcgtcgagttgccttcggcgagtttggcaagaaggggtttgggaaggtgcacgaatttctcagggcgactgaggggaccctgagctgacctcaagtaggactcccgaaccacacagcccccagccccgggagctgcagccaggtccatgacatccacagcactgaccctgcacgtgcccgggatgacctaagctttccagcctgggcagggcaggaggcacagagagggctgagtgcaggcctcaggccaccccacccctaagagtgcccatgccgccagccctcatgcaacctaacatctcagcctcactccactgaagacaccactgagctttgacccagtctctgacctgcactcactgtgatgtagtcacgacccagtctctgacccacacttgctgtgacgtagtttctggcccagtctctgacccacgctcactgtgatatagtcacgacccaagctggtgtccagtgccctgcactgtggccccacctgtgtgggcagtgggaggggtgcaggggaggacaggacgctgaacccagctgtggctgagcgtggagaacactgtcccctgcgacactcctttgacaactggctctgtcatgcccctctcactgctcagcagcacctgcgccagggtgaggggcttcacagggctaatgaaccccagaaggcctcactttactaggttgatgtgattgtccacttctttaaaaaaaaaaaaaaaaaaagtttttgggctgggcccagtggctcatgcctataatcccaacactttgggaggcccaggctggtggatcacctgaggtcaggagttcaagaccagcccaggcaacatagcgaaaccctgtctctactaaaaatacaaaaattaactgggcgtggtggtgcatgcctgtaatcccagctactcgggaggctgaggcaggagaatcgctggagcccagaggtagaggttgcagtgagccaagattgcgccactgccacactccagcctgggcgacagagtgagcaagactctgtcttttaaaaaaaaaaaaaatggctgggcgcggtggctcacgcctgtcatcccagcactttgggaggccgaggcgggtggatcacaaggtcaggagatcgagaccatcctggctaacacggtgaaacccccatctctactaaaaatacaaaaaattagccgggcgtgctggcaggcgcctgtagtcccagctactcggaaggctgaggcaggagaatggcgtgagcccgggaggcggagcttgcagtgagccaagattgcgtcactgcactccagcctgggcgacagagcgagactccgtctcaaaaataaataaataaataaagttttattttgaaacaattccgaacttacagaagagctgcagaatggcagcaagaccccctgtgcccctcggccccgcatcccagagccgtgcctgaagcccatgtggcgttgtgtcgagggtggcccctcgcctcccccagtcagaaggagcctcggttcttctgtgacaggcggacgttgcggttctgaggattgcaggccaggggctgtcccgcacagcgcccgtgctcgatgcccctgggggtgatgaccagtccctcgggtgtcctctcatgggacacgtgatggctgccagccccactgtggggccgctggcttcttcagtgcagcgacaccgttcccttggaaactgatgcgtagcttgtgggcagaagctttgaggctgggaaatcccgctccgtgtcccctttcacacgagcgctggcatccctccgtgtttcttgccagaattcattcctgctgtgatggcttctaaggggtgagtttccagttgcaccatcccttcctattagttggctttccaccgttaggggagcgttccccctccgtgatcgctctccgtgtaggctgggggtgctgtgtccctgcgggtatgatccggcccatcaggattggtctgggtgctccagccgccttgcgtttggcggtggcatccttccgcatcctgcgttcgtgtctgccgctctgtgggcgttttcgggcacagtgagaggctcaggttcccttcttcttccctgcccttgcctggacccagacccttaaccgtcagtagacagaggtgggaaacgcacgcagctctgcctgcctgtattgaaaaccacccgttcacatctgtaattccaattgcaaccaaagccacaggtctatttcacccccttctctgatggtgtgaaccctgcctcccaccaccctcatttcgggcaggtagttgccccatccctacccgcaggcggccccgagcgcccggagcccacctgccgccctcctcctgtgggcccggctgctgccggactgcccgtggactttcctttaagtcagctttatctgggtctaatttgcatgcagtacaaagcatctggaacgttccctgcatatcttcagtgggtagccccaccccaccaggcaacctctggtctgctctccacccagtgttaaattttctaggacttcactccagcagatgtttgcagggtgctccgatggagctcctgggcacagcctgaggcatggggctcatgcatatgcgtgtccccgtgtctgtccctggcggggtgtcctgcatgtccctgcgtgtgaccacagctgggactcctgcatgtccccgcgtgtgaccacggctgggtgtcctgcgtgtccccgcgtgtgaccacggctgggtgtcctgcgtgtccccgcgtgtgaccacggctgggtgtcctgcgtgtccccgcgtgtgaccacggctgggtgtcctgcgtgtccccgcgtgtgaccacggctgggtgtcctgcgtgtccccgtgtctgtccgtggctgggtgtcctgtgtgtccccgtgtctgtccgtggctgggtgtcctgtgtgtcaccgtgtctgtccgtggctgggtgtcctgcgtgtccccgcatgtgaccacggctgggtgtcctgcgtgtccccgcatgtgaccacggctgggtgtcctgcgtgtccccgtgtctgtccacggctgggtgtcctgcgtgccccccgtgtctgtccgcggctgtgtgtcctgcgtgcccccgtgtctgtccgcggctgtgtgtcctgcgtgcccccgtgtctgtccgcggctgtgtgtcctgcgtgcccccgtgtctgtccgcggctgggtgtcctgcgtgcccccgtgtctgtccgcggctgggtgtcctgcgtgcccccgtgtgtgtccgtggttgggtgtcctgcgtgcccccgcgtgtgaccgcggctgggtgtcctgcgtgcccccgtgtctgtccgcggctgggtgtcctgcgtgcccccgtgtctgtccgcggctggctgtgccagcccccgagggtccccgggttccaggcgctttcccgctgggtcccgttggaggcagcgccccctccctctcgcagtcaaggtctccgtggccaatgtggtgactccttttgtcgtctctgggcactgcgggcacaggggcactggacggctgggtgcagcttcagcttccactcagtgggattgttgcagggtctctgcaaggcctcctccctctggaacgggggcttccagcggtagagcccaacggagagagcacagaaacgaaatagcacgggtgtgtgcgaggggcagcttggagagcgtggtccccgcttccagcgtcggtcccgggaggcctccgttgtggctctgggacaggtggcggccacgaggctggccgctgcttcgggacccaaaccgcgttctggaaacagcacctgaaccttccccagcacgtgtccctgctgccacaccatgcgcgtcatccgcagccacagaacaggccgccccagcccttagccgcctaaggcagcaggcgtgatggtctcggtttctgagggtctcggtttctgagggtcgtggtctgggcagggggttgggcttggggtgttcaggccagcccgagagagaccccgtggaggggcttcaggcatgaacagccgagggtccttggaatcatcttggagacgggatgctgcatgtgtctcacccgcagctctcccaggaccagcatctctgcacgcaaggggccatgggctggcagaagcgtctgtggactcacgggcatttcctggccagcaggtcccaggaacccccaaagaaggccctagagacgaccctgcccgctcacaccacctcccggtcctcagcgcctgcgctggtcccatccctgtgcccgggggctgctgcgaggcgcccactgcgatctgtgccggtggcttagatacagtctctcgttcacccgtcctccccacgcggtaagagggcgcccactgcgatctgtgccggtggcttagatacagtctctcgttcacccgttctctccacgcggtaagagggcgcccactgcgatctgtgccggtggcttagatacagtctctcgttcacccgtcctccccacgcggtaagagggcgcccactgcgatctgtgccggtggcttagatacactctcgttcacccgtcctccccacgcggtaagagggtgcccactgcgtgccagacgccgtccgaagcctttgggcctctcccatgaatgaagcagcagagccctgcctggtggaggctgcttcggtggtgggaggcaggccgtgagcgatcacacgcgtgttctgcgcagcctcgtcacgtgacaccttcccatgcccagctcagcacgacacgcgtgttctgcgcagcttcgtcatgtgacgccttcccacacccaggtcagtaccacacgcgtgttctgcgcagcctcatcacgtgacgccttcccacacccagctcagtaccacacgcgtgttctgcacagcctcgtcacgtgacgccttcccacacccagctcagcatgacatgcgtgttctgcgcagcctcgtcacgcgacaccttcccacgcccagctcagcacgacacacgtgttctgcgcagcctcgtcacgtgatgccttcccacacccagctcagtaccacacgcatgttctgcgcagcctcgtcacgtgacaccttcccacgcccagctcagtaccacacgcgtgttctgcgcagcttcgtcacgtgacgccttcccacgcccagctcagtaccacacgcgtgttctgtgcagcttcatcacgtgacgccttcccacgcccagctcagtaccacacgcgtgttctgcacagccttgtcacgtgacgccttcccacgcccagctcagtaccacacgcatgttctgtgcagccttgtcacatgatgccttcccacgcccagctcagcacgacacacgtgttctgtgcagcctcgtcacatgacgccttcccacgcccagctcagcacgacacacgtgttctgtgcagcctcgtcacatgacgccttcccacgcccagctcagcacgacacacgtgttctgtgcagcctcgtcacatgatgccttcccacgcccagctcagtaccacacacatgttctgtgcagccttgtcacgtgacaccttcccacgcccagctcagtaccacacgcatgttctgtgcagcctcgtcacatgacgccttcccacgcccagctcagcacgacacacgtgttctgtgcagcctcgtcacgtgacgccttcccacgcccagctcagcacgacacacgtgttctgtgcagcctcgtcacatgatgccttcccacgcccagctcagcacgaagaagaggctttgtgtgcaccccgcttggccacatgggacccacggcagggcgctggtgctgtgtcccggcctgctctgaggcttccctgactgcacccgtatcccatcgctgcagtgacaaatccacaaacctaacagctcagcaggacgcggatttatgagcttgcagttctagaggtcattggcccaacacgggtcccactgggctaaagtcaaggtgtgggcagggctggttccccacggaagcctccgaggagaatccatgtcctcgccttttccagctccaaagctgcctgcgttcctcctccatcttcaaaaccagccaggtcccatctgtccagcctccaaccttcatcatcacctctgcgactgaccacactggctcttcagataaactggacttgagtggggtccccatctacttcagccctagggaccccaaaatcaattaaccaccgccccaaaccccttccacccatccccgctgagacacgctgccctgctgcccaccgaggaaccagcccggctccctcccaggcctagcagcaccccagggctccaccacccctcccaggtccagcatcgccccaaggcaacagggagcccctcaaaggcaacatccctgccaggcccccgcgcagtccggagtgcccctcggtgctttcaaagggcacaggactctcctcactggagccataatgaagaacatgtcttctatatgtggtcacactcactgtcacactcaccaacagctggatgcagtggctcacgcctgtaatcccaacactttgggaggccaaggtgggcagatcgcttgagccccggagtttgagatcagcctgggaacatggtgaaaccccatctgtacaaaaaataccaaacttagctgggtgtggtggcgtgcacctgtaatcccagctactcaagattacaggctgaggtgggaggattgattaagcaagcccaggaggtcaaggatgcagtgagctgagactgcgccactgcactccagcctgggccacagagcgagacaccatctcaacaacagcaacaacaaactttccaacgggttgtctctccaaacatttggattccttctgcatgactttctggcatctagctttctgcagtgtaggtctctcttgggtccaggtttcctcgatcagctgagtttgtgatgggagccgcctgcagtgggtgggtgagctggtggcatgtccacatcagatgcccaggccagcctcggacaggctcttccctctgcggtctggcagggttggaattcattcccacacaccttcccccacgtcctgctgtgtagattggctacattcttctcctctgggatccttctcctctcagttcagttcagactttgttcttgcccctgggagcatctgggccagagaggatggcaagggggtcatgaggagctctggcagcccctcagggaggtgttacggggcccccaggcagcagagcctgccttcgagggaggggaaggctgcttccctgtggacggatatgcagaggggcttggcggtttggggcactcgctcagatgtgtgcagataccctcaaatgtcctccctcccattctcaaaatcccaatctttcccaatcagcctctgctgtggtctgaaggccagtgcccctgaaattggtctgctggaactcaacgctattgttcgtcagtctttgtgtcactataaagaaatgcctgacactgggtcatataaagaaaagaggtggctgggcgaggtggctcacatctgtaatcccagcaccttgggaagccaaggtgggtggatcatgaggtcaggagattgagaccatcctggctaacacggtgaaaccccgtctctactaaaaaaaatacaaaaaattagccgggcatggtggcaggcacctgtagtcccagctactcaggaagctgaggcaggagaatggcgtgaactcgggaggcggagcttgcagtgagctgagaccgcaccactgtactccagcctgggcaacagagcgagactgtctcaaaaaaaaaagaaaagaggtttgggccagacacagtgactcacacctgtaatcccagcactttgggaggccaaggtgggcagatcacctgaggtcaggagtttgagaccagcccggccaacatggtgaaaccccgtctctactaaaaatacaaaaactagctgggcgtggtggtgcatgcctgtaatcccagctattcaagaggctgaggcgggagaattgcttgaacccgggaggtggagtttgcagtgagctgaaatcatgccgctgcactccagactggcggagagagcaagactcgttttaaaagaaataaaaataagaagaaaagaggtttgattggtcagggttctgcaggctgtacagggaacgtgatggcatctgcttctcggggcgcctcgggaagcctctggaagcctccaatcacagtggaaggggaaggagccgtgtctcccatggtgagaggggaagcaagagggtggaggtgccacacattttcaaagatccagatcttccgtgaactcactcgtcaccaaggagacggcccacccgttcatgagggagccgccccacgaccccaacacctcccaccaggcccacctccaacactgggggctccggttcaacacgagacctgcgggggacacgcgtccaaaccaaatccgccctggaggtgacggcaggaagaggtggggtctctgggagattcggccatgggggccctgccctcgtgggggcgattagtgcctcgtaaaagggcttgagggagcctttctgtccctctgccacgtgaggacacagacaggcactgcctttgaggaacaggctttcataggccatcgaagctgctggcaccttgaccttggacttcccggcctccagaactgaggaatgaaattctgttgtttgcgaagacccggtcgtgggtgttttcctacagcagcaggaatgggcgacgacagcatctgggacagcgtcttgcctctttactaagagaccctgcaggctgttagctcccacggccactggagcactgatcaccgggcaggggaagtgacagccagcagaacaatgactgagcgttttccagaattgatgggagcatgaatcctcagattaaagaatttcatgagtcacgcgagggaggaatagaaataacccgcccgtggaagctccgcggagtcccccagacttggggagcaatgaacgtgctgcatgacaggacaccagccagagatccgaagtgacccatgctccctggaaaggagccctctgtttaaaattaccccaacaaagaacatggtatgcccagtttctaaaatgcagtgacacaacctcgatgccaaaaccaagtgggcgtacgagagagggaaagtagaacccgatctcaggaggcaaatcagaaaaccccaaatcaaacattcaacattgaaatccagccacgtgtgagacacgcagacacacctcccttgccaagttggagtttatatcctaggagccccgaaaaaggctcaacgttagaaatccttgacattaacacgttaaaagagaaaaccattgagtatctcaattcaacatatgttcatgattttttcaaaaagatgtaaagcagactttattcacggagggccaaggcggtgggacccctgccccgggtgttgcagtggggagagagactggactcggctccacaggaaaagcttttaacgaaagacgaagtggaaatgaacatgatcgcgggtgtctaggacagagctgtggcacacgtcacgtggaatgtcagcaatgcagtgaggatgccggctcaacgcctgcgtctgaccttgtccagggttctgatcctcgcgtggccagccccggcctgagccgcatctctgggtggaaccgttcgcagtctccaggagcggctccttgcatccctccaccaggtgtctctttccaggccgcctctccagcggctctcacctggccgctgttagaaggacactgtccacatcctcagaaggaactttcccagcctgagcctccacagcacacgcactcctccaactaaagattcaccggaaatttccctgagttgtgccaagaaccaaggggcactgtgtcatctggggccaccacagacgccacactcacagtcgaggacaaattcgcccaagaccaggggtcaggcaggtcccctgtcatccaggacatgtggccccgggcagggctggctgactccacgctccatagcccccaccccaggcacatttgaagactgaggggtggtcttgggtgccggtcaatttgcaccagggatcctccagcccagccaaagagtcacggctgtcccttcctgaaggccttcctcaggctgggcagggcctgccccaggcccaccgcagccaacggacacagcctcaggccggcaggtggcacgcgggagtgcaggccaggctctagccgggctggattgaacccatagtgattttcctgaggttggaggcaggcagggcgggcctcagtgtctgggtgactcagagcggagatggcccctagaggagggagctaacccatctggggtgttcaacatctgcctggaggatttgtcagaactcaatgccgaaacccccaccccaggatgactgtggggcccgtctccagctgctttgcctcttgtttgaaggaacaccatgtggcacatcgagatccaggaggggcgactcgaggccttccggacagctgaccgtgaggaggtggaggccacggggcggcggctccaggtgcgcgcagccgagcagctctgcagagagcaggaggccctggggaaggtggagcggaaccgactgctgaggatcaggtaggcgacacccaggcccacctccatcccttcccagcagcttctgccagcccctccgccctctcccccaggggtctccagattcagcctcgccctccacatctgtccagatccacctccacccctccctgcctcctcccagcttgctcctccaccgggcccttgagtccttcccaagtgtcaggcactcccctgcacctgcccagagccccagccctcccaagatgccgcagccaccatacagccgctaaagctggctactaaagccacgctccagcaagactgcccctcccctttccctccggcagccccttcctcttcccagccaggccattctctgggctccatccccacctctggctgctcctttgcacccctcccacggcccccacctgcgtggctgtggagcactcaggcccattccccacacgtcttctgtcatgagtctcctgctcagccagggcccggccacctactaggccagtccccaagtgctccacaggccatcaggccagctgtcccaacctgccgtgagcctctctcctcgggacccccttctggcctccatcccctcccccatctcattccttcccttcagctgcccaggccacaaacccctgtggaatccaggccctggctgcagacacaaggtccccagcccctgcctcctccctccccacagcactgctgtgcctgcaccgtcctcttcccagacccctgcccagctgggatcaaaccttgcctttggtggctccctggcactggagccccagtagcgtggagagtttgacatctgtgtggcccacggcatcagctctccagggaccctcgctcctccccaagggaggctgtgcgggacagagctgagcgaaagggcccacggcgtctctgggacacgagctccagccgtgcagggcttgggggcagatgggacgtgtgatgccgagtttccctctgacggccccatatccccacaggaagtccctgaacacccagaaggagctcgggctcaggcaccagaagctgctggaggacgcccggaagaaccacaaggttgccgtgcggttcctgaaggcctccctgggaaggtagggcctcccttcgacgtccttaaggagaaacccaagaatacgggtcacttgcttttgtcttgaaatgccctgattttattatttatttatttaagatggagccttgctctgtcgcccaggctggggtgccgtggcgcgatctcggctcactgctccgcctcccgggttcaagcgattctcctgcctgagcctcctgagtagctgggattacaggcacgcgccaccatgcccggctaatttttgtatttttagtagagatggggtttcaccatgttgaccaggctggtcttgaactcctgacctcaggtgatctgcccgcctcagcctcccaaagtgccgggattacaggcgtgagccactgcacccagcctcctgattttattattgaatcaccaccttatcatcaaaaaccaataagtgtgtatttttagtgctgaggtactgtttcttttcagaagaggcccttgagatgcgctgggcgtgttcccgccatgtcctcgtggcctggccctccagggcatgttcccaccatgtcgtcatggcccggcctctgcgccagcaccttttgcccatcccacctcttgtgttctcaccattaatcacattcctggtggaaatgatagcaccgaggctcctgtaattaacaccccacacggcatcgctgtgtcacttcctcggttaaaaatgtggccgtttgtggtggtgcatgcctgtgatcccagcgctttgggaggctgagacaggaggatcacttgagcctgggaggtcgaggctgcagagagctgtgatcgcaccactgcacaccagcctgggcgacagagcctcaaaaatgtttaaatgtccttcctcagaatccgagagcaagagaagaaggaggagatggagtgccacgagtacatgaggcgacgcatggatgcggtggtggcgctgaagggcagcatctccgcgaaccgggtaggcccccgcagccccacccagcctctcccttggcgccctgccggggtccgtccctggggccctgctccttgggagccaggcccgtgtcctctggcgtccagggctgacccgcacacttggtgacccctggaggcttcccgagcctgtgccacagatttgcccacgggttccgtgtgggtcagggccaggcactggagtcaggcaggagcaggcaccccagccctgctcccatggggcctggtcttgttggggaagcagtggcgtcctcatgagacacatggagggcctgggtgcctcgaggccatgccctggggccaaggctggggattcaggctgggaaaatggagggaagagtgggaacagcatctgcaaaggctcagaggtgaggagcagaggcgggcaggtgacgtgcagggacacccagccccacgcttgggatgtgcggacagtttgccagtggtctctcacaggatctgcaggcgtcaacattggtttaaggacatctgttcaacggcccagtgtgtgagcatgtgtgtgtgcacgtttgcatgtgtgtgtgcatgtgtgcatgtgtgaccgtgtgtgcacgtgtgtgcatgtgtgaccgtgtgtgtgcaggtgtgcatgtgtgtgcacgtgtgtgcaggtgtgcaagtgtctgcaggtgtgcatgtgtgagcgtgtatgtgcacgtgtgtgcaggtttgcatgtgtgtgcatgcgtgagtgtgtgcatgtgtgtgcaggcgtgcacgcgtatgtgtgcaggtgtgcatgtaagcacgtctgtgcacgtgtgtgcaggtgtgcatgtgtgtccaggtgtgcatgtgcgagcatgtgtgtgcacgtgtgagcatgtgtgtgcacacgtgtgcaggtgtgcatgtatgagtgtgtgcaggtgtgcgtgtgtgagcatgtgtgtgcacgtgtgtgcaggtgtgcatgtgtgatgtgtgcatgtgcaggtgtgcgtgtgtgtgtgcacgtgtgtgcaggtgtgcatgtgtgatgtgtgcatgtgcaggtgtgcatgtgtgtgtgcacgtgtgtgcacgtgtgcatgtatgaacctgtgtgtgcacatgtgcaggtgtgagcgtgtgcatgtgcccgtgggtgctgctgctgtcatctcagtgctctctgtttccaaggacacactgcggaagttccaagcatgggaccgtgccaaggcagagctggcggagcagagggtccaggctgagaagaaggcgattctggcccagggcagggatgcattcaggcaccttgtccaccagcgccggcgccaggagctggaggcccagaagaggtgagggtggtggcagaggtgccaccgggaggcacccgcccagtcagtgggtgcagggagagccaagggggttcggcttcacattgagcaaagctgctctctctcccagggcgcccactcaggcggctgtggggcacgggaacaggggctcctggctgctacccttgccctgcctgggcctgactcagcctgcccagccctgcccctactccagtccacgcccaaccctcggccccttctcccctcccagacgctgaaaccccggcccctgtcgagagcctccggctcctgtcctgacttctcacaaggagggactggcgggctctttcctggcccacccagaagtctccagggagcaccaggcccctccagggaacctggtgctgctgggcctgcccttgctcactccctgtccagggccgtccacctggcttcctgctgccacggccttggggccctcctggcccctcagaccacctcctgccagcttgggtccgtggtgaacacgttgcttctggcttcactctctgttcttctccaaacgggggcccatgttgccctctcggaccccccacccacgggccccactgggcttcctgagatccagacctcggggccaggttcctacaaggcccctctctcccgctcagtctcgcctttcccagccctgcccgtaacgctccccagtgacctccacgcaaaccaccctgtcctgggttttgcccgaagctgccctcatcccgggagcctggccctttctccccatcccagtctccctgtccacggccctggccaatcactgcttaggatctgcctgggcgggggctcctggccctctcactgggcaaggcatcctcctctgggtgccacagagccctgagtgcgtcctccccacccccctgagtcacgatcagagttctccaccacccatcagcctgcccacctgggcgggggggtcctggcagcagctccaccgcctatacatcccttagcctggcgcaggcctggcatgtaggaggcacccgggaagtgcagctgcagtgagtggatgaacatctttagccctggtgctactctcagtggcagccccacgccagcctagaaataagggcttggaagaagccctccgggcagccaaggctgctgggggactgggctgcgaagtgggcagggctgggccgggcagggctgggctgggcagggctgggcaggactggacttggaagggatgggctgggctgggcagggcagggctaagctgggcaaggctgggcttggcagggctggactgggaaggtctgggctgggctgggcagggcagggctgggcaaggcagggctgggcagtgcagggctgggctgggaaggcctgggctgggcagggcagggcagggctgggttgggcagggctgggcagggctgggttgggcagggcagggctgggcagggctaggctgggctgggcagggctgggcagggctgggcaggactgagcaggactgggcttggcagggatggactgggcagggcagggctggggtttaagcctggaacctctggcttggcctctgcccatctgcttcccactggagcttgcgtttagctccaggaccaggaagttcccaccccaagagccctgctgggcaggatggagtccccaggagggagctagggaggggccgccaggcgctgtctcacctggggctgctgggcaggaccggagcccccaggagggcgctagggaggggccgccgggcactgtctcatctggggcaaggtggaggcaggggacctcttgcactcatctgagaagcgactccacgcagggcctttgaggaggagcagaagctcagaaagcaggagatcatcagtcggattctgaaagaggaggctgaggaggaaaagaggaagaaacagcatccccccaccagtgccaggcaccggctgaccctgagggacaagacctggaactacatttctgacttttgcaagaagaccacagtcccaaccaacacgtacacactggtgagcaaaacgccttcctgtagacagaagccgcacacctgtggagggcaggtggggcctcagggctcaggtgtggtgagacatcctctgaggacctcagcaccatggccacctgcagggggttgctgagcccgctgagtggccgccactcagctcaaggacaaggggacaagacacactacggacccaccacatgagagaggcccatggccgcagcatccccagcaagggtccagtgtcctcctggtctcggtgtgcccaccagaccctgcgtcacccccagcagtgttgctgcccaccaggctgggaccaccttgcctggccctgtagagctgggtcagccgcctgccagggagatgtgcacagccgttcagaccacatgcctgggatcaccctgctacaaagcactcctgatagcacctagaggacagctttcctatcactcattcattcactcactcatcctttattcgttcactcactcattctttcttcattcattcactcactcattcttcattcattcactcattcattcactcattcactctttactcattcactcattcattcactcactcactgatacacttattcattcactcattcactcattcattcactcattcgctcactcattcactcattcattctttactcattcactcattcatctcactcactgattcactcattcattcattcactcacacattcacttattcactcacttactcattcactcactcactcacatccagggcctgcttggtgtccactgctgctgcaggcaactggcttcagttgggggaatgtatttctagtttacctttccctaaaggtgtggggtagggacgatggtcctctcctgagtctggcacagtgctgcagtctctgcccttgtgtaccccaaaacctgaaggtcaaggtcactgctgcaaccgatgccctgctgggaaagagaaagccttgggctgcctcagctttggcctccacagggtctctgcggtgcccttcagggcaccagagaaggtcctttcctgctacccaggctcccagtgcctgggctgagcctttgccccatccacccctcactgcccgtctcacgccggggcctttgcacccgccgatccctctgccaggagcaccctgctgcgcctccttgctccagagaagcctcccctgcccccacccccacccgtgagctgctccctgcgattttctgtggcaccacctgtggcactatacaggtcacagtaacagcaatgcgctggccccgtccagacttcctgtctgtcgctccataggacggtccccaggaagaagaaccctgtctacccggcccagttcccccttctccagcaggcctgggacagagccagagcagataggcaaggctccgtccccaaactcattctgaggaaaccaccacagccatcctcctggggtcagcctggggcttttcccgggcatggcttatatccacagaaatgagaactgcgccaggcgcggtggctcacacctgtaatcccagtactttgggaggctagggtgagtggatcatgagatcaagagttcgagaccagcctggccaacatagtgaaaccccatctctactaaaaatacaaaaaattagctgggtgtggtggcgggcgcctgcaatcccagctactcgggaggctgaggcaggagaatcatgtgaacccgggagatagaagttgcagtgagctgagatcgcgctgctacactctagcccaggtgacagtgcaagactgcgtctcaaaaaaaaaaaaaaaaatgagaacagatgagtgcctgaggatcggcgccaaggatgccagtccgtgaattagaacattttcctatcaaaggaaatattttgcagactcttctgagcattgtagaaaaatatttaataatgtattaaaatacttatatttcaagtagaaaaagttacaaaaccgtgtgcaccgctatctccatgcagagtacgtgaggcagaagaacgggggcaggcagcgggccataccggcgggggctgggccgagtttctcttccctgttctctgtcatgagcgtgtctttgcgatgttcctctccccgactgcaggactacgaggctgctgcaggccccgggccctctcggttgctggaagtcgtttccagtgagcttatccagggggaccccggggccagctcagaggaggaaacgttagctgagcccgagatctctgggctttggaatgaagactacaagccataccaggtatcagctcctgctcctttagacgcttgcagacggaccccggccctctgtcgccggctcgccacctcccacgcctgccccggccacaccagctgctctgaggcttctcctggctgtgcctgccatctcccgccaccctctcctgtgtgtggacgccccccgcctccctctccacactcatgcctttccctcttcgcggagcctggagggcaccacgcgtgctcgacgaccccaagctccccctgacagacagctcggtcaccatggtgtaacggggagggacggtggggctccaaagctgaaaggctgagggaatgactctgagctactccgtgtactattggagaagcatctttctagaagaagcgtgcaaactttctttgacggccttttgtaagaaacatgccccatctggcgctggggtccttctgcctctgaaagagcagttacagcaagacacggtctctgcagcagtgtggctcaggctgtggccctgtcccacgtgggagggcaatgcccgccgcccggtttctgtaagcattggccacctctactgtcagggcaaaagccacctggttctgctggttctggggatgccgggctgaccagggtggtgaacaagacaggccaggcagagccaccacctgcccactggggacacccaagggagaaggctgcctctggacaagaggagggtgccaagtgccccccccaccccgggaagccagggaggaggctgcccggctgccgggcatgggcaccagcagggacagcccacagcccagagccaggacccacgcagagtccaagcagcttctgaagggacagttcaggactccagttctgatcttcctggttgctggtgttggccagggaagcggcttttcatctgagaaagcccagtgtgtgctgacactgcccgctcgagaaaactgcttcctgcagaacctttcaaaaccttcctcttgtcctgatttaacaatctggaaagttccccctccacatcatttcccagaaatccacctgaatctggagctgtctgctcttgtttcctggtttcctcttttttggaagtgaggggtccctgccttgtcaatggagcagaaagtcagtcggtccccagggcctttctgagcaactcagagcaactccccgggccatggggctcttcccagctccagcgctggtggcagccggtggggctgggctgtccgtgctctgctaaccgctaccctcgcctccgagctgccaccggcgccgcccaggtggagccgctaacagccccagcctctgtctctgtgacccccaggtgcccaaggaggacgtggaccgaaagcccgtgggcgggacaaagatggacaaggacatcctggagcgcacggtggagcggctgcggagcagggtggtccacaagcaggtggtgtgggggcgtgagttccaaggacgccccttcaacagcaaaccggagctcctccacttccaggtgagcccgcagctgggccaggaacgggacgggcagcagcacaggacagcaggggagccctgccgcagcccaacccctgacaccttttgcttttttttgagatggagtctcactctgtcgcccaggctggagtgcaacggcataatctcaggtcactgcaacctccgcctcctgggttcaagcgattctcctgcctcagcctcccgagtagcagggattacaggcgcctgccaccacgcctggctaatttttgtatttttagtagagacggggtttcaccatgtaggccaggctggtctcgaactcctgacctcaggcgatctgcccgcctcagcctcccaaagtgctgggattgcaggcatgagccactgcgcctggcctgcctttcgctttttaacgctggaaaacccgggggcttcctcaggaggcacaggcccaagtgtggaccttctcttccaggaggtggagggagagggccccatccccatggagggctggacgccagtctgagcaatgggggtgccgtggccccgaaagccctgtgccacttggggcagtgggggtcccctgaacctcgggacagggatgtagcagggacagggtgggaacatgtgaggctgaggttggtgcctggacgcctctgccaaactctgcaagacagagcaggctgtgggctcctgtatttgaccccagctcaagtccatccatggagtcagggacccaccttggaacccacagtgtctgagccttttctcttactcccacctgcgggccccagcaaggccctgtcctgcctcaagtggcgaaggctcttatgtgacaggttccacccccagacctgtccttcatgcaccccaggggccttctcgattctgggagaaaccttggaaattgttccctgggaacctctccctagttggcaaatgctcaccagcggttaccttgaggcaaagctgcctcggtgctcacagcacagccccctgtgacccgctctgaagctgctacctcggcctttcccaggactttgatattggcaaagtgtacaagaaaaagatcacgttggtaaacaccacctacacgatcaactactgcaagctggtgggcgtggaggagcacctccgggacttcatccacgttgagtaagaggacggctcagacagggagggacgcggtgcagggacagcaggaggttcataggtcccttcatgttcagaacggctggaacaggctctatatgggcataagccctcaggtccgattttcacgaagattttgtagagggggctcctctgtcttcttgtgtcaaagtcgtccgagaccgagcccatttcccttcacgaatggctggaactttgcctggctgcccaagtttccttttgtttttcttcgttttgttttgctgccttttttttttttttttttttttttttgagatggagtcttgctctgtcgcccaggctggagtgcaagtgcgatggcgcggtctcagctcactgcaacctctacctcctggattcaagagattctcctgcctcagcctccccagtagctgggattacaggcacctgccactatgcctgactaatttttatatttttagtagagaccgggttttaccatgttgcccaggctggtctcgaactcctgacctcaggcggtccacctgccttggcttcccaaagtactggtattacaggcatgagccaccacaccttgtcagagtttccttttgtattgttatgttttgatgttgaccattctgataagttttccctggcaattagccagtgttttcagtgtcaaggtgaaagctgtcttcatttcagcactgcctccctgaattaaggccgtgctttcactctgtaacaatgtttccatttgcttccttgcagactccacttacctgtgttttggatcctccttgctggtctttggtgtctgatgttttccttctggttgcctttaatgctttctgctttccttttctttgttttgtttttgacagggtcttgctctgtcacccagactggagtgcagtggcacgatctcagttcactgcagcctcaatttcccaggctccagcaatcctcctgcctcaatcagcctcctgagtaactgggaccacagctgtgtgccaccaagcccggctaatttttctattttttgtagagacagggtttcactgtgtttcccaggctggtctcaaactcctgagctcaagtgatccacctgcctcagcctccccaagtgctgggattacaggtgtgagcccctgtgcctggcccattttcttcttttctcttttattttatttttcttcatttttccctctgacggccttttccatgttttctgcaatgtttctcttttcttctgctccttagtaacttacttttttttttttttttttgagatggagtttcactcttgttgcccaggctggagtatagtggcacaatctcggctccctgcaacctctgcctcctgggttcaagcgattcttctgcctcagcctcctgagtagctcggataacaggcgcctgccaccacgtccggttaattttttgtattttagtagagacggggtttcaccatgttggccaggctggtcatgaactcctgacctcaggtgatccgaggcccacctcggcctcccaaaatgctgggattacaggcgtgagccacagcacccagcctaacttactttatttttaagaaagttctttctcttctacttcctgcttcctgccagttttctctttgtggacaggtttgtaggtccaggatggctttcggattcccagttcaggagtttccactcccgcgagcgttgtgaagtgcagcttctcaaaagagggtcagcaagggcaggatcctcattccccccttgctgcccaggctccagaggggcctcctcttctcccacgaggcatcttcctgaggctgcccccaggggcgcgtgggctctgatggcccctccctgagatcagcactgactcactgggacttggtattttcttgtggaggctgtgatgttctctttggggagctgattttaggtcagtcttagggtctttgttcccgtctccttcctctcttccctgcagtttttcagaccttcgtagctctctgtgaaggcgggcatggagaatgcatgctggaggttggtgtttacttttcaccttatggttaattttaagtctggagggttctgtgtcctctagtcatgctgaaggcatgggatttctgcagcccgcctgtttctctcattgatccatgtggtttctggagggcgcgtgcagaggtgggtttaggtggtcgctgtgctctcagccaccgaggcattcctccccacgctgggatgagaacttctcatggacggttattttctctcaacaggttgaggccaccactctcctgccctctgcctcttgttgctggagtgggaggtggcctcggtccaggtgctggtttttttggaggatacctggctttccgcctgcttgctctgagattctctcatccttaatgtcccgcagctctgctgtgcgtctggtgtgggctgatttttcttagacctcactgtgctgttgaatctgaagattcagatctttgaacaattttgggaacttctcagccccagctccccaggcatcgcccctcccccattcattctccggctctgccctcctgctcctccttttgaaacctccccgtcgggttggaaatttcttgtctctttttcgcattgggtggtgctctaggtgctgctcggttcaccacttgtccccttagtgctgctaatcaacggttgaaattgctcagtaagtttcttactcagctgccctgtctctcatttctaaaaatgccaagttctgttttggatgagtctgcatttcttgacagtgtcttgttcttttctcacgtctggaattctctatttctgtctctaaccattttatctatacgtcctctaacatccccactccacgcttctgtcgtctgaagggtttggagctcggccctgcactctgctgctggtttatgtgaggcacgcacgtccaccctctcggattctgctcctctccccggcagctccatcccgggctctgtgcagtcggcaccaaagcatttccctcccaattggaggagctttgggtttgcttctgctggtgccgtgggaatgttgccagccagggacacattttacattaaaattttagcttgtgcatttctaaaccaagcacattaggtaaaatccaaccttgtgaaatcagcctggcgtcaggaattccttggggagatgctccctcaccctgatctgggccaagacagaccagctccctcaagtggcctgtgcagtaggggctatttttgtggttctttccctgaaaggggctgagagggtcccgagggtcccagctgtctcaggactcccagttccagctctcttcctggctcctgcccacagccccctggtcccatattggtatcaaagccctagagccccggtcccaggcctggcacctgtgcccaggggaactgtggccctctccgacccatggggtcccatttcctggcagttggcctggggacttgcctcacgccttcagtgattaactccctcactccacaaacgttcgcacacactggagcgccccctgcctgccaggtactggcggcagcagggaatgcagcagatccagcactccccggggtgaaggcggctgggcagggggccaggcccgggatggggaggaggccaggaggcccagcctgactgtgctctgggtggtgaggcgagcgtctgccctccgcagcactaacccccgtgtgctatgggtcacgccctgcagctttgacccccctggccccctgtcagccggaatgtcctgtgaagtgcttgtcaccttcaagccgatggtgagtcagaggggcccgttctctctcgaaggggaggtggtggtgggtggagcctgtgatcgggcatggtggcgcagaacatgatgggggaaggatgcacttggcctctcagtgaggatcacgcaggcccctgttttgctattttacttccaaaaatacactcaacatattcctgaatgctgggcagaaccgcggcgcagctcctctgggttagtggccgagggcgtgcactctcgggtctaagtcgggagggctgggatgttccaggaagctagtgtccagccctcctgagatgccctctactgactctttcccctggggtcacccgagctgggcaggtggcaggcggccctggcccaggtagccacggcacatgtaacaggctaaagttacaggagggaggggtgtggtggcttatgcctgtaatcccagcactttgggaggccaaggcaggagggtcgcttgagcccagaagttcaagaccagcctgggcaacatggcgagaccccgtctctacaaaaaatacaattagccagatatggtggcgcatgcctgtaatcccagctagtggagaggctgaggtgggaggatcgcttggaccccaggtgggggtgggtggaggggggttgcagtgaatcgagcaggtgccactgcaccccagcctggccaacagagccagaccctgtccaaaaaaaaaacaaaacacacaaaagttgcagaagtgtattgtggtgggggttgttttatgttttagataaacaaggatctagaaggaaatatctcatttttggctcagacgggcgagttttcagttccactgaaatgttcaacaaagaaatgttcggtgagttcaaaggtgtccgagccagcatttctcggggcatgctggctgggaaccccagtgggggacggcatctcctgggagggggtgcaggttggcggggggaccaggtggaagctccaatcttcaccaggggctgagccccttcttccaacagcagctcaggtgggcctgagccgaaccttaggtggggtctcgaacgtggggcactcggaccagtgctggaaaaatgagacaaaccctgctctgtgtggagcccagactgcagggcctgtggctcaggaaaacttaacattcatctgcagctcttggggggatcccgcctgattctttttaactaagaaaaatttcaagcatagaggaaaacagaacagcagaacaaggctccacgcgctgcaacccggaccccgcatcctcccagactccacattgtcggcctcggacacctttgcttggtccatcaactgctatatctgttgttgctgatccatttcaaagtacattagtaaaatgtcaacactccaccctcagaaacttcagcatgcatctccagtaaaccaggaacccacacatcattgtccccccggcccccgccgagtaattggtcagctcgcaccgcacctgccacacagcaaacggctcctggctcagccgcgagtgtgaagccctctgcggccagccccgtccaggctggactccagagtggcagctacggcagcacgagcatctcccagaggacagtggggacgtcattatctcctaagaattctcaggtcaaggcaagtctcacagcctgagcctgcgtcagcggggcaggaagaggcccattcttacactagaggaggaacaagccggggcaggcgaagggcagaggcgcgctatgtcccccaccccaggaagatcagcagacgccctcatggtcacccgtgatccaggccacgctggccccaagccacctttgatgagcacctgtgtaactttctctgtcgcgtgcttcctccttcaccgcgtgtcgccgtggagaggggttgggatgagagtcaccgatggtggcagagagagaagtgttttcctctcagtttcttcataggctcaccagtgtttgagtatttggtgtgttccagtcactttagtctcccttcctcttggcactcaagtggccccgcttgggttcatgcagggaccactgccgtcctagggcacccgagcagctccttgccctgtggctgccgccttctcctcagagcggtcacggttgggccggcactcggctgtgcgggctcttggtgagccaagactcaggcccaggacaccgagcaccagggccaggggcagcaggaagtcccccgcccccccgcagacagccaggctccggctccctcctgctcagcctgggagcccggcaggagtctggtactggcctgctccactccggatcagcatcatggagcacgtgcccggcgaggccccaggtgtcctggccagaactgccccggcctctcccgcatttggtctttgcagtgtcaagtgctcctccgtgacaggagcaccgagaccctcggctcccctgagcaggggcttgcttctcccaggggagcgtccaggctggggactgtaaaaacagtaaaaccccatctgaacaaggggagaacaggacccaggcggtgcaggcgggaaggaggcggcctcccttggctggaccccgaccgccctctgcgaaccacgtccatttgcgtcggtggcccctggtcctgcccctggagcaggagcacagagtggggagcccctgggcctccaaactcagagcccagaaaagcctcccgaggaggggccattgggcagagccgaggtatggcccgggcctgcatccttagccagcaccagagcttctgtggcctgtggcccacagcgggcatggtgaggcacccccatggagggcgtgctcccgttctggaaggatgctccctgggtccctgtatccagagtccagctgacctcacccaggaatgacaccatccatcctcaggacctccaaagccccgtgtccaggctccttgtttaggccctgcatccgggccctgcgtcctctcactgaacccttgttactccgtggcgagggggctcctgccttgatgttcttaaaaccagactcgcgtgccacaccttgtcatgagcaatacacacctgatttccgggttgaatcgtgtacctgcttgtgcagtgcacaacgcgcacaaatgctcagggcagccctgcctggagccacgtgcaggcctcacgctgggcaccctgtgggcctggcacggtggccctgagttcactccatgtcctctggcagctgtccctcgacaaggagctcattgacttcggcagctacgtggtaggagagaccacgtctcggaccatcacgctgaccaacgttgggggcttgggcacgactttcaagttcctgccagcttcagagccctgtgagatggacgactcccagtctgccctgaaattagtgagtgtgccactcagccatgggggagtgtggggacctgccccccaaatccagtcccatgtgggtgaacagaggtgacaacatgagggtatcaacagtgggcctgggagaaggagggcagtgtgggggcctcctcaaatcagcctaagcagaagagaccagcttcttctgtaggacacctgcagtcacctggcctcaggggcagcagcagcaggacactccctttctcaggcacgtagcagcaggggtgctggccagcagctccaggcccgagggccccaggagacccagcctcccccgacgcatctctgaagccccaggtgtgggggtgggaggactggacaggtgcactccatggccacagctgcacctgttccaagtgtgagcgcgtcttgtcctgtcacgggtatgggtgtcccaaggctcaggtggagagaagcctcagcctctagccagccaaggaggaaggagggttggaccaagaggaagatgtggctcacactcccaggctggggcagcacagccatgcccacccggcctggagtgagggaggctgaggggtgactctgagtctctgggtgagctgctgctgtgatcccacaaccaggatgggtgagacgagagcaggcagccgaggaggcagctgaggggccacgctggagccagggtccagcccccaacacggcctgtcctcatgggagttccggcagctgactgggaaaaggaggtgggaaacctcccaagccaggatgttgattctcctctctagagcagtctcctgacctacgaagataaaagcttgtatgacaaagccgccaccagcttctctgagcagcagctagagggcacggagtcctcccaggcggacatgcagagccggaaggagctggagaagctggacaaggagcaggaggaggagcagcccgcaggtgagccaggctgccaggccaagccagggtgggcgggcggtgagggcctcagggcagcattccagggggctgaggggcccaggggagggctggaaagtagagaattttcccaggccttcgatgttaagtgacggttaagcaagaaaatattcttatgtgccactaagtgttgtttttggagtggacgaaaatgtacattcacgttgacgctaaccgaagacttgaaggcacctccagcattggcccagcaggcccagcacgggcggagccgcacagggcggggaagaggctctgcggtgccccctggaggggccgggctgcggggggcttctgtctagctctgcagctgtggctgttgttagacgcgcaccagcggggagaggtgccgagaaacgggcgggccctgccctccccatgcctcctgccctgcagcccgccgccatcgggaatcgcttgcgtctcctccttgcttctcttgatcgttttcccacatacgcatcgagatccagaaacctccgtcctcctcctgtctgtcttcgcgtggtgcgcgttccgcacgccctgcagctcagcgcggagctgggccggttctccacagcctgtgtgagcctcacttccggtgtgagccgcacttccggtgtgagccgcacttcctgtcctcaccactgcgtggcgtttcctttcctgagagagcctcgggttctagatccgtccttctgccagtgcgcacttgggagcgttcgtggtacacactgttgcgaaggcggctgttctgcactgccccttggcctgtgtgtgagttcccacagggcacctggctggggctcatgcctgcatcacagggcatagccagcctcactggcatcagctaataccaaagtgagttctttttctgttgagacagggtctctgtcgcctaggctggagtgcagtggtgcagtcacagctcactgcagcctcgacctcccgggctcaagcaatcctcctgcctcagctcctgagtagctggaactacaggcacgcaccaccgcacctggctagtttttgtatttttttgtagacacagggtttcgccatgtttcccaggctggtgtggaactcctgaactcaggctgtctgcccacctcagcctcccaaggtgctggattacaggcatgagccacctcgcctagcccaccgagttctttttcaaagtggttgtgcaagtttacactcccaccaacagtgtacaagactgtgctgtccagcgtggctgtcactgccacatctggctatttaaacttaaattgatccaaattaaataatagtgaaaattcaggtcctcctccacaagggccacatttcacatgctccatagcgacctgtgggcaacggctgccctactggacagcccagaagcccagctctgcctggtcacagagggtcctacggggccacactgggcttgagggccttgcttcacatccgcaggagcacgaggtcacacggcccggggctgcttgtctggggggcctgcaccacggtctgctgttgagatgttgctttttggtttcccagatcaccagtgagattgcgtgtctttccctgggcccatttacaagttgtatcttctttggtgtgacatctctgtttaaggctatcccttgttcttctgtgggattgtctgtcttcttctcattcattcataggagctcttcatgcacccagattccagccctcctccctgaggaatgttgcaggtgctgcctccgagtctgtggctgggccttcctctccctttatgacgtcttttctcaaatcaaagttcttcagtccagtctttgcatatttaccagtcatttctattggaatttgttttttatgatttttaggcaatttttttctcctccagggtcataaagacataggacatcgcttttgtgttgaggtgtatgatccacctcaaattcactcctgcttgtggtggaagtcagggctgaggctcatttcccctggtgcgtgtttgtgtattccacggcacaagtggactctgctatcccattcgatccattcgttgtccgtgtcaaaaatcaattgaccatccaggcacagtggctcatgcctgtaatcccagaactttgggaggccgaggcaggaggatcacttgaggtcaagagtttgagaccagcctggccaacatggtgaaaccccatttctactaaaaatacaaaaaattagccaggcgtggtggcgggcgcctgtaatcccagctacttgggtggctgaggcaagagaattgcttgaacccgggaggcggaggttgcagtgagctgagatcgcgccattgcactccagcctggcctataagagtaaaatactgtctcaaaaaaaaaaaaaaaagcaagtcaattgaccatataagcatgagcttatatagttctcgcctcttttttctgattaattgatccatttaattattcttatgccagagccattgtcttggttatcatggactcagacaaagccttgaagccaggtagtgtaagtcacccaactttgttcttttttttccacaatatttgcattagggcctcaggatagtttaggtcctttacatttccacataaactgtagaatcagcttttttatttctaccaaaaaagcatagcatgaatctgattggcatagcattgaatctatagatcaatttggggagaactgacatcttaacagtattgaggctgggtgcagcagctcacacctgtaataccagcacttcgggaggccaaggcaggaagatcgcttgagctcaggagtttgagaccagcctgggaaacatagggagactccatctctactaaaagtttttttttaattagccaggtgtggtgatgtgcctctgtagtcccagctacttgggggacaaaggcaggaagatggcttgagcccaggaggtcaaggctgcagtgagctgtgattgcaccactgcattcagcctgggcgacagagaccctgtctcttaaaaaaaaaaaattgagtcttgtaattcataaccattatctcctcatttaactaggtctgtctttctttctttctttctttctttttctttgcttctttctctctttccctcccttccttccttccttttttctttctttcttgctcatcaatgtgttatacagttttggtctgtttatccagtctgacagtctttgactttcttagaacatttaatctatttaaatgtgttgtgatgattgatatatttggattcgtttctaccatcttattttgtgctttacattggtcttgcttttttgtttcttttcttttttttttttaattttatactctagccttttatcctcttcctttattttcttctctactcattacaatgacccctggcctttaaattggcctcagaactggaaacaccttggtcgggcccagtggctcacgcctgtaatcccagcactttgggaggccgaggcgggtggatcacctgaggtcaggagtttgagaccacccagggcaacaaggtgaaaccccatctctactgaaaatacaaaaaatgagccaggaatggtggcaggcgcctgtagtctcagctactccggaggctgagacaggagaatctcttgaagcggggaggtggaggttgcagtgagctatgcttctcgtggaattccctgcgtgctgagccaaagctgtgctcttctgagggaggctgcctgtgcgttggccgctcaccgatgctctttcagcctgaatggtattctctgcagtctgcatgaggcggtttgcatcacacaggctggcctcaaactcctgacctcaagtgatccactcatctcagcctcccaaagtgctaagattacaggcgtgagccactgcacctggccatcaagcagattttctatactgtaggaactaaccattggaacacttcactaaaatgtgaatatcccagaactaactatggatcaatgcaattccaaccaaaattccaggaagattttttaatggaaattgacaaggtgattataacgtttatatggaaaaccagaggacctagagtgaccaaaacaattttgaaaaaacaaatttcaaggacttacactacctgatttcaagattactatgaagtacagtaacaagacagtgtggtggtgaacagagatagagacccaacggaacaagagaatccaaaaatagacacacaattatagtcaactggttttgaacagaggtgcaaaagtaattgcttggagaaagaacagtcttttcaacaagtgaggccataacaattggataaacataagccccctgatatagtctggctctgtgtccccacccaggttttgtctcaaattgtaatccccacgtgtggagagaggaaagtgattgaattatgggagaggttttccccatgctgttctcataatagtgagtgaattctcatgagatctgatgatgttataaacatgctctcacctctctctctcctgccgctgtgtgagacgtgcctgcttccccttccaaccatgactgtaagtttcctgaggccttgtcagccaggtggaactgtgagtcaattaaacctctttcctttataaattacccagtctcgggcagttctttatagcagggtgaaacagactaatacacccccctccagtttaactttaattcgttcctcacactgtaaacaaaagttactcaaaatagatgatgtacctaaaagttaagcctaaaaatataaaattcccccccgaaaaaaacacaggagagaatgtgtggccctaggtgaggcaaaggtttttcttagacataacattgaaactatggcccctggtttaaaaattgtaaactggacttcgccaaaaccaagaacatctgctttttgaaagacgctgttaagagactgcagagataagccacagactggcggaaagcattagcaaatcacaaatccgataaaaaatttgtgtccaaaatatgtaattttcaaatctcaattggaaaataacccagtcaaaaaatgggcaaaagcctaggcgcggtggctcacacctgtaatcccagcactttgggcggccgaggtgagcagatcacctgaggtcaggagtttgagaccagcctggccaacatggcaaaaccccgtctctactaaaaatacaaaacttagctgggcatggcggcagacacctgtaatcccagctactcgggaggctgaggcaggagaatcacttgaacctgggaggcggagtttgcagtgagctgagactgcaccattgcactccagcctgggcaatgagagtgaatgaaactccatctcaaaaaaaaaaaaaaaatgggcaaaagactgaacagatgcttcaccagagaagatacgtacgtggatgagaaattcgcacatgaaaagacgctcaacatcattaaacatgagatgaagaaaatgtaaattaaaaccacaatgggacaccactacacacctataagaacagctaaattataaacaaagaacaacaagtttaacaatagcaagtgccggtgaggagcagctggaattctaatgctgcccctggggatgcagaatggcatggccaccagcgaaacactcagcagcaaagccagacacccaccaaggccactcctaggtatccaccaagagaagcgaaaacttaaattcccgcaaaaacctgtatgtgaatgtttgtagagagcttatttgcaattggcaaaaaccaacaactctaatgtcccacgcgtggggagtggatagagaaaccgtggggtccctgccacacagcactgccgagcagcaaacagacatgaacctttgatagaggcagtgccgtggaccagtctcaaatgcatcatgctaagggaaagaactcagacgcaaaagactgtaagctctgtgactccatttttgtgacattctagaaaaagaatattttggctaaaaaaaggcaaaactgtagagacaaaatagatcactggttgctggggcaggggaaagggttgactagaaaggggcatgggcgacgtgggcacggtggggccattcagtgtcttgattgctgtgatgagtgtacaaccacatgaatctgtcaaaacttacagaaagttccactaagaagagtccattttactatatgcaacttattccttaaaaaaataaaaaataaaaaaaaaatcactcacacagaaacaacagaaagtactgcggttggccgggcacagtggcttacacttgtaatcccagcactttgggaggccaagcggatcacttgaggtcaggagttcaagaccagcctgggcaacatggcaaaaccccatctctactaaaaatacaaaaaatttgccagacatcgtggcacgcacctgtaatctcagctacttgagaggctgaggcacttgaatcacttgaacccgggaggcagaggttgtggtgagccgagatcatgccattgcactccagcctgggtgaaggagcaagactctgtcgaaagaaggaaaggagggagggaggggaaggaagggagggagggagggagggaagggaagaaaggaaaggaaggaaggaaaggagggagggaggaaggagggaaaggaaaggaaggaaggaaggaaaggagggaaggaaggagggagggagagaaggaaggaaggggaaggggaaggaagggaatgaaggaaaggagggagggaaggaggaaggaagggagtaagggagggaaaggaagggaggaaagaggaaggaaggaaagggaaggaaggaagggaaggagggagggaaggaaggaaggaattgcagcaatcttgcatggttcagacatgggtattatcaggcatcaaatatcaaataaggatgcttaatacattgaaaagtactacatggtgagaccccatatctacaaagaagaaaatttagccaggcgtggtgacatgcatctgtagtcccagctactcaggatgctgagccgggaggatcgcttgagcctgggaagttgaggctgcagtgagctgtgatcacaccactgcactgcagcctgggtgacagagtgagaccctgccaaaaaaaaaaaaaacaagaagaaaggaaagaaaagactagaataaggaggccaggccatggtagctcatgcctataatcccaatactttagagggccaacgcaggaggatcgcttaagcagatgtttgcgatcagcctgggcaatataacaagaccatgtctctaccaatatacacataaatatatatatatatatttatatatgccaagcatggctgcatgcatctgtggtcacttgaaaccaggaggccgaggctgcagggtgcagtgatcgcaccactgcactccagcctgggcaacagagtgagacctcgtctctaaaaaccaaaaagctgctggccccagaatctgaccacctgcgctcaggtccaggttcttgttgccgtggtgactcctgaggcagccgcaccccttccactttcagaaccggggacccttggccgggcacagtggctcacgcctgtaatcccagcactttgggaggccaaggtgggcagatcacaaggtcaggagttcgagaccagtctggccgatatggtgaaaccccgtctctactaaaaatacaaaaattagccaggcatgatggcaggtgcgtgtaatcccagctactcggaaggctgaggcaggagaattacttgaacccgggaggcagaagttgcagtgagtcaagatcacaccattgtactccagcctggatgacagaccgagactccgtctaaaagaaaaaaaaaagaacaggggtccctgcggcctttacaactccagaccccagaaatgatgtgcatggtgcttcaaagtcgccacctggctcctgaagagctctgccgtccagacgctgagcccggggcaggctctggcaagcccgtgggggctctccacagtgacctggcctggctggtggcccagctgctctgacccgaccgggcagcacgacagaggccaaaggagaatgccaacctgcgcgtggcctctcgaattgcctctgttcaggtgcaaagtcaacaaaaagtcctgctcagacttgcaaggaaacagctctgctacccggggccttgctgctgaccagctgccggctggtgcccccagaacccagtggcagatggaaaccaggagcctgccacagggaagtgatgactcaaacacgccagtagcaggtacccgtagggaacagtacgctacagctatgggaagttaggttaccagatatgatggtaagagaagaaacatccccaaaagatgacactgttttagaattttctggacttagctgtccttcccactccagcctctaataccctcgccctgggccaacaggtcgtgagaaaatgggggtctttgggaaagggcttccaaagccctccgggcacggtggggactggctgcaccctctctgggcctgggtgccccaaggggccacacggatggctccactatgttcagaaagaacagagcccaggatatgggtttggaggtggtgaccacgtcccaagggggcctgggccacactgcctccaccctgccaaccctcacctctggatcccccttctcttccagaaccagagagattaaccacagtgatacctcccagcgaagagcagacggagatcacgctgggggaggtcagccagctcaggccctaaaatagctgccacgatccaagacaccgcccaccttcccccagccccagctgcaccccaacccactggccctcactgctaggtggcccttgcgtttgaccagagacaggccagactttgtccaccagggacttgcagcctccaggcctcttgtaatctcagctggcatggggccaccgcctccggctgtgcaggacgcaagccacagattgtttcccgggtgtggggcactgggtgaaacttggggtggatgctggccgcggcctccctggctgggacacggccatgagctcatgagcagggggaggatgtggaggagttcaggctgcctccaactccgctggctgggatcccacgacagtaagtcctccaagggctgggccaggcccaggacatctgtggccaagtggccacccagggacacgggtcctgccaccttccatccttgcagcaacatgccattgtgagggttgggaagggatcttaaaagccatgaagcctggcagaccccatggcatctcttcctgtgcaggtaacagaaggggaaattggccccttcagctccatcaaggtgcccatcgtcttcactccggtcgtcccaggcgacgtccaagccaggttcaaagtcacgtttaagaacccccagtgccccacggtgagtattcctgctgccacgccacgcacacaccctggcccctgcctccacagcctcatgtggcagctgcccttggccacaaggtcgccatttgcccacgcagggatggccagttggtggcacggatggttggcaccacagtttacaacacacgcacgcacacgagtgtgcacacacgcacactggcatacacaggcaggcatgctgtgagcacatacacgcatgcccatgcaaaaacatgcatgtatacacatgcacacatgcacacacgcagagcccacacacacgtacacacgcacacacgcagtcccgcacacatgcacacatgcagagccccccccacacgcacaaacgcacatacacagagcccccacacacacgtgcacacatgcagagtcctcacacacatgcacacacatgcacacacgcagagcccacacacacacgtgcacacacgcagagcctttgttcttttttttttttttttttgagttagggtctcgttctgtcacccaggatggaatgcagtggcaggaccacagctcacttcagcctctaacccctgggctcaagtgatcctcctgcctcaacctctcgagtagctgggattacaggtgcgtgccaccacacctggctaacttttgtatttttcgtagagatggggtttcactgtgttggccaggctggtctcgaactcctgacctcaagtgatccgcccgcctcggcctcccaaagtgctgggattacaggagtgagccaccgtgccca

SEQ ID NO: 245 - DNA, 2130 bp, Homo sapiens
gatgctgataaattgaagaagaaaacagctgaggacagaacgcaggcatttcacctgcggcagaacctgagcgccctggataagatgcatgaggagcaagagcttttcactgagaagatgagaggggagctgcgcgcctgtcggcagaggcgggacctgatcgacaagcagcaggaggctgtggcagccgagatcgccacagaggaagaggcgggcaacatggccgctgtgggccgcctccaggccgtgtccagacgcctgtttgcagagctggagaacgagagagacctgcagtcgaggactgaggccgtgctgaaggagagcgagaacaccatgtggcacatcgagatccaggaggggcgactcgaggccttccggacagctgaccgtgaggaggtggaggccacggggcggcggctccaggtgcgcgcagccgagcagctctgcagagagcaggaggccctggggaaggtggagcggaaccgactgctgaggatcaggaagtccctgaacacccagaaggagctcgggctcaggcaccagaagctgctggaggacgcccggaagaaccacaaggttgccgtgcggttcctgaaggcctccctgggaagaatccgagagcaagagaagaaggaggagatggagtgccacgagtacatgaggcgacgcatggatgcggtggtggcgctgaagggcagcatctccgcgaaccgggacacactgcggaagttccaagcatgggaccgtgccaaggcagagctggcggagcagagggtccaggctgagaagaaggcgattctggcccagggcagggatgcattcaggcaccttgtccaccagcgccggcgccaggagctggaggcccagaagagggcctttgaggaggagcagaagctcagaaagcaggagatcatcagtcggattctgaaagaggaggctgaggaggaaaagaggaagaaacagcatccccccaccagtgccaggcaccggctgaccctgagggacaagacctggaactacatttctgacttttgcaagaagaccacagtcccaaccaacacgtacacactggactacgaggctgctgcaggccccgggccctctcggttgctggaagtcgtttccagtgagcttatccagggggaccccggggccagctcagaggaggaaacgttagctgagcccgagatctctgggctttggaatgaagactacaagccataccaggtgcccaaggaggacgtggaccgaaagcccgtgggcgggacaaagatggacaaggacatcctggagcgcacggtggagcggctgcggagcagggtggtccacaagcaggtggtgtgggggcgtgagttccaaggacgccccttcaacagcaaaccggagctcctccacttccaggactttgatattggcaaagtgtacaagaaaaagatcacgttggtaaacaccacctacacgatcaactactgcaagctggtgggcgtggaggagcacctccgggacttcatccacgttgactttgacccccctggccccctgtcagccggaatgtcctgtgaagtgcttgtcaccttcaagccgatgataaacaaggatctagaaggaaatatctcatttttggctcagacgggcgagttttcagttccactgaaatgttcaacaaagaaatgttcgctgtccctcgacaaggagctcattgacttcggcagctacgtggtaggagagaccacgtctcggaccatcacgctgaccaacgttgggggcttgggcacgactttcaagttcctgccagcttcagagccctgtgagatggacgactcccagtctgccctgaaattaagcagtctcctgacctacgaagataaaagcttgtatgacaaagccgccaccagcttctctgagcagcagctagagggcacggagtcctcccaggcggacatgcagagccggaaggagctggagaagctggacaaggagcaggaggaggagcagcccgcaggtgagccaggctgccaggccaagccagggtgggcgggcggtgagggcctcagggcagcattccagggggctgaggggcccaggggagggctggaaagtagagaattttcccaggccttcgatgttaag

SEQ ID NO: 246 - protein, 678 aa, Homo sapiens
MHEEQELFTEKMRGELRACRQRRDLIDKQQEAVAAEIATEEEAGNMAAVGRLQAVSRRLFAELENERDLQSRTEAVLKESENTMWHIEIQEGRLEAFRTADREEVEATGRRLQVRAAEQLCREQEALGKVERNRLLRIRKSLNTQKELGLRHQKLLEDARKNHKVAVRFLKASLGRIREQEKKEEMECHEYMRRRMDAVVKGSISANRDTLRKFQAWDRAKAELAEQRVQAEKKAILAQGRDAFRHLVHQRRRQELEAQKRAFEEEQKLRKQEIISRILKEEAEEEKRKKQHPPTSARHRLTLRDKTWNYISDFCKKTTVPTNTYTLDYEAAAGPGPSRLLEVVSSELIQGDPGASSEEETLAEPEISGLWNEDYKPYQVPKEDVDRKPVGGTKMDKDIRTVERLRSRVVHKQVVWGREFQGRPFNSKPELLHFQDFDIGKVYKKKITLVNTTYTINYCKLVGVEEHLRDFIHVDFDPPGPLSAGMSCEVLVTFKPMINKDLEGNISFLAQTGEFSVPLKCSTKKCSLSLDKELIDFGSYVVGETTSRTITLTNVGGLGTTFKFLPASEPCEMDDSQSALKLSSLLTYEDKSLYDKAATSFSEQQLEGTESSQADMQSRKELEKLDKEQEEEQPAGEPGCQAKPGWAGGEGLRAAFQGAEGPRGGLESREFSQAFDVK

SEQ ID NO: 247 - DNA, 81149 bp, Mus musculus
  misc_feature (1)...(81149): n = A, C, G or T/U
ggagcgctgaaagaaccgggcatgtagcgtcaaatgtgagaggctcaggtataacagatgagttagctgtatgtgagaaaaatccaaggctcaaggtaaaaacagagttaaatgatgggattaaggaggaaaaagaaaatccataaaatttagcaatgggaagtccagactaaggaagggaaccttggactaaaaaaagcactttggaaactcacagagctataaagtgagattccgcacagagtatcactgacataattgcattcactttatatttaagcagatagaaataatttagaaaagaaagatgctcctgataggtcctcagaccaactgtcaatcaaaatcaaggcggagagagttttggtgaagcctcttgttcacaggttggtccagtgaagtaagtgtagaacaaccctgctttgagggagggactggggacgggtggggaagggaggctcgggaagatgacttttcagggaaggacacacagggatggtatagaggacacaaacaggaaggatgcgtcagtttggtttttttttgtttttttgtttttttttttctttttcgagacagggtttctctgtatagccctgaccgtcctggaactcactttgtagaccaggctggcttcgaactcagaaatctgcctgcctcagcctccccagagctgggattaaaggcgtgcgtcaccacgccctgcgagaaaccctgtcttggaaaaaaaccaaagagttttgattctacttgagtaaatgggtgttgagatgagatggctgaccgtggggtgcatgaggtgtttcgtggtagcgaggggggcctggggatgggtgggtgggtgccagagagttgatcccgttgagagaccgccgagttgagagcacccgggcgggagccctgtggcctggtagggccaaagagttggcgggttgagagaagcaggagtgcagagagttggcgggttcattttgaacatttcacgcaacaatctgtgactgccctgagaagaggacgttgtccaactcggccttctgggctcattctattgttttattcatttctgatttttcttttcctgatgtctagtattcctggtaactcacgtaaaaagagcaagacgtgagtacgagagccaggagaaggtcagactggagaaaagcacgtgaccctgattttgctcacagtccatccacacaggtggtgttgcttgtgtttttgttggccttatctgttgaattagtttgctacataaccaaggttggcctgaattcccgtttcttcaccaccctgagtggtaaaatgacaggaatgcactactgcctcccgagtgctgggattaaaggttccttatatggtggtggtaggctcttaattcttctctctctgcttcctcatcatagtgtagtccatcctacgcccctctcatggcagaattcatctcccctgtgtttcttgcctgggaatcctaaaaatcgtgcctctgtctctctgccctgtcatccatggtggcaactttatttcccaatcagagccaactgggggcaaagacttcctttagcctacttgcaggaccctgcaaacaggttttttgggtaacataattagcatgagaacacaagctgctacatgaatgagaatgcccccccccccccatacttcaatgcttaatcaccagggagtagacactgcttgagaagggttaggaggtatggccttgttggagctcattgggagtgagctttgaggtttcagaaacccaggctaggtccagtccctctccttgcctgctgcctgcagatgaggatggaaagctcttagctactgctccagtggcatgccttgcctccatgaacatcatgaactaattctctaaaactataaggaagcccccaattgattgctttctcttataagagttgccttgggggctggagagatggctcagtggttaagaacaccgactgctcttccgagggtcctgagttcaaatcccagcaaccacatggtggctcacaaccttccataataagatctgacgccctcttctggtgcatctgaagacagcacttagacataataataaataaatctttaaaaaaaaaaaagagttgccttggtcatgtgtctcttcacagaaatagagcagtaactgagaaggctaggctgactccattgacaggcttcaaattggcagttcaggaggtgaggcctaaatgtctatttccaagaactgggcaagtccaggcaaatccaggcctcagaagctgcctgctacctggcctgaggcaaggatagtggatccgcagcagtttccagcctctacaccctggtaatggaatgtccctagaaattgagcaaggtaaatgtcacctaccctaaaatcccctaatgtgctttaaatcaggcctgcgagctcacttggttgtctctcatcttggtaatgggaggttccagcatgctgggcgtctgcagaataaaacactctttgcatttatatactgtttgagtccagagtatcattctttggcaaatcttggacccttacaaactaagaaattgaaactattctagggggaggggagaaaggataaggaattttcagaggggaagctaggaagggggtaacatttgaaatgcaaataaagaaaatacctaataaaagaaaatattctaaactttagatcatagtaatagccaccctcctctgtgaattcactaaagaccagtgattatgactaagctacagtaaaaatgtgattgcatcttcaaagagcagagaataagcatgcagtggggtcctgggaggagataagacaatggcagagaactctagagggtgaggggaaatcaccagactccttgtctgaacaaggagtcatcttgtcgctgtcatctgctctgcggctggaccactgatgccaccccagcctggaggccgtgttgtcctagcccccagactgctgagaataagctgccatatcttaattggtgactggagacattgaggagtctctggtgacctaactgcaagatggaaaccagcctagcaagacagattctgtgaagaagaaaggagagggccacctacaactgtcaaatgggactctccagactcaggctaaaagtaacaaaaccatactcctaatggccaagagtatagatagacaaaatgtgttgcctctcccttcactcccattctgctgtgggatacatacatatatgtgtgtacacaaactctgatacaatagaacttaatgtagatagactgaaaattctgggtacaaccttcctattagacattaagttctaaacgcatggttctgagacctcatagactttctttcttttctttttaagatnnnnnnnnnnnnnnnnnnnnnnnnnnnnnnnnnnnnnnnnnnnnnnnnnnnnnnnnnnnnnnnnnnnnnctacagtgtacttacataaaaaaaaaaaaaaaaaaaaaaaaaaggatttatttatcatatgtaagtacactgtagttgtcttcagacacagcagaagaggtcattggaccccattacagatggttgtgagccaccatgtggctgctgagaattgaactcaggacctctggaagagcagccagtgctcttaactgctgagccatctctccagcccacttcatgaaatcctgtttccaaaatgcaaatagacataaaacataaaagttttaaaaatctaaaacaaaactaaacaaaaccaaaaccctacacatttcaggcagccttaaaggcagactataaagtaggaaagatgtagagatgcttgaagaacagattttatatatatatatatatacacacacacacacacacacacaaaacaaaaaccaaccaaccaacaaaagcagttccctgtcttgtgtgtgaacagtgcacggtgcataaaagccagcacagagatacctgtatgaggagcagctctgtcttagtcagggtttctattcctgcacaaacgtcaggaccaagaagcagttggggaggaaagggtttattcggcttgcacttccatgctgctgttcatcaccaaggaagtcaggactggaactcaaacaggtcaggaagcaggagctgatgcagaggccatggagggatgttctttactggcttgcttcccctggcttgctcagcctgctctcttatagaaccaagactaccagcccagagatggtcccgcccacaagggaccctccccccttgatcactaattgagaaaatgccttacagctggatctcatggaggcatttcctcaactgaagctcctttctctgtgataactctagcctgtgtcaagttgacaccccaaaccagccagtacaagctcacaaggagaaatcctcctctctctaaacctgtgagtctaggtgagctaggaagccaatggcaggtctaagagggaatcagaaataggatctactttagattttatgaagatcattcacagctgccgcagagttcgttggtgaggagaaacatggaagaaaggaggtgaaacaaacccgaaacaattggtgctcgggcaaaggctggcctacttgctttcttggctcctgtttcacataagcaaagcagcaatgtccaatttgccttcatagtcctaggtccataacaaaccctagcatctaaaattctgaagatctgaagagaaaattcccgtcctttacctagggacttaatcaagtctgtggagaaagttatttattgaagggattaccaccttaaatgaagccacaaggagtcaacaagataactgacttggtctcagtgtttaaaagtcaatagcatggaggagagaggcccagaagctgtgtggatatagctgtgtaacactttcccgtgtaacactctccagctaagtatctctcttactcctttttcttttgtttgattgaaacagggtctcactatgtagcctaggttagtttagattttattttcctgactctggttcccgaccctgcagctcaggttcctaagtacccacactactgaggatctctcctcaaaagattttacaacatagaagcaaaatcaagataaataagctttcctttgaaagaaagctgggtgttgtggcaccctcctctaagccagcactcaggaaggagaaaaagaccccaaactccaggccaaataaagaacacaggacaggggtggcgctgttacaatggtgtttgcttgcaaccctggcacttgagaggtggaggcaggaagattaggagttaaagaccatcctcagctacacagcaacaagttcaaggccagcccggggtacaggagactgtctcacgatagaaagcaaacaaaacacaagcaaagcagatgagcatacagaatgaaatgagaagcataacaccagttatttatttttaaagatttatttatgatttatatgtaagtacactgcagctgtcttcagacacaccagtagggggtgtcagatctcattacagatggttgtgagccaccacatggttgctggaatttgaactcaggaccttcataagaacagtcagtgctcttaacccctgagccatctctccagccccataacaccatttattatgcctggcgtggtggcctcccctttaatcccagcactcgggaggcagaggcaggcggatttcttagttcgaggtcagcctggtctacaaactgagttccaggacagccagggctatacagagaaaccctgtctcaaaaaaaaaaaaaacaaaaaacaaaacaaaacaaaaacaaaaaacaaacaaacaaaacccaacaacaacccatccccccaaaaacaaaaaacccaccatttattaccctgaatatgaaatctatagtataagtctaaaaaatttccataatatcttcctagaaaagttacaaaatttaaattacaaaattaaaacaactaaatgaacaggtagccaatgttcatggataagaaggcttaacatggttagctcttctccagattcggtaaaatcctaagcaaacaagagaattattctgtggatactaaccaactgatttcatttttttttttccctgagacagagattttctttgtagccctggccttgctctgtagaccaggctggcttagaactcagagagatctgcctgcctctttctcccaagtgctggaattaaaggtgtgtacaccatcatttccaagctgatttcaaatatatctgaaggaggaaaaacctgtaataactagcatagaatcaagaacaaacttgagccaacggcgatggcacccacctttgatcacagcacttagagggcagaggcaggtacatctttatgctagaggccagcttggtctacacagtgagttcctggtcagctaaggctacacagagaggctctgtctcagcaaacaacaggaaagaacagacataaaggactggtactacttgactttgagacttgactgctttgtcaagctacagtgatcatgataatgtggtcctggagaaagaaatcaattaacggaaagcacagaaatagacccatctaaatatactccactgatcaggacaaaggaacaaaggggaaactgtggaggaaaaatatcttcagcaaaggcactgaccacttagagttcacagtggttttcctgcctcatcctcatctccagatgttgggattacaggcatgtgtcatgcctgcttctgctttactctaaagtagcttgaataattaccatagaattgtatttccttcatcactctctcacacacacacacacacacacacacacacacacacactttgtgtacaatgttttatctcccaagtccaggagcacgctccttagcctgttactgtatatgtaaagtttagcattataaatgctataacataccaggcgctcaatacaagtttaaaagcattttttattacatttgctgggtctggttgcctttaatcctagcactgggaggcagaagcaggtagatctttgtgcgttcaagggtagcctggtctacatagtgatttccaggattgtcagggctatgtagagagaacctgcctctaaaaaacaaaaataaaaacaaaaccatttttataacatttatttatattgtgggtgtgagagagagagggagggggagggagagggagaggacttgtatatgtatacatgcaggagatttccacagtacacatgcagggtcagaggaccacttgctgggatcagttctcccttccaccatatgggccttggggactgaactcagtttgttaggctctgtgccaatgccttcattcttgctgagccatttcaccaataaacatttgttaaaagaactccagggctggagggctggagagatgctttagcagttaagagcactggctgctcttctagaggaccacggttcaatttccagaactcacatgggggctcaccactgtaactccagctccagaggctccaataccctcagacgtacgtgcaagcaacactgatgcacttagagtatagattaaaacaaaacaaaacaaaacaaaacccgatggcttctactcactctgcccggctgattctgccctctcccttctgcttcctgctttgtggttgctactggctcaccaaggaagcttttagacaggggctgactgatctttcacctccagttctcacctctgtcccaaacttaagtacacattcaaactgaacgacaaattgtggttaagaaactggttatgcagtatttactgtaagctgatattagtggggaggaagtgagagtgcagtttacctgagcgatcagaaatgttaagaaaagtgacccatacgtttataatcttgtcagtttctcttaagcttcaggaagtgagaaggggccaaggtcctcctccccgggagctttcctgaaagcgttagaggaagggttccttgacattttacctcaggcccaggagtaatggaggttgcatagcgtgcacgctctatcttttttacccccttaatgaggttcatcaacctcaaagaaataaggattcaggaagctaaaaaaaaaaataagaatgcaggcactggcaggagacctatgcaggatgttgggcagtgaggacacacaagggacaaccgagttctgagagattaaactggggctgttagcagtttatggatgtcatgagcattttcaggatcggccagagaaaataaggacccataagttttcggccagaagtaggtgaaaaaaaggcctttgtgtagaccatgaaggcatcacttattactgtttgacaagtctgtaaatactgtgaaaaggttcctcctgagacagtcatggaaactgacggcaactgttcaaatcagcagttaatttccccgtcactcacgctgcatttatttaaaacattacttttggacagaaaggttatatggttacttcgtacatttggctccgatatcttagcaaacgttttaaaagcagagtcacacagggctggggaaatggctcagtgggcaggagcagagagcacttgctgctcttgcagagggcctgagttcagattccagtgtctatacttgctggctcacaacaacatctaagaacaatttcagggaatctgttgtcctcttctggcctccatgaggaggggaggggaggggagggaacaaaagttattttgggctttagagagatggtcagtggctaagagtacttgttttgcgagaggacatggatttgttccctagcaaggcagctcaccaccggccataactccaggtccacggaatccactgttctcttctggcttccacaggcatctgacatatatgtgatatacacatgcatatggaggcaaacagcagtacacacacaataataaggaaactactttacaatgtactttgcttcagtttctgagataggtatgcatgtagcccatattggcctgagtttactatgccgttagttggggatctgatccttttgtggctccctctaaaatgccgagagcacagggctgtatcaccatgtctgacggtaaattattttaagtgtttccttactttttgtttgtttgttttgttttgttttgagacagaggttttttttttttttttttttgtagccttgactgtcctggaactcactctgtagactaggttagcccggaattcagagatttgcctgcagatctgcctccagtgtgctgagaaattattttaactttaacagttacaatgtgattctgcaaatcttgaaaatggcaaatcaagaatagaggaaccttgtagtcaaatttaccaaataagacaacagagagcttcccaggcaaagcggcctgagtagaatctcaaggctggtgagtgggtgactgccagtcctatcgtttcccccattgtatgccactccccaggaagacaggccagttcactgcagcacctgctttctgctaggatatttatttatttattttggtttttggagacagggtttctctgtttagccctggctgtcctggatctcactctgtagatcaggctggcctcgaactcagaaatctgcctgcctctgcctcccaagtgctgggattaagggcgtgagccaccactgtctggctggatatttaatttttgccatgcagacataacatagatgtgtttttatttaatagatcattaattctgctcccggacattgttcccctctgcacaagcaaatgctttctaaaagagaaaaaaatagaaaaatgcattttaaaaagatcattagagccttgcagcagtggcacacacccttaatcccagcacttaggaggcagagacaggcggatttctgagtttgaggccagcctggtctagagtgagttccaggacagccagggctatacagagaaaccctgtctcaaaaaccgaaaaaattaaaaaaaaatcattagactaactgacactgttatgaatgtcccaattagataatctagagaggaaaccccttttccttttgttttcttacttagcgttcagtttcattccaacactttccatgttgtacccttatttgctcagtcacaccaccactccctcatcccctgccctggatgtagacatactcattcccaggtgagggagatgaagtgactttctttcttatgctcatcacctttctttttcccatttcccttctatttttatgttgtgtgtgtgtttttaaaactagattacacacattagagaaaatatgcaaaatttgtctctctgggtctagcttcagggaatactctatatattaacaatttacttctaaaaactaaaaacaatgaggacagatgcagtggtacacacctttctttaattccagcactgggggaaagggagttgggcaaatgcaggaagatttgagttcgaggccaggctggtttacaggacagccaggacaatattggaagactatgactcaaaaaacaaacgaaccaaccaaccaaccaaaaaaagaaaaatgtatttacaaacagcgttagattttgatgtgttcccctcaccgagtcctaaagaagtgggtttggagtaaaagaggagtaacaacagaccattgcagtttcctgaaaggcaactgttagctgcggaaagtaactgctaatgtccctcttaggggatcagaaaactcctttttcttgctgagctaatatgatcatgtgttatctttacattctaatctcacaaaagatctaagactttaaggcatgctcttgtctaaagcttgaactgtgttgtaacccattcccccaaattccttatcttttgagataaaaatcaaggtacatgcttggcgaagtttcatagcgctgactctgaaatacagaactctaactgcattttcaaacatttacaaacaccgctagtggctttttcctggtgtcgtttaaagaataattaaagtgaaaacctttagcactcaagctcaatttaaagcctccaaacggtgggtgatttttatcttcacgatcggaagtgatccaagttccagctctgcagaaaactctcttttaaagtacgaacttttacgaccttagttaaaataaggcaacttttcaccatttctgcctttgctgatcggactctcgacaaattttctccgagacgagcaacccagaactcgtttttcagaacctgcagaagggacccaagccacctcaaggtaaaaagagagagcggtacaaacaaggcaaagtctttgagcgaacggcagcgctacctcggtccgggcagattcggggctcccgagcgacggtcgggagatcctcccttctcagcgagctctccatcagccgcgccgaaaagacctctgacctccaaatgaaggtccgctcggtgaccccaccccgacggcttctgtccgcgtctttgattggtttgttccgggatctctcagtttagcgcgcccaatgggagctcggcctggacctaggcaccccgccccgcgcccccgctccggggagcggcggagagtaaatacaacaggagcgcaaaatggcggaaccgccgaacccagctcgcggcgccgtggctctcctctctgagaaggaagcatctggcaaagtacagccttcctcgcgggagccgccgggctctatgtctgccaagaaggttcgcaccgaggagaagaaggcgccgcggagagtgaacggggaggggggcagcggcgggaacggcgggcagctgcagccccagagcttcggcagcccggcggcgtggagcttcgcggctcggcccgccgcctcctcctcgtccacctctcggagctgttactctttctccgccagcccgagcgtctcctcagcctccgcttcctcgtctcagccgctgccgcgcaaactgctggtcactccctcgctgctgcacgctcagcctcaccgcgtcctgctcccgcccgtcgctccgccggccgccgccaagccgcgcagacccaaggagaagcgcgagaaggagaagcggaggcagcacggcctcggcgccgccgcccgggatgagaacggcgaggcgaagccgctgccgcgaggtgggtgccgcgcgggggaggggagcgccggcggccggcggggctgcagccttccgcggggccagaagtaaatggagcctggagtttcggtcgccgaccggggggatggctgaaactcctggttttcggtgtcggtttcgccttccagttaacgcgcagcaggacgcgcgtgaaggagtgggtctagaggaccccgctccccggtgtgtttttggctggggaggcagaagagaacaggtcttttaaagattacgaaagggatcggactggatcgcaggaaattcatgtttgcgacgcagcttccaacgccagaatatcctgtccaaaaaaaaaaaaaaaaaaagtgggtggtcgggtgtattggcggaagctggaagctcccagggaccacggggaccaggatgtttcatccctactagggagatgaggtcgtgcgcagggcaccaagtgtgcggtttctgaggtgcccacattccatattgttaaagtgttttgcgtggtcctgttttaaatactacccttcagaagctttcagccatattcttttttttttttttcttctttctttctcgttcagcaaatgataaaatcggatgttttgacgtcttttggccagatcaagtggcttcagagtgtttctgccgggggtggggtggggtggggggggggaattcccaactgtttttcagttttcttttgtaatgtaagctagcagagttttccgtattttctttaaaatgaggggtcattctagtcatctgtggatatgtagagatctgactaatacaaagtggatatgggttggaaagtagatctttaggtgatcacgaggttatataaatatacgttgtcattgtcacacattgttgtgaagtattccgttctgttttggaatgctggtgaaatgccagtaaccttgctgatctaatggtaccttagatcttgaaaaattatctgaatagaaaagttcatcattcacaatgtaaaagaatgctaacatctaagccaagctaatggttcggtgtacccttgttcccagtgtaacgctctcctagggagttggagcattgccttaggaatgctttgaggatgaaatttagtttccttctgcttaggagttctagatggttagtattttaaatctctatgttgcagtggttaaatataagatttaagttataaaatgctgcagagtctgtccatgtgcagtttggtatcattcttccttgggtaagctgcgcttttgcttttcctgagttctctgcagaagtgagtgtaggtattacattgttggagtttttgagtggtgatagtaccggcctaaaatgtgagatatatcgatatatctatatgacttagtgagatgtctgttaatggtgattttttacagtcttaactaacatttaaaatctatttgggaaggttaaaatggaaagatcaattttgttttgcccaaatccaaggttatttccccatgacttagaaagtctgtaaagctaattgaccatgttcgtgaggcagaataaagacaagatgcagaactgaaaggaaaaaaaaaatccgtttgggaacgttaagatggttcaggcacttactgtgtagcttgaccacctgattttaattcccagggtccctaagatggggagaatcagctctccatatgttgtcctctgatctccataggtcagctgtgacactagtgtgcccttccaataaatgtagtaatccctcagacttaaacagtgatagtctttacatcaagatgtggggaagagagttcccatgacctatatgggatgattagatgttgatgttttgtcttcaagacagggtctcttgtatagccccggttgtcctagaatcactatgtagactggggtgacttcagaggatctgcctgccctcctgagtgctgggatttgcaaaggcatgggccaccacacctggctgtatattcaccactaactttaaatacttttattttcttttggacagaaggacagaaacacttattttattgagaaaagattaaatttaaaaagatagcttttcattattttgttggactctagagtttgagtttaactgaatttgggtcctgctttaacaaaaaagtggtagcaaagtatcagggtctaggtgcgtttgttttacaggtgcagttcaagtatacacatactgatttacaggacagtgtttattttctgtgcattatatacagatcttccagagtggatgacaggtgattagtttttcttttttttttttaaagatttacttatttttatttgagtacatagtcgctatcttcagacacaccagaagagggcgtcagatcacattacagatggttgtgagccatcatgtggttgctgggaattgaactcaggacctctggaagagcagtcagggctcttaacctctaaggcatctctccagcccccaggtgattagtgtttgaagtatatactttttaaatgactctctaagttggctgtcatagctcagtaactccttgattacccagagctcattgattgaatggacttagtatcagaaatcaggtataaagacatttaagaaaagtagattgtagttctgcatctctaaacatttgctcttgtattttgttgttgtttgtttgtttgtttgtttgtttgtttttcgagacagggtttctctgtatagccctggctgtcctggaactcactttgtagaccaggctggcctcgaactcagaaatccgcctgcctctgcctcccaagtgctgggattaaaggcgtttgccaccatgcctggctcatataagggtccaaagaatccttagaaatggcctttgtcgtttgtcttcatttattatgtttgtagttctggctggccaactcaccatgtagaacaatctggcttcagtctgtgatccttgtgcctcaacctcttcagtgctgggattacaggtgtgagccactacatctggttagatctttttccactggcaatcaacttaacagaaaacattcagataaaataaacatgtatttgaaacaacctgaaacaacattgagtgaatgttgaatctgaagcatgtttatttattacatatataacccaacaataaattaaaggcgagtcaattgtaacccacctttaaagctagcagggatcaatgagcaggtcaaacaatgttccaagtctaggctcctgagtacagagctagtgtgttatgcacctataatctccaaggctgcctgctgatagctgttatgtagaatttttcaggttttaaattaaagagtgttgtgtagttcaggctggccctgaatcagctgtgttctgttccctgagagtcctgactgctgagattgcagacaagggccaccatgcctgactgattttttttttttcccccttgtgacaaggtttctctgtgtagacttgtaaccctggctgtcttagaactcattcttcagaccaggctggcctcgaactcagagatctgttaaaaggtgtgtccacctggcttctgactgggttttttaaattacaaagtaaccagagaagttagtaaatttttctgtaacagcaaataagttttgatttgaaaagtatagagctgggcatgatgacgcatgttgtaatctgagcatttgacagggagctagagagtttggggccgtaggccaggctgagctatctagtgagactctttcctttaaaaaagaaaagtggaaggggctggagagatggctcaagggataagagcactgactgctcctccagaggtcctgagttcaattcccagcaaccacatggtggcttacaacaaaccatctgtaatgggatccgatgccctcttctggtgtgtctgaagacagtgaccctgtactcacatacataaaatatataaatctttaaagaaaaagtggaatgtaaaactgcagtactgtaggtattatgcagtttcatacatttcagtaatgaatagtttttgtgcgtttctgtgtgtttgtgtggttggtgtgggtggtgcaatttgcatggtgcattcttgtggtgcgtgcctgtgtagaggccagagcaggactttggtcttctattgttacctacgtcagtgccttgagataggcactcactgaactggaagacctgtctgtggccaaggcgacaggccttagcgctctagggagccacctgtcccctaagtggttggggttacagccacactcaaccatgcctggctttgtacataggtactgggcatttgaactcaagtcctcttgggtgatcatcaaggcgtcttaaccactgagcccaaggttatagggtagagttttcatcttgattggcactgagatagatagtttactaagattgtattttgagatgagtgtttgaatattctagcccccccccccccaaaatccttctgcatgctcccatctggaatgcttcctcttaactgcctgctgcataagctgtccaccctggaactggagctcacggacatcctgggtgtcctttccttgctgctgtgttgtttctctggatcccatgccttctagttgaccatccatccatccaaacatcctactgtcagtactgtaaggagtatatgagttttggatttttgtttttggttttttttttttttttttttggttttggttttggtttttcgagatagggtttctctgtgtagctctggctgtcctggaacttactctgtagaccaggctggcctcgaactcagaaatccgcctgcccccgcctcccgagtgctgggattaaaggtgtggccaccacgcctggctggattttgttttgacctgcacactagcctcttacctgttgagaactttttctcaagctgtttgccctagaaagtttgaagagggcgttcttttattatatgccttctgatgttggtgttcagagaaactactccgtaaaaaggtaaagacttgtctgttctgttttgagctatttcagcccttttcactggtttttaaattgaagctttgagcaacaacaacaataacaataacaaaagtatataagcccttgtaatatattttactttttttaatgggctcagcatctctgttgtttctttcttttttttttaagatttatttattattatatctaagtacactgtagctgtcttcagatgaaccagaagagggggtcagatctcattacagacggttgtgagccatcatgtggttgctggggatttgaactcaggaccttcggaagagcagttggtgttcttaaccactgggccatctctccagcccccatctcgttgtttcttcaaggatgctaattatactttctttgaaatgctctgttttcctgccttgcttttggttcttctaaccttttttgtttgtttgttttggtctcatttatttggaggctgtcctcaaatctgtattatttttagcagttttttcatatctgagagaacattaccaagattcactgaaagctgagggagcatgggcagggttcactgactgagctcatggtgtctgttttggtttctctgggttaagcattctgagcttcttcagctcgttttttgtctcctttgggtcagatgctggacagaatggtgtcttactcattctggttgtagcaaagcatcctagactgggtggcctacgatgcagaggttagtttcttcacagttgtggaagccggaagtatgacatcagttccgaggcggctacattctgaaagggtcactttcctgtctgcagatgtctgccttctctactgtgggctcatatagagagcccttcctcagggcttggcttttgtggggcagggaaggagccactggcttcttttcttcctgtaaggccccagtctctcaattatgactccttcctatgactttttactctcccctcatatttgaccaggctctagatccagtcagctggaaggaacgcctctcagagcctctcagaggtaagtttaggtggtacggttccagtgatgggtgtgagaagaaagctgcaggtcgcgctagctgtttgacaaattcgccagtttctgttttcattttaacccacccttgtttctgggaaagcctgagcctgcagcctttctgattgcaagttttcgagggagtttacacctgtgcatttggccttctttctactgccttcacttccatcgtcttcgtattgtatgtaagagtgtgcttaccaagctagttagtgctacagtgcttgcctgggatgcacagaaagccctaggttcatatctagtactgaaagcaaccttgtcttcatttctttgttctgttacaccaaggcattcaccatttcatttttgtcttatactttatattccaggttacagttaaaatattttctaattgcaccacaggtggtctttatgtttctctcttttctttctattgtttaagtgtatttttagaggagatactaaattttagccttattttaatttgttcttttttgtatataccattggttaagtaatttttttgtgtctatacacatacttatttaaacagtcatgggaattcttatacaagtgtactctatgttgacagactacccctctgcttgttacctccctcctctcgactcctttcctagtcctttcccttagatagttttacttttactttgatgtcatatatacatttatagttttatgtacataagtaaaannnnnnnnnnnnnnnnnnnnaaaccacatgtatatgctgtctgtcttttttttttccatttttattaggtatttagctcatttacatttccaatgctataccaaaagtcccccatacccacccacccccactcccctacccacccactccccctttttggccctgacattcccctgtactggggcatataaagtttgcgtgtccaatgggcctctctttccagtgatggccctgtctgtctttttaagactggcataattcacttatggtatctctatttgtcttcatttttctgcaaatgatttaagtcttctttatggctaagagtccatatgcacctatgatgtggggagtgttatctttcacaaggtggttccgggaaggatgtgagcctgacgttttgaagaccttgtttatgaaagtgtagaggcttaatgcactcttcatgtttacttgtttatttaatatgtatgggtgtttggtctgcatgtaggtctgtgagccatgtgtgtgcgtggcaccacagaagccagaagaggttgtagatctcaggaactggaattacagacattggagccaccaactgggtcctctgaagaaaaacagccagtgctcttaaccactgagcttaacttccctttttttttttttttttttttttttttggtttttcgagacagggtttctctgtgtagccctggctgtcctggaactcactttgtagaccaggctggccttgaattcagaaatctgcctgcctctgcctcttgagtgctgggattaaaggtgtgcaccaccatgcccggcttgaacttaacgtcttaatgtcgtcactttctccagctccgtgtgtgtgtgttggttttcattgtagatcctgagggatgagacttgtctaatgcattgaagcctctcagtgtcactaagtgcactggttgccgggacttcctggtttccatagcactgatccagctgagttcctggtgtctgaaagtaccgtgtgtgcatctgtataaagcattgtcacaatctaacttttgtttcaaagttaaagagtatttgttcatttgtgtgtgtgtatatggaggtgtgtgtgtgtgcatgcacgctcaagagtgcgtgcaggtcagaggacagctttcaggaaggagcttgtattccattcactgtgtgggtctcagggttttagcttcgttggaaagtgtctgtatctactgagccactttgacaagcctgtactagctttttgagagaaatatttcagagattttaagttgattgagttaattgattctcagttttctcccttccatagtggattaaacttttcaaattacagaagaactgtttaaaataggatattgaaaaataaaagttttttgttagaataaaaataattatgaaaacatatcttagaaaatcttttatgtagtagagaaaataaaaacatgtttcttacccactaaactactttgtaacttcaaactacttttgttttcaaacacatgctgatccttatgttgcacattttatgttcttgaactatagatttaaaaagtatttaagattttataatgaaaaatgtaatacggaagaaaaacactatattctgggtataaccatactattgcttcagcttcactttattagatgtttagttcagagccctttgcattgcttgtcttattgtggaaataaagcagctgctctagtgttgttttcttgctgaatcactggtgagtattgtatcttagttaccaaatgtacccagccatggtgccacacacctttaactccagcacatgggaggctgaggcgccagatctctgagtttgaggccagcccagtctatagagtggccagcctggtctacagagtgagttccagggccatcagggctacagagagaaaccctgtctggaaaaaccacaacacaaaactatggctgagtaaatattgactcctcctcctcttcctgtgtgaaaacaacgcagaaaggagagcgatccaagggtgtttgtgatagagtgtgcttggtgtgccttgtccttaggtaccacttgagctagaatatgaacatcttgagaagagaaatgacagtcacccagtaaccaacatttatagaacgtggtcagcattttacctgtagttttgtgtcttttataacttcttttaaatgcagttagatattaatcttatatacattctatatagaggtctataaaatgtaaccatgaagtgaatataagtataggaaaataactataaaatgaatctatgtctaggtttcagacttgcaactctaaactactaagtaagttgtattaattttgttttcgatctctaaccagacccatgctggtttgtgggattatttgactgtcaggaaattgggctttggaaggcctgttgggtttaggtgaatggagatgattgagagactttgggggtcagggtggggtggggtgnnnnnnnnnnnnnnnnnnnnnnnnnnnnnnnnnnnnnnnnnnnnnnnnnnnnnnnnnnnnnnnnnnnnnnnnnnnatggggaatgattgaaatgggaatgagggaggctaagagatggctctgtggttaagagtacttgatacttttgaagaggacttaagttcaatttccagcacgcacactgtgcaccttacaacttcctgtaagtccagttccaggagatccaatgtcccttttctggcatccctgtcccccaacatgtacacatgcacttatgcaaaaaaaaaaaaaagagaaaaacctttttaaaaacgtgataggaaaattaatgagtatggaatagtcagtgagtaaagccatttggataagatagatgccttaccagtttttattccttatttggtgtgtgtgtgtatgtatggggttgggggttgtgctgtggtgtgcctgtagagatcacgaactctgtagtcagttctcttctggcatgtgggtcctggggcaggactcaggttggtaggcttggaagcaagggcctcatcccctatgtcagttactttcctgttgttgtgataaataaaacactgtgaccagggtgactcaagggaaaatggttctagagggataaggagccatcgtggcaggaaagcatggtagcaggcagcaggcctggcagcaagaacaggaagctgagagctcacatcttgaaccacaggcacggaagagagagccagctggaagtggagcaaggctatgaactctccaagttcccccactgacttatttcctctagcagtgttgcaccacgtccccaacagtgccaccagctgggacacgtgcttaactatctcaccagccccgaggctggaagataagagggtatggtagttggaagtctcacattctcttatttttaccaatataaggagtttacacttcattttctgggcattaataagacaggtttgtgttgttttcttgtagggtgagaatatattcagattgataatttaggaaaaatggcttggtaaaatgtatgatggattagctgaaagtacaggagatggatatggacagtattgaagacctactatattagtagtaggtgctactgccacaagccacagccattggagcttgcttctgcagtgctgccctcagggctccatgaggggctcacctgactgctttaagcacagcttagctctctctgctggcttgatctcctgtctacagccagaactacagctgctggcacagcctcgtgcctcctgctgcttgtctccacactacccgtatgtcccagagcctcgacttctctttggtgatgtgcacactcctagctgggttgcagtgaagaggtagagttcccgaagtctcagtcctaggctggccagctgtctggaggctgtggctttggctcttttcttctcaggcacccttgtgtgggcagtgtttgctaatggctatcggacatgtggaaaaggactggattttccagctgagacaagctgcccagtggcatccacgtgcctgtggaaatagtcctgctaaagaaggtaggcttgggtatctctggtgtcattcgttaggttcctcgatgggttcaagacacccagcagcttcatcttgatgccagagaggcctgagctgtggctaaaacctttgaatttatcatggaaaggagagccctacaagagaagtggtcccagtggagatgggcagagcatcttgcaacccatggcaatggagttaggggtggttgtgagccatgatggagtactggagactgaacccaggtcctctgcaagtgtgctttattactgagctgccccgaggagaacgtgatggctgttagttgtggcaagctcacagtcctcattttttggcagaggtgcctctcaaggacacttgcgtgtatatccctgcagaatatagccctactatcagtgttgccatggaggccagcagctgtctggttcctgtcattcctgctggagcatatcaaatatttagctgctacttttttgaacgctcttaaattgatcatcaggggccaagttttcttcaagcagaggatctcttcaaaatctcatcatctggtgggcttggtggcacacgcctttaatcccaggacttgagaggcagaggcaggtggatctctgagttccaggccagccaaagctatgtattcagaacatgtctttttgttcttgttgtttgaaacagggtcttactatgttgctttggctgtcctggaacttacagtgtaaaccaggctggcctggaattcacagagctccatctgccattttctcctgagtgctggcattaaaggcacgtacataggcccagctgaaggattttctttaaaaataaaaccaacatttccttagtcttcctgccatccttgcaagaaatccggggccatctgtgggcacaagaggtttgtcctcctattccaggggactgctgaggttcattttctatggcctttctggagctaccatttcaggtgcttaagggaggggaagacattctctccagctgccacagacaatgcccactacaggaacaagcacaacgtactgcagaatctgggtccctggagggtgctttctaggatcagggaagagactgttccaagtcccctacgacttgctaatgtccctcgggtcttttgtctacctaccaatggggtctgggctctttggacagtgtataggacattgctgacctgtgtaattaaaaaagcagttgtgagctagttgtagaagtatacacctgcaagcacttgggaaggacaggagttcaaggccaacctggactacatgagagactgtcaaaagaaaaggaagaaagggaggcagctatacaattaagaaaagagcttactctgtgtatgtgagagacacagagactgagagagagactatgcatgcatgagagcaagtgttaggcaaacagtggaggtggaagagacttccagagtggggaataaatcaagttgttaggcttgtgcagaggaaccatttccccaccccaggagaaggtaattatggatatcaaccctctggatcctttctggggacagggtctctgtccccgtctctccatctgccaggcagtttctttatctctctgtctgtctcttccgtgtcttggtcagtttgtgtctggctgtctgtttccctccccctcccctttaccccctctccttctccctgttggcctgtgttcccattgacctttgttgctgttacaagagaaaaaccagcaaagtctcacattccatattcattgtgagacaagaagagtgggcagtgttccttacagagagaggctaagagccgggctgctgcaagcttcaggcaccctctcatgcgatgctctttccttctccgagggtgtggtgatggggctgcatgttaaggaggtggtcttggtgtcagccctagctagatacagcttcaggaagcccttggggatggcccgtcccttcctacaccagatccccatctactgtaggactgttttgagtgggatggagcctgctggttttgtacgatgaaatactgtagagaaaaaataagagtcttactatttttgaatgtttggctttctgtgagtttttgtttcgtttttactttttttttttttttttttttttggtttcttttgagacagggtttctctgtatagccctagctgtcctggaactcactctgtagaccaggctgacctcaaactcagaaatccgcctgcctctgcctcccaagtgctgggattaaaggcgtgcgccaccacagcccggcttgtttcgtttttaaataaactttttctttttcttttcttttctttttctttttttaaaagacataaccctgactggtctgaaacttgctttgtaggctaggctggccttgaactctcagagatctgtctgactctgtctcctgaatgcgattaaactcttctactaccatgctagacttaaaaaaaagttattatatatatatgtgtgcgtatgttattatatatatatgtatacatatatatatatgtatgtgtgtgtgtgtgtgtgtgtgtgtgtgtgtgtgtatattttgtatttgtgtataaaacagaggagtcttctcttcctctaccgtgcaccagtactcagacactgaactcaggtctcaggcttgggacaggcagagtaacctctgagacatcctccctggcccaaagcatttagtcaaaaaaaaaaaaggtagagtcagagtttgattctttcatttatgttgttgtcattaatcagagagaactgtgttatttattgtttgccttgtaaagtagaacttaaatacagggtcacttgatcacaatataacaaccttttagtatatttaagattaagtagggctggtgagatggctcagtgggtaagagtacccgactgctcttctgaaggtcaggagttcaaatcccagcaaccacatggtggctcacaaccatccttaatgagatctgactccctcttctggagtgtctgaggacagctacagtgtacttacatataataaacaaataaataaacaaataaaaaaaaaaaaaagattaagtaatcagtcattgtataacctgtatataacatacagtatcttactatttcatgtcttagttttctagaatttgaatagaaaaaggatttttatctcacttttagaaacattttggggctggagagaaagctcagcagttaaaagcactgaacccacgtggcagctcacaacagttgttaactccacttctaggagatttgactcctcttctggcctcaaaacctaaaataaaataaaataaaataaaataactttccaattcagtcctttgtttctgtgactgttactgctctgctgtgttatgtggtgtcttcctaataaaattctgtcagaccaggcagcagtctttaatcccagcactcaggacacagaggcaggtggatcttggtgagttcaaggccagcccggtttacagggagagagagttccaatacaccgggaccacatagagaaaccctgtcttcaaaaacaaacaattctgcagtcagaacttcatgatagtagctgtatttgttagttactttttattagttatcaagtatagtgttggaagtaaagcatatgctagctttaatcttcataaaaattaaaaagacacatgccattctctcttagagatgagaataacgagacacagcagttaaataacttgcttgtgtctgatgaccagttgctgtcagagctggaattgaacttgaacgtgtttaactctgaagtctgagctgcttccactccattacagtacatttcagttgtcgtagtcctagcatttcacctgccctactttctaaagttttttcccccttgtccttgtgccccctgccgtcttgctttgcccttttgtttttatatttatttattctcttatgtgtgtgtcttagggttcctgtttcattaaaacaccctgaccagaaccagtgtgaggaaggaaatggtttatttcagcttatagttcaccatatggtccatcaatgaaagaagttaggataggacctcgaggcagaagttatggaggaatgctgcttactggcttatttctcatgccttctagccaggcactaccagcccaggtgtcctgttacctccaatggctgggtcctgccacatcagtctcttatttaagaaaatgtcccacaggttgcctacgggctaatcttaatggggacattttctcaattcaaaacccttttcccagatgtatagacgtgtgtcaggctaataaaacccaaattgtgggtgagggtttgtttgcaggtatgcgtgtgtacagcatgttagtgctcctggataccagagcagtattggatggcctggaatggcagttagaaatggactggtccatggtttgctgtgtggatcctggggactgaaccttggctccctgcaagagcagcaagtggtcttgtcctctgagtcagccctccagcaccagctctcgtgaatactaggtgctaagaggatgtgtaaacagtgtaggttgttgttgctggatgaataattatgctccgtttccctcatttgtcaacaagaggcaaggggaagaagtaaagcagggggaagcagcgccgtggtcctcaccagtttacagctgttgagtgatccatttcagtgtgcacatcaagtgatccgtctcagggtgcgcgcccctccctcctgcccatcgccaaggtttctctctgtagccctggctttctggaacttactctgtaaagaccaggctggctttggacctgggacaaaagactaatagtggtgcctatgaacacattaagcagatactggctaccgggtttctcagcatcctcagtccctgcttgttacagggtcatcttggccagcatataccacctctgccctgagctactctgattcctatataacccagccatttggctatgctggccctgcttaccttttggcctcttggttcctgactctgcccacgtccctccccctctcacatgacccagctcagcctgctggtcatgttcactctatttctccagatgtctctatctctgtctatagctgtattccccgtcatgtgtacaattaaccacctcctccaccatacctagatgcaccatgtccttctaattctttttttccattcaggcacatagacatatgaaagaggggtaagagagggagagatcaaattataacaggagaaagataatattattgccagttggtagggatcaagaagttcttgcaaaaggagtgtctgattttagtagagataggttggccagaggcattttgttttgttttgtttttgttttttttgttttctttgagacagggtttctctgtgtagcccaggctgtcctggaactcactctgtagaccaggctggcctcaaactcagaaatccgcctgcctctgcctcccaagtgctgggattaaaggggtgcgccaccgctgccttgcaggcaaaggcattctaagtataattacaaaaatgttgagatattacatttgactgaggaatcagcctagaatgacattggtgaccagtggaagaaaagacatttgtatttctatattgactacaaaaattcttgagtagcataccagtggaacagaactaaaaattgcagagaaaacatgaatttctaaaggaggcaggcctcatttggaaggactagccttccctttgctttcgatatgccatgtaaacaaagctctggctagtctactgtcttccttttttgtccagtcttctgcaacagcccatcatcctacggctgtctgaggtgggggaaacacattcagtaatgcttcttcctttgcagaactcgtgtgttcacatgagggataggtcaaagaaaatgacagccattctctacttaacagtctttcaaataacaaaagggagaatagagaaacttctgaagtctcctatttatcatgctatctctctccctgctattttgtgagacatagctgtacctgttttcctaagcctggacctattaaacagtttccttcatcaatctccgaagtgagctaacaccaatggcattttctttatttaggtagacagaagcaagttgcatttgctcaatttattttaagcaatagagagccatgatgaggtttaattaatgtgttgccccattgagacactcatagtttcagctttttaaaaattactaagcagaccaatggcttttgttaggatattttcatatatccgatttggtttattctccccttttgatgcctcctcctgctacactaactatctctgccttcatgtcacatgcacttgttgtccttgttcttcttcacacccttcctcaggaaaggcaatgaaccatgacaaattgtaagaatttcttaaggaatgaaggtgtggagtttggcagagactggctaggcatatctggagagtcacttacttaatcatgtaagttgcaggagtataggaaagatacttaagacagactctagagggaagttcgggtttagatgacaggagtgtgagaattaggtaggtatattacaatatcactgaaatacgatgagagaatttgatggagaggccagtgtttatcccctgaagagggaaggggtgacttgctggggttggtaacttttcttagctgtgtgccagggagaggctgtgtgaaatcctctctgccctcgtccctgctcatagagttcttttcttttctcagttgccttcatctcctttctcttctacttattttttttaataaatgtgttgactttcttttttttataaagtttttttttttaagatttattcatttattacatgtaagtacactgtagctgtcttcagacactccagaagagggcatcagatcttgttaatgaatggttgtgagccaccatgtggttgctgggatttgaactcaggacctacagaagagtagttggtgctcttaaccactgagccatctctccagtccccttgtcttctacttcatttcattttgcacatccactgtccattctgcttcttcattttttcttctttttctggcttgctcgctgatctatttccaacaatgtattattcttagctggatgtgggaggaacagggagatttcagtgtggttgctcagatcagttgatttcatgaacttcattatgagggtcttgacttaaggctcagtcaggatagttagaattgataatatgaatcctatttgaatttttgcttcaaaatatataatagctgaaagctttagaatggatttttctgtatttcataagagcttccagtttgattttttttttttttccttcctccgagaccgggtttctctgtgtagccctggctgtcctggaactcactctatagaccaggttggcttcaaactcagaaatccacctgcctctgcctcccaagtgttgggattaaaagcgtgtaacaccactgccgggctcagtttgaaattttatgatgctcaaataaaattctaatgagccttttagttttttctttcagatctatatattttactttatgtgtataaatattctccctgcatgtacatatgtataccacgtgcattcttgtgggattctccgaactggagttagagattgctgtgaactaccatgtgggtactgggaatttgagctttggtcctttgaaaaagcagtaagttcttttattgttgagttgtttccccagcaagcaactagtgaagctgttaaaagaacttccttttttctaaatgtgtgggtcatgggatagagtgatcttcctgtctccgcctctctcctcagtgtcgggattacagatgtgagccaccacatgtggtttacctgtgctgggggttgatgcagggctgtgtgcattttggggaagtgctttatcagttgagctatgtccccaacccctaattcagcttatttctctcatttcccatatcttagtcaaataaccagtgtttgtaatttttataatgtgtttgcagatgtaacttatccagatcagagatgcccttcttttttgttttttggttttgttttttctgagacagggtttctctgtgtagccctggctgtcctggaactcactctgtagaccaggctggcctcgaactcagaaatccacctgcctcttcctcccaagttctgggattaaaggcgtgcgccagcacctccaggctcagagatgctcttctatagggctgggttggtcctgagtactgttcttgggagtcctgttttgttgtcatcctgtttgtacttaatgtagactggccgccttctaaggcgggtgcgcatgtcctctacttttatttactttatttttcatttttgggttttgtttttgttttttgttttgagacagaatttctcctgcaaccctaactgtcctggaactcgctttgtagaccaggctggtcttgtactctcagagatctatctgcctgcctcccaagtgctgggattagaggtgtgagcccccaccccttgccctgccttactttactttttgtttactactgtattttcttgagcagagttcattgttctagttcttgagtgactgatcactccactgtttagcaaagaacaacttggaaatcaacacttttaaaagatatacatgatataatatacatattacatattacctatcagtataatatacaatattatatgtatatgtaattatattacatatatatttacacatatatatataaagttcccttgtttaaatatctgattatgtggatggatatttgaatgtgtgtgcatgtgaaaaaatatagatagatagatagatagataggtgtgtattcatatatgcatacatatacatatgatagtctctctgttttcatgtactatttcaggaatattttatctagtttctatctgttctagacagtttttgttgtttgttttgtgtgcatgcatggggaggccagatgtccttctgggtgtcatgctttgggagccaccatattttattgtttttgctagtgtgagtgcaggcatgcacatgctgtggtttctgtgtggagataagggacagcttcggtgggcgtggttctcactttgtaccttcatgtgaggtcagtgtggtcaggtgccttacacgtaagccatcttggtggcccttactttttttttaaactgtttttttatttttatgggacagattttctcactggatcctaaggcttgccaatttttttagaatggctggcaatcaagctccaggcttttctagattgctgtgttgttaaagttatgtagcatgtggcattttacactgtattctttcagttagtaatgctcatgtacattttcctatgtctttgcatggcttgatagctcctgtctctttttggtgctgaagaatatcgaattgtttggatgcaccagagtttacattcatccactgaagaatatcttggttgcttccttctgtttttggataattatgaatgaacctggtataactacttatttatgtgttgttgtgtgaaagtaaggttttagctcttggattatatctgcaaacagtcttcctacgtagtgtcttgcattcccactagcaacgaatgagaattcctgttcctggtgtttactggtatttaatggtgctgacaatgttctggggtttggccaattttatagtcatgtggtgacatgctgtgttttgtagttttggtgacagacgatgtgacacacacctttgcatgcgtgcttatttgtcttctgcacagtttttatggggaagtctttgacccattttaaagtctggcatttttgttgaattgtaagaggagtctacattgaatagtagaggttgatcagatctatctctcttctgtggtttgcctttctgttctcttgatagtggctgttaaagaatgttaatgagtctagactatcagttcttttccttggcacactatgcctttatgcagtatctccctgccccctacaaggacatacaccatgtaggtctcctaggctgccttctaggagtctcaggagttcctcttttgttttgaatgtgactatccaggtgtagtgctgtctgttgaaaagattcttttgtctccattgtgaaaactgagctgcctgtaaggtgggcttgtttctgaacacccagttttattctcctgatttttggttgttgttattgacagtaactgtcttgatacctttttacactttctaaattgcacttatgggaagtgtgactttccaaactctgtgctgttctacagtagaataattcttgctgtcattataagggttatgatgagagacaagtgagaaagtttattctaagctttaggttagactgtgaaggataaaactacgttttttgagtcatgttctcactatgtagctctggctgtcttggaattcaccatgtaggccaggctggcctcaaactcagagatctgccagcattcgcctttcatatgctgggattaaagacatgagtcattacctacaaccggctattcttggtcatgaaaataaataaatcaaaactgataaagaaccagtcctctcaggaacaatgtgttaaagaaaccagcagtgccaagatcctgtttccattataagcccttacttatgaagggatggagacatgacaacatggaaaattgacagctgagagtaggtatctgaaagtttgttagttaccaagcttgcagtgcctaaccttgaacttctgtcttttgagcaagtaacaacatcacgttatcgcaacttttcatgttacagaattgcatgtaatttaaaggaggcggttaggattgagtttcagatttcagtgctggtgagacagcagagccggtcaaggcacttgttgcataagcttgatggcctgaatttaatctctggaattcctgtaaaagttcaaggagtggactgactctataaagttgtcttctgacctccaatgcatgctgtggcatgtaccccactcccgatctctcgctctcttaacccccgccccctacacacacagatagacagagacagacaaagaagagagacaagagaaaggaaaatagttcagtaatttaaaaacaacttgaagtgatgttatatatgtattgggctaaataaaatgtgttactaaaagtaatttcaccgctacttgttattcttttaatgtgactgctgaaaaacgcaaatttgcagatgacattatgtttctgttggtaagttcgagctgagatcatcatctagttatcatatgattatagcctggattagggtgatgcttactaaagtaagaagtttttaagggattctacagtatccatatacattgcaaagattccattttactaggttgtgtgcttctgttatagctttgtagcaatagcaacaacaaccagcttttgaagggaagggcagtattactttgtttttattttgtatatatttacccttggctagagtcataggaaactgagtgagtaaacaagaacaataaggtagtatgcatttcataaagccatttggagttttaggatataaatcaatgggtttgtttgtttgtttgtttgttttttgatttcctttcttttgttttttgttttttttaaagatttacttacttattatatgtaagtatactgtagctgtcttcagacactccagaagagggtgtcagatctttttacatttggctgtgagccaccatgaggttgctggcaattgaactcagaacctctggaagagcagtcagtgctcttaaccactgagccatctcttcagcccatgttgtgtttgtttgtttgtttcaacacggggtttctctgtgtagctctggccatcttggaactcactgtagatcagactggccttaaacccttaaacacagattcacctgcctctgcctcttgagtgctggaattaaaggcgtgtgccaccactgactggctccatcaatgagttcttactacccataatttattaccacagtaacactagttagccatgttagtcatgttcttcttaaaatgcagaagggtgagggaccttagtctctagcttgtgtagtcatgaggatgccgtccagcatcatttctcaggtttggacatttgctaacaatacgaatgtgcctaagtttagagccgtaacttttcagaatacttgtccattccagtttagccaattattttatgtgatttgaaattactcctatattttggttgacataaaatcaatgaaaaaataatcattgaaattaaatgtggggctggagagatggctcagtggttaagagcactgactgctcttctgtaggtcccgggttcaaatcccagcaaccacatggtggctcacaaccatccgtaatgcaatctgatgccctcttctggggtgtctgaagacagctgcagtgtacttacgtagcataaataaataaattaaaaaaagaaattaaatgtgcatgataaattttgatatatattgtatgtccaatgaaagaagaaatgtagaagttttcaggtataaccaaaaaagaaaaaaaagcactttttttcttcagtcatggtttttggatgtactgtgtttattttgctttcaattttggttgtttctttttggagaccaggtgtcatcatgttcccttgggtatcctggaacttgctgtgtagacaggctagcctcctgctcactgaggtctgcctgcctcagctttcctttctgttggagtcaaaggcgtgcaccatcaggctcaacatgcttatgtattttatacctctagaaattgaattaaagttcatggagaaaaaaaagattgtagcattttaaaatatttttttgcctttcagataaaatcaaagacaaaattaaagagaaagacaaagagagagagaaaaagaagcataaagtaatgagtgagatcaagaaagaaaatggagatgtaaagattttactgaaaagtaagttatattgagtgaatgttttctacattgtatactatccagtatatttattagccaagctgttaaaataagaagtgttacttgataccaatatttgctaagagtaattatgctgtgagtgcagagcaagtccaggggttgggaattgtaatctgcgtgggactgtgctttgcggtctgtatttaaggaattcttaaggctttcatgattccgcttcaaaaacataaattattttaaaaacaagttgtataatttggtgtgctcattattcgtttttaaccatatttatataattggaaataagaggctaaagcaattttgtcatggtaggatggtgacatccctccttacagacactggagcataaccgttcatcagagaaggactgagagggagcagttactccgcccccgccaagcgccaaaccaggagggatgctcttttattctctcttccttgtttacgagtatcctctctagctttaaaaaaaatacaaaaacatcctctttgtttcttgtttccatgttaaactgtattctgttactgtttatacatggggaagagtaggaagaattttgttgtagaatgttgggcagtaacatcataaatcatataaaaacaatttatgttacaatagaaataaaaacaatctcagatttacttaggaatgtctgaatcagtgatgttctcattaggcagctgggaagccattggctggcctgttaaattagatggttaatctaatcaatcaaccctttgacttggatttatttcagtaaatttgggtgtggataaacatttatgttcacaaggggaaaaaccctgcaatatcggatatgaaacatagcaactagtttacgttacttatggtatacgtgaactctccatctttatttcattgtttgtcacatttataaatattttttgtttctttacataataaacttttgtacaagtcagaattttacactcagagatttgtttattttagtatgttgcctgagtatatactgtgtatatgtagtgccttcagaaatcagaagagggtgtctgtcagatgagtttataggtggctgtgagccaatcagtgtgggtgctggaaactgaacgtaggtcctttggaagagcagcagatgttttaaccactgagccaattctgcatacttagagttttcttttctataacgttctttacaccttaaaagaaatatatcacctattagtagatgacttcttggttgatgttctcaatccttttgtttcttttgcccctgtggtcttgtaacttttatttattttaaaaattttatttatttaaggtttttttgctttttgttttttaaattgagacaggctctcattatgtagtcttggctgaccatgagctcttttagcctaggctggtctacaaatcatgtagaacgccttcctctgcccctagagtgctaggatttaaggacatgtgcctccatgcctggctgctgttttctttattcatttttttttcaaaaaaaattgttctaatttattctgtgtgtttgagtgtttcggtttcatgtatgtatgtatactgtgcctgtgcctagtgctggtagagatcagaacaaagtgtgtgatcccatgtaactggagtgacaggaagctgtgaactgccatgtgggtgctgggctctgagctcaggtcttctgagctgaggtgtgtgtgcaccatcacaccctgtatgtacagtagccgggattgaagtcggcaggtattcccacctgtgcttccactgtgcttcaggttacactgtaagcctctgaggcaggcaggcaggcaggcaggcaggcaggcaggcaggcaggcaggcaggcaggcaggcaggcaggcaggcaggcaggcaggcaggcaggcaggcaggacttgagagctgcagctagcctttaagcagctgtgactcatgctccctccgtgggtttactcagctgaccctgccggcttagtctattagttgtcttgtctttatttgtgtgtgcagtgacacatagttatgctattagaggaaaaagtctgtggcctcaggatacttaagctatatgttctgacacgtagatttctagagagtgtatacatgaaaatatcctactgaactgaaggttttctaggaatatataatattaactgggactttgaagtagatggaaaaattagacattttgaactgtaagggtgaaagatgaagacagagagtgaggtaggcttagaaactgtaaccttggggactagagaaatggctcagcagttaagactgctcttccgaaggtcctgagttcaaatctcagcaccatatgatggctcacagccatctgtaatgagatctgacacccttttccagaatgtctgaagacagctacagtgtacttagatataataataaataaatcttaaaaacaaaaaaagaaattgtaacctttaaatggctagggcatttgaaggaaacatttctgtagtggagataagtaatgatttataccgctttatgttgctgggaagattatgtaagtaaaagtgaggagtgtataatcactcaggagggagatatgaaactttcatttaaaagaataattttgggtttaaaaagcaataaagtcaaaactatccttcctcctcagtgtatagtatataggtaactatacaagtaaaaacatgcttcatttggaaaagggactctgcctttgtaagtactgtgtcggcttttattatccagcaaaagcactctctgttgacctctgtgtggatgtggccagggggtggagtcaggtattgctgtggtggagcagaaaactgctcagcttgttaggggtggtactcgcctactactctgtatgcagagtggtttttccttttttttctttttttttagtgtccatcttttcttctctccttataggtttcttctttaatgttacacgttgtaacaaacatttgaaaatagaaaccttcctaaatcttttctacctgaatctcatttcctttgggttttccttaaaacttttactgtgctgggtttagagagatggctcaaaagtagcacttgctgttcttttagagggttctaataactgtttccagcatgattaatcacaactgtctgtaactctagtcccaggggatccaaatgccttcttctgacttccttggtaaccaagcatgcatgtgtgcacataatatagatgttggcagaatactcatttatatatatatgaaatcaataaatcttaaaaaagtagacttatgggctggagaaatggctcagtggttaagaacaccgactgcttttctgaaggtcctgagttcaaatcccagcaaccacatgttggctcacaaccatccttaatgacatctgacaccctcttctggtgtgtctaaagacagctacagtgtacttacatataataataaataaatctttaaaaaaaaagtagacttattagtgactgtgtgtgtgtgtttgtgtgtgtgtgtgagagagagagagagagagagagagagagagagtatgtttgtgtgtgtgagtgtgtgtgtattgaacctgagcatggtggcaagctgccatggacaagatagggagttttagggtatcctggcctacatagcaagactctgattttaaaaaagaaagaaaatgtgtaaaaaattgtattaagttttatatgactccacatacatatgtgtgtatattatacataattacaagtgggaattgatgtgagaaaattttaatagaaacatttcatcgttttacagagtgggttacttgttcttggtagtttaaaggaacagatgcattacaaacactttagtgggtcttatccttttctatcaaagcccaccaactatttttggacatgtgggtatgttccagccaccttacatacttcattaaaattaagttgttgtagaaaatatttattctcaatccagggcttctctccccagctttgatcatttagttcctggataaaagacacacacgacctttatattaataagcctttattaacactaaggctgggcagatatctaccctctatactattaaaatctatttcctattaataaccctgagttactatgtttcatctgggctcttaactccagttggccagccctcctagccatactttcttgactcgtaacccatggcgtttttctcctttctcaaccttctccctctcttttggaggtctcctttgaccccaagcccaggaacaccaatcccctcctatctcagttctgcccagcagtaggctgaaggcatccttattcacccatcagaaaaaacttgggggggggggtggtggagaaataacttggtgctaaggtcacatagtgtcacttaggtgtacctgcagactctcatctctagggcaactaggtcttgggggcctgcacttagcataacaatacatagcaacagaccaaatctcaacattaagttacaagaaaaattacattttgattttagtatttttaaattttgtcatacgtcaaacatgttttccccatgagcaagcataataggttaaaagcaggttctatgtttttggtagataccaatatgtagctatagatggccttgaatttccagatccttttgcctctacctcctgaggtcaggagctagcagttgttaaatagtgctggaaattgatcaggatgcttctcttatttgagacaaatattgctttgttttgttttgttttgttttgttttgttttgttttgttttgttgttttcgagacagggtttctctgtgtagccctggctgtcctggaactcactgtagaccaggctgactttgaactcagaaagccgcctgcctctgcctctcaagtgctgggattaaaggtgtgcgccaccactgcccggcaagacaaaattggcaaccaattccctagcttttgtttttatgatgcttacctgatctgatattttggaagtacatactttagtagaatacattgttctcaaccttcctaatgctgtgacctgttcctcatattgcagtgacccccaaccataaaattgttttgttgctacttcataactaattttgctactattatgaatcaaaatgtatatgtctgatacgcaggatatctgatagttaacccccagaggaattgagacccacaggttgagaaccgttagtttagcctcttcagagaatgaacattttactttttaggacttttacagacatacccatgttgactggctctgtttttacttgtagtagccgtattagttttgttcttcactgtatagtaaagaattcatccacaggactggtgagatagatgtctcagaaggtaaaactacatgacttgatttttttttttttttaccccccaagacatggtctctctagctctgtctgtccttgcattcagagatctacctgcctctgcacctcaagtgatgggattaaaagcatagctgccacacctgactgatgacttgaatttgatcccttgatctctgacacctacatggaaggagagaacctaacctactattgaaggttgtttcagactgcagcacacatgctatggcagtgcacatgcaggcttgcatgtacacaaacgtgcgtgcacatacacacacaaaatgtaaaagaatgttacgtaaaggaaagatgctatatgtagatggtttttatgagaagtcaagtcttttgggaattggcctgagatttagttttgaaaatatgtagatcatctcagtacggaaaagtaaagaaataagagctatatgaacatggaaactttcatgtgaagaagctggggatagagctcagttgataccgtccatccttctctgcaggaagccctggggtttgtcctcagcactgcataatactgggtatggtggtacatggtgctaattttgggggaaaaaagaagaaagagaagctcagggctatcttcagctggataccaggtttgaggctcatctcaaaaaacgtcctcccacccccttaagcaaggcagtttgggataattttatctatggaacgttatcataggaatggagtaagacagctgagtgtgatggctcaggcctgcaacctcagcaccatagtccctcagggtgactcagaaggatcgtcatgagttcaagctcaccttgtcttaaaaatcaaaacagcaaaactctcctgaaggggcgagcgatgagtcatggttaagagctgctcttttaggagacctgggttccatgctcagcaccccatatggaggctcacaactagccatgactcccttttctgttctccaaggcatgcatgtggtacagacataaaagcagggaaaacactagtatttaaccaaacagttcacatcctccctattccctgaacaaaatcagaaaggacagaagagaaacaatgtttttatctgaactgttactgtcttgtccttttcatttttatcttaggaaacagcattttcctacaatatatataatattttcatagtctgcttatttctatattagaaaaatattattattattgtgtgtgtatataaatcatgtgtgtgcttatatgtacacagaggtcctctaattaagtagcccgtgtagattagaatagacttttattcctggctttcctgggtttttgaccctgagtctgatgcctttgttcacagaaactctttagtatacacccttgtgatgtccttccgttcgttgtcacggctttctcttttctctgtctctttacctagcacctgggcatcattgcagtttagggtatgagaagggatggattctgatgtcctcttctcctgtagggtacctacccgctggttcttgacttgggccgctgtatgctgggtctgacttagggcagtgcacatgcagcttcctgagcagagtgaggtttgcagagattggtgtggtctgcattgtgacactgctgttagagtgtgcaaacacttctaactacgtggggttttggtttttttttgttttatttttttagtctccttggcatctcggtttgatttttttaaaacctcagataaagtaaattttacaatatatccatgtgaactacctgaaggttactgttgttatttatttctgattctgctttttacagtttgaaggtgatactttgtgagcctgactgactcattacttgagtgggtattcagcatctgctgtcttattagcagtccagagcctactgtctatgtgcttgtgtgtaatgcaagcagaaagtggatgagagagaaagacaaagtacaatttgaatagaaaacaaattctctgaatttgaattttcagaatcatcacaagtaaacttatatattatagaacagttcttaagagcatgtttctttttttaagtaattaaaatatggagtttcaaaaaaaatttttcccaacaggtgggaaggagaaaccaaaaacaaatatagaagacttacaaattaaaaaagtaaagaagaaaaagaaaaagaaacacaaagagaatgaaaaacggaagcgtccaaaaatgtatagcaaatctattcagaccatctgttcaggattgctgtctgctgaagatcaagaagccaaaagcatcttaagtgataatgtaaaggattgcattggaaaaaatttggataccaaaaactgtgattcaaaaattcctgataacagtgactttccatttgtgtcattaaaggagccccgcgataagaataaccttagaaggttggacactttggcgttcaggcagctcattcacattgagcaccagcctaacggaggcgcggcagtcatccatgcctacagtaatgaactctcctgcctgtctcccatggagatgcagagatttgcagaagaatttgtgggtttagtgttcagtgaaaacgaaagctctgcggctttctatgtaatgggcattgttcatggggcagctacatacttacctgactttttagactacttttcgtataattttcccaattcaccagtgaaaatggagatactgggaaagaaagatatagaaacaacgactatgtccaattttcatgctcaggtaagaggctttagttttgttttaaaatagcttttaattgtacattttagatagacttgtgtttttcctcttaattttactgtaggtttgaggtaaaatgggaagagtccagtgaaactgtttgagagtaacttcttggtgtgagtttacaagtttaaattttaatttctccttaaaaaaattaattatttatcttattgttattttgatgtgcattggcattttgcctgcctgtgtatccatgtgaaggtgtcagaattggagctggagtttcagacagtgttgagcttcctgggtgttgggaattgaacccaggtcctctggaagtgctcttaaccgctgagtcagcactccagcccccaatttctctttttattctacttaaaaatcagttaatgaaatacttaaggttctgtcctcccgccccctttcagacaaggatttcacttgaattaagtgaaattaatttaacaaggtgtttcccagttcatcgttgctttcaaacctattaatcaaccaggtgtagtagcacacacctttgatcgcagggcttgggaggcggaggcaagtggatctctgtgagttcaaggacagccagggctatatagaagagatcttgtctcaacaaaacaaaacaaacaaaaactaaccctaaccctgtaaatcacctgcagtcatcctctttgtcaacgccctgtaagtgcttagcactgggtccatcaaataagcaggtgctaaatacgtgctggctggtaaaaatatcctgtaatatgaattaatcactacttagtatgtaattatatgaaaatattagtgcatatttgcctcagttactttctattactgtgaagagacactgtcaccaaggcaacatataaagagtatttatatttaattgtaggcttgcttatggttttagagcgtagtctatgattcatggtgggaaatgaagtggaagggatgcatggaaggcaggcatgttcctagagcagtagctgagactttacatcagatccacaagcagggcacagagactgggcctggcttgagcctttgagatctcttagggacacaccttctccaacaagatcagaccccttaatccttccagaagagtccaccagctgggaaacattgagatctgagcctgaagaaggagccattctcatttaaactgccacaatactctaagctcatttccatttcctaatcttttctacagaaaattattttagaaaccagagacaaaactgagttttcaccttttaaaagttgatgtggcgcccacctagagccagtgtcttgtaaggggtcaggtgccctggaactgaagatacagacagctgtaagctgccatgtgggtgcgtgtgggtgctggggagtgaatccagggcctctggaagagcggccggtgctcttagcctccgagccatctccctagttcgattagtttttaaaattttttttctggtagtgactgatctaacattctagcttatggggaagatacagtaaaatctcagattgtggtgaacttttctcctaatgtttctcaactaaggtgagattagctaacagactagagagaagtagtttattttagggttgtcagcactgctaggaatagaactaaatataatcctcatttctggcttttctccttgctctggtatattccttcagttgatgctcaagatacactttctacctgaaaaatactatatgttcaagatatagtttccatccctagttcctagtagcatgtttggtgtgtattctgcagcatacagtagcatggagaataacaatatttaaattttaatgtatgtgtatgaaggttattccctaatgtagcatatttgagaattggaaatgaaatgtttttagaatgataaggtagcaatagaacattcattactagccaacccatttattttatttcattttctcttactaagagtttaggaaatttcaaaactaagaaatcaaatcaaataaaaaggtgtagataactgagactgttgtcatttagagtgggagtagctttgggctcatgaaaccccatgagtccaaaagatagcacagtagaaagtgagcatacgttctttttctttcgagatttgtttattttatgtatatgagtacactgtagctgtacaaatggttgtgaaccatcttgtggttgctgggaattgaactcaggacctctgctcgctccggcccctgctcactctggccggtgagcacactttcttagatcagttctatttctagtctcttgttcttccaataagagctgttctgtttttgttgttgtttgtttattctgaaataggaactcatgaaacatggggtggcctacctggtttctcatagctagctaaggttgggattaaattcctgggtgccttgccctacctcctgattgctggagttacacgtgcttagcacatctagttttaaaagctgcgtttcttaaccttattccttctaggaattgattcctctttccctaaatcttttagtgaaggatagagtgtacatggaaaagtatgcacattagagatgaatattcagaaagtgagcagacccattcagttcaaaactgaaagtgactagagggctttcttgaactagtctttagcactatctgctaaccccaagtcctaacacataaatatgtacagttttatgaaactattatctcatgtgtatgtgtgtgtagagtgtgtatgtgtactgtgtgtgtgtgaaagagcctgtggaggtcagaagaggctgttgaatcccccgagctagttggacatggctgtgagctgcagtgtgggttctgggacttgaaccctagttctctgaaagagcagtgaatgctcttaaccatcaagccatttcccagcccacacataaacatccaggtaactaaccattatactgaattaaaacaaacatttttacatattttgaactcagatttttgaagtcatttaatgatacatatattgttacccttttccttataatattgtttatggcatccgtcttgtagatagcaatgtttgttttcttactgtttgtaatattccactgtaggaatgtgccataattgtcctgattacctactataagtggacatttgagttgtttttcttttggtgttattacagcagggctctgtgaatacttttgttcatgtgcttaatgtgcacatgtatttttgttaaggtatacctatcatttgactattagtaagaaaaagtgcacagatatttagttttgatagattaatgacagtttttaaaaaactcttgatatcagtttctcttacagtcagcgtggaccatacttttggtccatcttttttcatttagccattgtggggactcacagtactatctctctgtagtttaatttaaatttttctgatgactgtgtgccaggcaccttttaagtattgttgtatagttatatactgtctttggtacagttttgttctactcttttgcccattttttttttaaacttgcttttttcctaactagtatcttaaataaaaaataaattgtagatcagtctttttgttcagccaaataatattcacttggtgtcctgatttatcattaataatggcttttgatgcctaagagttaagtttaatctaaaatataatttttctcaattatgactaatgtattttgtgtcctattttaaaaatctttgcctaccccaaagacaatgaaatattcttctgaattttcttctggaagctgctttttcttgcacgtttaaatctaaacttcatctcagattggttgcatagcaggatataaagaacaggatttgggctggagagatggctcagcagttaagagcactgacctcttccagaggtcctgagttcagttcccagccaccacatgcatggtggctcacaacatctgtaatgggatctgatgccctcttctggagtgtctgaggacagctacagtgtactcttcgcatatataaaataaataaataaaatcttaagggcatgcctgtgatctgagtcctcaggaggctgaggcaggaggattaccagtatcaaaattagcatggctgcatagtgtaactctgtttttaaaaattcagagcgtaagcaaggttgatagttgtaaacacagcaggcatgcagaagacttagcatgagctgaagagatgcccactccttggcacactatattttctccttgttggtgagccagttgatcatacatgtgggtcacttcctgggcttttattctattgttctttttattattaatcaccagggaaacacattccaaaccatggatccatttcactccatttagaatggaacagggcctgagagatggcttattgggtaaggacccttgccatgaagtctcaaaaacatgaagcaaaggagagaagtgttggccctggactgccacatgcatgctgtggggcatattcctcttccaccttcaagtaaatatgtaaacgtaacttaaaagtatgtgtttttcttttaaaccttaaaaagtacaataatggctattataaaacaaaaggcaacaagtactattgaagacagagtaaagaaaatccttatgtactattggggaaaacgttattagcagtgccattagttaaactgtggtatggaattccttaagtatgtcaaagtgaagcccttgttttcacctcgtgtggtcctgtggccccacagctcaggcggtatatctgaaggagagtgtggtaagtctctgcactgatctgtattctagcattgtttacgatagctgagaaaggatagagaaatacagacgtgctataaatgaagtctgtcatttactaaagcattacattcagtgaaataagtcaggcagatcggccccacaggcctcttgcctggaacctaaaaagttattctcagaagctgagtgtagaaagaatggtggtgagcagtggtaagaatactggacaaggaatgtggtaagggtcagtcagagagaacgttacagttggctagggttaagaagaacttgcatggggctggagagatgatggctcagcagttaagacttctggctgcttttccagaggtcccaagttcaattcccagcaatcacatggtggcttctaatcacctataatgtgatctgatgctctcttctagcatgggggtgtatatgcagatagagcactcatatatataaaataaagtgcttgcacatatctaatctattagaggcaggtatcagaggctgtaattgggaaagtatatttttctgtcattaattaaaaagtgaattttattgaacttatggctattttaaaaatataatgaataaagtggctgaggagctgtcttaggccttaaggcgcttgctgtgtaagcgtgaggacctgagctctgtctctcgcaaccatggtggcagcacactcctgtaattgtagtcctggggacgggcgcggagacaggaggatcctgagcagttagcaagccagtctggccagattgaaaagtccagcttctgtgacaggtaaagaatgattatgactgaggtagacccctcctccctccgccacttttctatcattcgttaccattcttctgtttgaaagtatgtgctaaatatggcatggaatggctcccccttgtggcactttcctttatgtccatggaggttagattgcatcagtaagaatgtgatgaccagggagatagcaggtaaagcgtcttagttagggttctattgctgtaaagagacaccgtgagcaaggcaactcttataaaggacaacattgaattgaagctggctactggctctgaggttcagtccattatttattatcctggaggaaagcatgccagtgtccaggcaggcatggtgctggaggagctgagagttctacaaggcaaacagaagactgtcttggggcagctagtaggagggtctcagtgcccactcccacagtgacagacttcctccaccaaggccatacttcccagtagtgccactccctgggtcaaacatattcaaaccaccataggaaggcatgcaaagcttgatccctggcacctacctacatgtttcaaggagagtcagctcccatgggttgtcctgtgactccacggtgcatgcttgtatgtaccttggcatatttacatatattctaatccctgccccaaattccccttcccttcccacagacatacacacactaaagtaatgtgatgagcaacccacttactgaaagtaaggcactattccctcaacagagcattactgagacacaaggtcctctgccgtactctgctggcctgaagatccagcatttaacctatacgtctgtttactctaaattgagctgatagacaagtttaaatgtgtgtgtctttatggattactattcagaagaacttttaatgtcttggggtgttgataggggcaccgaaacaactacagataaacagattttgaaataaaaaatactttttgcattcctagaccaaatacggtttatttgctatgagcatacatgggaacctctaatgcagaaaggtttttctaaaattacttgattatagaaatgtagtttcaaggaatatactttgggaaataacaggttgtctcttgtaagctatttttcatgttctaaaccctcatcgttttgccctcctgttggagtgatctttctatgcaacacaaacagccttgagtcttaggagctctctgttcctgatctccttttacagcaggtgcagttttgttatgtgtcgtgcaggtgttacaggggttgctcttttacctaaagactgtatgagcagagattaatagctttgtagttcaagtgtaagtaattccttttatttatctaatatttcagatattttgttagtcttttttagaaacaatataggagggaagtaaaagggcagcattgataatcttagctttttagagggagacttcaggggagagttagattgagcatggtcgggtggggcctgaactgggaggtttgcatatttgcatgctagacactctaccagctgagtttcgtcctgcatttcatttgtatttttaaatgagttaagatgcccagcattaggctggagagatggctcagcagataagagcactgaccactcttctagaggtcctgagttcaattcccagcaaccacatggtggctcacaactatctgaaatggaatctgatgccgtcttctggtgtgtctgaagatagcaacagtgtattcatatagattaataaaagtaaaaaagtgctcatcattttttatctgttcatgttatatgtcttcgaaatggcaccgtgtaaatacagatttttgcaaatatgactatgtgtatcattcttgtctttatgctttttttgagatctatctaccccctgcccaaatatagaggaactatagagatagattttagtaaagatgcagtcttcacggaacatgtacactataccttacctctggtttctgtccctgtgtggtcttagtgatgtgacacaactccctagagctgctgcagctgtgcctgcctgctacttgttactactcctcccccattccagatctgtgcgccttattcttttgatgtgatctgaaagacttagaactgtgcctgaagtaggagtacctatctacaatgggggagctacagtcttgtgacatttcttttaaaaatatttagactcctctgatccttaccttttcctttcttgggtcagtcatagtagggactatcatgggtggtttttagagaatcgaggttttattttcatgttgtattatttaactttactgtagtgagtaaattttgaatgtcacattgttacaataaaatgggggtcactaaaatcaagaaccatgtctatttttatgaaaagcacatgcattttgttgtttatttgctgttcgtatgtttttactaagaggtaaatactttttcaccttgaataaatacatcattgttaatattttatcatggtcaaaacttcaagtgactttttctacctaatcctaatttcctatggatttgtctggtgggttaaatgttgcacttcttcattttaggttggattaataaagcattttaatcagtgaagtgatcattgtcattgaagcagccagctccagtcagatcagttgatacagtagaataatgataccttttgcactgttagtcctaacaagttttacccatttttttttgttaatgatacattaattcatttataaacacacagatattactttacaagggctgagtattaatgtttttaataattctggttttctgttattagccattgtcttttaaaacttaccactggttagcaacgctctctccctttttcagctggcctcaaattcctaatgctctctctgttccacctccagggctgggttatggatctgtacctggctcaacctctgccccctttgttttttgaaagatcttattatgtagctttggctgccctggaaactgctatctagaccaggctagactcaaacgcatagagatctgcctgcttctgtctcctaagtgctaggattaatggtacgcaccaccacatccagccttcttcctcttttctgtggagtggaaatagttacctgactataaaaacattacatgacagtggtgtagaagacaacgttttactttattagaaagagaaattatttcaaatatattacatttacatactagctaaattgactttagacagtgttctttactggtgtcttttgaataaggcatttaattcctgcatttaggacaaaaagctcatttgactttgctattcaggtgtattaatcaaactcatgtctttgggaaagcttgtatcaagttacacttactactttagaagtattcactcattgaaaaagaaattttaaaggctgtttttctccctctcatgctaaaccatatacattacttaatgagtcattgttaattctttgatgtagtaaagaagaccacatctcattttccacaatttaataatgtcttagtatttttgtctttttgtttgtacatgggtaccaagattcattggtgtttagaactgattagtgacttaggtgatatttatatatctgatttaaataaatgtatgcacaggaaatttatttgcctgtatgacatagaaatattacctcactaaaatgccttttgttaccttttaaaacccttgcagaatttgtgtcttatagtgtaagttgattttacttcttgtcttgtcttcccttgcctcttactctccactgtgtgggaatcagccccagtatgttacaatggcgaggcaagggctcttccttagaagatctggaccctagcccgaatcccactatttagtagccttacgatctctcaggactaatgctgtcacaggcagatctcaaaccgaggacgggagtgcagagtcatttaacagaggtttgtgttgtattctggtgtgttcacaagcgttcagattggtaagcttcctttgttaaagactgctttactgaaccacatttatggccacgtttcctactgtgatgctgttagtgcatttcaattcctagggcctgagagtggtggaaagttaagtttaaacttttagttttgttcatatagggtagtggttctcaacttcccggatggtgccacctcatgttatggtgacccctaaccataagattattttgctgctgttttgtaactattattttgctactattataataaatcatgatgtaatatgaaggatatatgatatgtggcttgaagggggtcatgacccacaggttgagaattgctgacatagcgctgataggaccttttaggagagaaaaagatgagaccctgactataagatggagtacaatttatacattttgtgacttggggtttggtttgttaatctgagaagtgaatttttaataaataatgaaaagttaaacttggaatacttgtaaataaacttaatgttgagtataataaaaacgtaaagaatcagtacttgatgatgataaaaacaaaattctgatgtcaattattctagcattatagaatatttactattgtgtttcttaaactatgtgggttggaagtaaggtacttcacatatgttgatactacgctactgcgattgtatagatttataacatcacaaaagcttgcccatctagggttgcctgcattgtagacttagtttaaccaagggtcatcctgggcaaactaaacagttgatcttctacatatggtggccacaaagtcttgcttcaaaaaaaaaaaaaattgagattttgctcaaagtttgttaagaagcttaaaataattcacctttttagtgtttatatatttaaaaataccatggctctctgcggactaaatttaatgtaccattgaaaatccaggtgtgagtgcacagggtttaggctgctttgttttgaacatgtgggcgtcacacaggctggcatgttaacaggtgctttatatagacgtgtgttttgttttcttctgcagtctgggcttctgagacgagagcaggagcttatgtgatctcggagttagctgtcgatagcagaggtgaatttgtgccttaggattgcccattctgaatttcaattatttcatcagaattcatgatagaaaattgaactggcccttagttaaaatcttggtccaggatgaaagatcatctttagtggtcttttgacacataaccactcatcatgggggtaattagacaattgccactttagaaaaatgaaggtgtgtcattttgaatctttttggtagcaatttgtattaaacaacaactcttctgctattaggagatggtgcagtgacttatttatacagtgttgtctctttaaactctcctctgtttttgtttttgtttttgaagatagggtttctctgtgtaacagagattaagatgtatgccaccagcctggctctctttgtctcttttaatgagtagtttacagagaaagaaatgaaaattagctggcttgattagttaatatatataaacatgtatttataaatatattattataagtaatatattacaaataatatattaatatttataaatatatttataatcactgtattattacaagtttcttttgttttttcttgccttgtattatgttctagtagtttgaaatgatatgattcattgttacgcatcagtagctaacacttcatgtctaacttttaattaaattcatgtcactcaggtaaaaagaacatattctcatggtacttacagagctggcccgatgcgacagatcagcttggtgggagcagttgatgaagaagtgggcgattacttccccgagttccttgacatgttagaggcgtcaccatttttaaaagtaagagaaggtcttggcattctaaagtgtggtgggtattgctttcggttatagctgatgccaatggatggctgtttgtttagaactatcgtgatctttgttttgttttgagacagggtttcctgcactcacggttatcctggaattcactctgtagaccaagctggtctccaaatcacagaactctgcctgcccctgcctctctcctgagtgctgagattaaaggtctgcaccatcatgctcaacataattagaaaaaagtttatttaaatcaggggaaaggaaggaaacagtgatcttgtgttacgtatatacgtaacttctcactcttaactgtaatggccaagttaaatgttacaccagcaaatgcccttgcctgttactgccctgtgtgtcttgtagaccaagaagtgtaggaaggatgcctgttaaacactttgagcacaaagggggtggggggtggctgacactgtgggaaactggccgaggtagggacttgtacagttgtataaaacatcgagttcacgccccatcatagtctataaaagttctaatcaaggcccatttgatatttctttaaaaatgtattcattattgttagtctatgtggggtagggcacatatgtgcatgtggcagtcagcagacaacttggtggaatcccttttttctttcctttcttttttctatggagtctcatctctccttctttatttgcatgagttgtgggcacagatctctagttttgtgtgcccagctcttacctgctgtgctgctgcactcttactatgggttacctggggtagcccattgagagagaaatctctgacctgggcaggtaagtttttaatagtcagtaattctgaggtcgtgaactctccctgaaatgtaggccctagtccacagcggagtgtgagactagtctaaaacttaccacataggcatcttctgttttcactatattgtttttttctcctttatagcttttaaacgttgttcctttttcttccagctagtcatatcaaggtacattgattgtaatcattaagtggtattttatagaatggctgcttcaaatcttattttaagcattctttctagagaaataagttctttcaaaaggtgattaaacaacaccatcattccatcatagtgaacttgtgatcttccattctccttcacgtttaaatttcaacttagtttctgctttaagaccagtaaccttttcaagaaactactgccaggtgctggcggcacacacctttaatcccagcactcaggagacagaggcagttagttggatctctgagttggaggccatcctagtttacagagcaaattccaggacagtcagggctacagagaaaccaaaaacaaaaaagaaactactaagcaaatataagcatatatatattttgatgttgtatttgattatgacttattaaggaaacacttagtttttttttttttttttttaaagatttatttatttatttattatatgtaagtacactgtagttgtcttcagatacaccagaagagggcatcagatctcattacgggtggttgtgagccaccatgtggttgctgggatttgaacatcggcccttcggaagagcagtcgggtgctcttacccactgagccatctcaccagcccaacacttagtttttttaaactcaaatttgttttcaaggttgttgtggagaccgcatgcttatttggcagcttattagatttctgttgcctgtgttagaaagaagagtgactactgataagcatgggccctcacctctaggagggtggcccacgagatcttctgagctgaactgaagcagaatacgtgacaatagggatgtgttaatacaggatgtatttcagatgcttaacttgtatatgaatttgtgtgtaaggggggggacagtttttctcttcctccagtctcattttagctttttatttattaggacattgtaaggattcttacagggagaattagtattttttaaaaattatcaatttgtttcatctgttggctttcaggtcgagttttaatttttccttttgagattataatataattacattatttttcctatccctacccatatatccctccatgaagtatttttaatatgcatttgaagatatattttgaaaataatttatgtaattatttatttctagtgtacattgccatggggaacactatctagtctaaaattagagagtcggaaagatagtgatgatggtcccatcatgtgggtacgtccaggagaacaaatgatccctgtggctgatatgccaaagtcacccttcaaaaggaaaaggtttgttgtacacatctttatcagtgaggatggacttggcgtgcatgtatgtgtgtgtctactgtagaagaaaaagtttatagcataagttacagaaaaatatgaaaaataatgtcacatttctaaaacaaagtagtaaaggtgcccacttatctatccaaacaaggaccaaatgggccatgagataagatcaagtaactctccctttagctgctataaaacagcagctactgcactttagctcgttggccccttttctatgcttgtcagatgctctcctgaaacatatttcaataaattctctttatgacttcatgtcctttacaaatctcttactgtttgtgtttctggccttcacgatgacaatatcaacagagtagccagtgataaatctgattatttgaatcagggtcttattacatattctgaattggcctcaaatttgagattctcatgcctgaatctcctaagtgctggaattacaggcttgtgtgaccatgtgtattttattatagaattacaggcttgtattaccatgtatatttttttattcttttctttatgaaaaaaaagaaatgatctgtgaatatgtctttgtgttgatagtgtggtggttcatgcttgtgatcccagaattcaggaagtttaggcaggtagattattatttcaagcacaaggagtcagggcttgtgagtggctgtatactggagttcaaatttacaaaagacaccctagataaaaaaaaacagtatgatctttgtatattagacagtggttaacacagaaactcacaactggtcagagtgcagtgaattggtgtctggggagtactcagccctgaatgtgacattaataacactgcgttacccacaaggctttacaagaggggagagagattgtaagagctagaggtcagagagggccccagtgaggtagtgtcttctggagatacaggattgctacattcatgaactcagaacaaccatggaccagcaaaagatcaagccagttaacattctagcacagagggccaggaagtcatgagtcctgactcctaactgaagaactgttggcagctgatagcttctgagggaaggagaggccagttttctttaaggctctggtccccggtcagttttgtcccagagaatgtcttcatgcccatgagtatatcggcagtacagaatagtcttgttgggtttttaaagataaagacaaagttggaaagaggtagggatgtgggggagacatctggaaggagttatagggaggagtaggaagtgaatatgatcaaaatatattgatgtgacattctcaaagaatcattaagaatatatttttaaaactaagtgtattgtgaagaaaaggttagaaaaatatactaagttaactttttgaccagaataggtggtataaggggaagtagtggcttttctgtagatatcgaaaatgatttaaatgatttgattacatggattattttaagcagcagaacaggtctggagagatggctaagtagttagagcacttttattcttagaagattcaggttccattcccagcacctacatgctgctcagagccatccagtgctaggggaacctataccctcctgacctctgatggccaggtacacacatgatgtactacatatatgcaggcaaaacattcatgcacatgaaatgaataaactgaaatgaaacccaaaacaaaacaggacaagctgtcctccagtaaataaatggtagggttcttgcctggcaggaactctgttgggcttgttacatagtgtccactgtttagtaaacaatgcagtcaataagtaaatttctaaattggtaactgttgtaaaattatgtttttcagagcttattcttttttcatttttgaaagattacttaaaaattttaaaattatgtgtttatatttgaatatgtgtctgtgtgtgggtatgtataggtgcctgtggagctggagttatagtgtttctgagccacctagcatgtgctctggaagctgacctctgctcctctgccagagcagtcagtcctacctttcaactgcacaaccatctctccagccctgaacctgacagtcctggctgtcctggaactcagtgtgtagaccaggctggcctcaaattcatagagatctgcctgcctcagcctcccttcggctgggattaaaggtgtgtgccaccaccccctgcctgtttcagcatctgaagcaagtttaatcagagtgtctgttgccagaataatgtagacagaaacttttcgatgtagtttaaaagggctccccagtccctagcagagtcctctgtaccttcctgatttatcgcccagagtatatggtgcttccgtagtctgctgctgtctaactaataacagatacacgtgctacatatatgctgaaggatttgaatgtgatattagctagaagtccactagccttctatataaagtggtagcccgatctaacttactgacataagaatattaatcacaaagagcagaaaagtatattacagtgtggtaagcctgatgcaggatgcagagcagcagacagtggagtggggaattggagctgagaatgactccggagggtaactgggcagagggaccaactgctgggcaatctggaatagcagccacagactaccctaccgaggaggaaaatggtagcttctgggcagccatggtttccccattttcccattctatagcctaacaggagagatctcttcagagagcgaggatagtggctgacagactgtgtgcttttgaactctagcggaggagtggcccagaggcagtggaagattgctgtcttgcagagcagagctataagcttgctttatacctcagtacactgtggagtcactgcctaggtttctgttgttaacctctttttcttttaatcctttctcgttaatttattattatttttttatctttctttgaaattctcctaagggtagcaggcagcctcatctgtcactgtaaccttctttattagtctcaatactcatgtagcactcggcctaaaggatgtgtcatgccgcatgatcgtatctgtttgttctagtatgcagtatattcaataagtgcacggccctatacgaagtagctccaaactccagggccacctgtcacatgtgtgaaaggtatttcccaaactggggaattgatgtggatactttttgtttgcctttattcattttaaaaattaaacatctcattttgtctgaaattatgtgattatgaaatatctgataaggaaacaagccacagcatgtaaatataaatctctttctaaaaacagaactaccaatgaaataaaaaaccttcagtatctacctcgaaccagtgagcctcgggagatgctgtttgaagacaggacgagagcccatgcggatcacataggacaaggctttgaacgacagaccacggcggctgttggggtgctcaaggctgtgcactgtggacagcggtacatatgactactgactgctttgcgattgatgattttatgtgcacgggtattttacctgaatagcacctgtgtgtagtgcctgctgaggccacaagaagggatctggtgctctgaaactggaatgacagacagttgtgagcacatgggtgctggagatgaccctggctcctctggaagagcagccgttgctcttacctcctgagctgttgctgcctcctcactagtgcttttttgggctggtgatggttgtagtggggcatgaaccagggtcttgtgcacatcaaccactgttattttatcactatttttctttttaaattagatttaatttcattatttttgagacaggatattactatatagctggccttattatgtatgactggcctggaactcactatgtagatcaggctagcctccagctcacagagattcacttgtctctgcctcccaagtgctggaataaatagtaagtcccatttacactcagccaggctgggcagtggggcgttggtaaagggaaaactgggtttccgtggtgttcactatatgcccatttacaaatgttgtctcagtttacttttgtctttttcttttccttacttatatatgtattgtttttacttatatcatatacaggaacacattatgcagggccatcagtttagttagtaagtggtaagttgaagacccattcctcttgtctctgcttcatcctgtctctgactgccatagtattagggttacagttacagggagtttatgcctggcttattgcatgggtgctggaatccaaattcaggtctgcagcagcaaatgctattacccattgcaccaactccataacttccagaaactaggttaattcttaaagtactgtaaaaaaatgtgtagcttttaagattttgcaaagtgtaatgtgtaactttccatataaggaaataatctttttaaggacttctaatgcagcatgctcttcattaaagagaaattgtagtactgccttatagagtagagtctagtgctggtctcaccttttttgtttgactgggaactgcctctcagcgtcagcctggaggcttggagctagctagcctcggtaagccccgctgctgtgttctagtgtgttactattaaagtggttttgttagtcctgtaagagccatctagttgctaccagtgatcctccaaggagtaggagcctgtttggaccgtgcaggtccatgcagcactcttgcctggtctgttacaaggctgtgtgtctttactgtgtttgcatctgtcctgatactagggaagctgctgtcgcttgttttgtgttctgctgtttttttctttatattaaggatcaaagtgtcattctctctctccttccttccaactccctccctcccttctttctctcttatttttctttttaaaaatttattcattttatgtatgagtgcactgtcactgtcttcagacacatcagaagagggccctggattccaagacagatggttgtgagccaccatgtggttgctgggaattgaactcaggacctctggaagagtagccagtgctcttaaccactgagccatcttttgtttgtttgggtttttgttttgttttgttttgttttgtttttgtttctggtttttgaggctgggtttctctgcatagttttggctgttctgatttgctttgttagaccaggctgcccttgaactcacagacatgcctctgcctcccacatgcctggctacattaaattgttcttagagctatgtttagtatcagtttaagatttcaatgcatttatgaggccagaagagggtgttggatccttgggaactggcatgatagacaattgcgaattgatttatgtgggtgctgggaacaaatccagatcctctggaaaaacagtaagtgctcctaactactgacctgtctctctgacccctaatctagttaggtagactaggctggccttgtctacacagagatctgcttgtctttgtcttccaaatggtgggattaaaggcatgtgtctatatgcctggcccttaaacaattttctcttctcttctcttctcttctcttctcttctcttctcttctcttctcttctcttctcttctcttctcttctcttctcttctcttctcttccttttctttcctctcctttttctttccctttcctttctcttttctttttctcttttctctctcttctttcctttcctttcctttcctttttttctttttttctttctttttttttttttttgaggtagcatcacatcacatcatgttgcctaggctaaacttttctgcctatgccaacttgttttctcaggtttcttgattgctgagatgacagtattctgctgtgtctagtttagcattgatttagatgacaaagaactcttctatagataggacagggtttgtgaatcattaattgtactacataactatataagcattattaagacaggacttacatagattcgtatatttggggtttgcttggtggcgcatgcctttaatcccagcacttgtgaggcagaggcaggcggatttctgagtttgaggccagcctggtctacagagtgagttccaggacagccagggctatacagagaaaccctgtttcaaaaaaaacaaaaaaacaaaaaacaaacaaaaaacccttagtattcctttgtaaaaagtgtgtatgtgtgcaagcgcgtgcatttaagtgtggatacatgcagaggatagcttccatgttagtctttgccctcacctgtgagacagtgctgttgagctgctgggcatgccaggacagctgcctgcaagctacccgggattctcttgtttccatctctcagcttgccatgtgagctctgggatgcttgtcacgtgctttacctactgcgccatctccccagctcatgattcagttggtataatttgcatacaatgaaacatgtcccaattttcagtctcttgcgtgttttgactgacttatttaccagtaccacagggaagatgaacaagtcagtattcttggcagctaatcacctcaggcactttccttttcacctcgaatacccactaatctacttctttctgtctctctaggttggtctgttagttacttctagtgttactgtgataaacatttctgagaaacaatgcaaagaaggatgggttgattggacttacacagtcttagaggggttagtccacggtcatgtgctcccatgcacttggagaggacatcgtggtggcagaattattaagcaatttgtgttttcctttcagtcctttaattttcttctggttttattgtctttgaaaagtctgcattccagtgactgttgactgtcattttctgtatataatgtcatccatgatcctctgtcactgaaccttaggaatctgactctgttgtggcatcaattttgtttttgggattgtattttaatgacagcatctgtccctcctctttcctccctgcagacccttccgtttatgcctcacttctcgctctatcagtcattgttgcatgcatatgtgtatttgtatgtatagacatattctccagtatgacctgtggagtccatctaatgttacttgtgtatgttaccagggctgaccactgggcacttgacagccagttagtgtgcctttccctgggaagcacaagtcttctactccccgctttcctcagtcgcctgtaattctttgtatagggttgaggccccatggctttccccgatggagtttggcatgttgtggttgtattggtgggactttacggggagcttttgatattactaggagacacagtctcacagcagagcccctggtcatctggctcctacagcctttctttcggtcttctacagtgttatcctgagccctaggtatgggagtgttaactgagactaggcgctacaactctggattatggttttcgctagttgtctatgtcaggctagatacaccctggtatgaatttcttttcatattacattgcttggaattttacttcaaaaatttattttgagcatctgaaaatgtatctgtatatttctgattgaacaattttgaaaattttcacaatttatataaaaatttaatgtctccagtgaagaatatgaatattttaatgaacatttcttaatttactactaagtctcattaatatgcacagttaatatgtactagtaattacagcaatgaaataaaataaagcaagagtcacttaggagttgtatgtattccatctaatactactagacccaacactcctagtgcccaagattctttaagattgggcgtgtccaagtagacagttaatattttctatgaacaagaaagtattgttccccccttccctcttgttactctagctcaggtgataggcatgaatcacctctgcccttgcttctaattataagaattaatggtattttaaatgtacatatttatagttacagtgtaatctttcaacaacaggtatgcactgtaacagtcagaactgggcagctgctttatctagcacttcccacatctaccatagcatgcaccatttttgtggtgggaatcaaggtctccttcctgttttgcaatatacaattaagtgttaaccgtagtcaccctcctgtagcctcctgaacatttccagttactcttcttatccaaaccacctttactcaccctccccacactccataccttacttcctcctgctaatctctgataaccacattgtgtgttttgccaagatcagctctttcagtgcacatatagaactgagaacatgaggtccatgtgtttctatgcctgcttcaacttctttcatgcagcatttgcaattttagtacttaatttaaaggacaattgaactatattttaaaatgagatatttagtttttgtggtttgtataacttacaaagcattacaattctaattgtaaatctattatatattctaatttttcaagatcttgtgacagcaagagtaaggaaagttgttagtctgtttaggttgaaactcatggtgtaaactttttttttttaagatttatttatttatcatatgtaagtacactgtagctatcttcagacacaccagaagagggcatcagatcttgttacagatggttataagccaccatgtggttgctgggatttgaactcaggaccttcggaagagcagtcagtgctcttaaccactgagccgtctctccagccctgtaaactcttgatttaaatgtataaatttctttatttgtagggagattttagcattgatcataagctagttttacttgaatttattaaggacctaagagaataaatcatgaaccgaagatttcattattatcattctcctctacaggcctgatcaaccccgagtaaccaaagatgtaatttgttttcatgcagaagatttcttagaagtagttcagcgaatgcagttagacttacatgagcctccactgtcccaggtaaaacttaagtaattgtcatttttcacttagattttgttgtgcaaagattaacctgtattcttgtttttttcttttttctttttagtgtgtgcagtgggttgatgatgcaaaacttaaccagctgaggagagaaggcattcgctatgccaggattcagctgtatgataatgacatttattttattccaaggaatgttgtccatcagttcaagacagtttcagctgtatgcagtttggcatggcacgttcgacttaaattctatcacgcagaggaggacacttgtcacagtacaagtgaaagtactcatgaaaagggcatagcatcaggtcccacatcatcagttctgggagctcacactgagaaccaagcctcctcagactctgtgttgtcagacaaacttccttctaagtatgaatcacaacaaattaaacacgaacctggtgcagctctaagaatcaaggaagagcctgggatggctcccatacctgaaaagatcagaacaccaaataacacggaaggcaagaacagtaaggcgagactggatcgcgctcagttttcagattttcacattgacatggattctgcatttgagaacaccaacaaagacttaaaggaagactcgtgtcctggcagtgtcagtaatacagttgatacacagcagcatagttctgtacgttcaagtcaagacagaagtgaggatgacagtttgtgctaaatttgtacattacgtatagccttttctttaaaaaataatttgtaatgattcatgaaatctgaaagcaagcctaggaattgctctcaagtctgttacaaaatatagttgatgtagcgttgtcacattcctcagtgcctgtccataactgtgaagtatcaagcacttagggccagatgcactgtaaacattgcaggcggaaacacacaggagtctttagaaaagtcattgagttggagttgtaggctttagaatagagctgacaaaatcatataaatatattttttgtaatatgagccagaatttttttgacaatataaagtttttccatagagcttatttataccaactttttttttcattttaaatgtcagcactgtagtgtaaatagctttacaaaacctttttagtgtgatttatattgaaatgtgagccacttaataaaggttcataataataaatgctttctgttgagcttgcaaaaacatactgacaattcagtttgtttgatatattatgttcccgttaatatacatgaggtgaagtgatggagggaaaatgtgtgttccaatctagtaaatatttaaaatttccatactgtacaagcattcagaaagccacaattctgttattaaaacatatacatatggattgtgtgtgtatgtgtgtgtatgtgtgtacacgtatgtacatgtgtgcttgggaatgtatatatgtacattgttttgcacaatttcttaaattgatgaatatataaaagttcttagtgctacttcctggattgtattctaaaatatttctgttcagcagtaagaaaataatttaattaatagagttttagaagttgggagaacctgtgttgatggttttatccttctaactaatgaagtcaatgtggctggagtctttagccctagtgtaattcttttgtgcaaataataagtttagaaaattttctaataagcacctatatgtttagtaatagttgacttaaaaattgacatacagaaagtttaattaggagtaattaaaagtcttttacattttttcatatcacaaaaatgaacttttaaaccaagggcagtgacagtgacccagccatcattcacagatgtgactagcaaacactgtcagatcatcttcctcaggannnnnnnnnnnnnnnnnnnnnnnnnnnnnnnnnnnnnnnnnnnnnnnnnnnnnnnnnnnnnnnnnnnnnnnnnnnnnnnnnnnnnnnnnnnnnnnnnnnnnnnnnnnnnnnnnnnnnnnnnnnnnnnnnnnnntgtaggagacagggtggccagtgcctgcacggtgaagtagaccatctgccacccatggacttgagcatggttccagtctgcttccactccgtcctagtgattgcaaatgccgtggtgtttgttttagtctgggtccctgccttgattggcgactttgagttggctctccttgtgctgcgtggccttttgggagaccgctgttcccacctcagtgggctccactttcacctcagttttggtaagccatcaaagctcatgcttctagctggggagaaaccacttagagaaatgtatttcactagaactgatgaaaatcagcaccagcagcagtgtcttgtgtccttacttgaggtgggcacataaagtagaaaatgctggtggcttataggaggatctcaggatgtttgcaggtggcgtggaggtgggggtggggattcatggagcagagaaattaaaaatcgtggcagtgtaaatagggtttggttttctatgtaactagctgtctttcactgccctcatttaatctattctaagctaaatttagggttcttcatctttcttaaggtgggatagcaaaaattcttaacatatgagtattaagaaatagggagggatattgttaaaatttagtttttaaattgacggtgatatatttatcacagtatgttttatttccagttgcacatatgtaggcccactgagatcatactgtaagaaaacactgttagggtatttccaaaacatatgagccttaagttttagcttaaaggaaggtacacctgagatagcatcgccactgcttttaggtatagtttcttatgtgacccttagttcacatagttatccatacagattaattgctctgtcaaatgcatacatctctgaaggtgaagtatgtgtaaaccagcaggctcaagatttcaagataaagccttacagacttgaatcatgcttacgccccaggcttacgggttattttttaaaatcctcttcagatgccatctgagaacttgttaactacttttgttacagacaaattcctattttaatattgcataataatggttttctagttagtatactcccattctccatgtgaatataagatttttatttccagtatcttggaccagaacataaagcagtcaaggtatagttttaataaggtcatatgctatatagagtgaatattatataagttattaagtgatatactacagacctttacatcaaaacgtaggtacatcagtggtatttgatatatatactttttccccctttttctaattttatttatattttcttagatgtagtatatatcccatgctcaggttagctatcaaaagaatgaaacatttttgatatttagttgcaaatttacataaagccatatattatcttccttatgactgacgaaactattgaccttaatgatcaggttggtttagcacaacactgtgtattgtatttatgtgtgtatttctgaataagtttgtttgaaatatgtttccaaaataggaggggtaggaaattaaggatgggaaagactttcttaggtttaacttttaaggaatgtacttaatgtattcaaagtaggatttcattttttcaaaattcagttctatgtaaggttttttgttggtttgttttttctttttttgtaaataataaattagcattgtttggtaactttgcttttttgagggtattggaagggacaatttatttatatgtaaagtgattatttccagttagccaaggtacagatttggttttggcatttgagaggctattttccttgtcttccacctttcaataaatactaagattgataaccacaatctttttacctttgttttgtaattattttcttggatttgacattatattttagtctcagacttcctatttctgtctgtacctactgtcttctgaaatagcaaggaccgaggtgggggtgggagtctagtcttatatttcaggttatctatctttctagcttgtcatggacttcacacccaattaatgaatatgaacgagctgcgagaaatacatgggcatgtagaatttatgttaacagaaattataagcaaaatgtatgtttctttttaaaatattatagctttatgtgtatgggcttttgcctgtatgtgtatctgtgcatctcttgtgtccaatgcccagagaggtcagaaagggctttggtttccctaggacagtggctctcaacctgaattctgcgatcctctcttatgttccttatgttatggtgaccccacctataaaactgtttttgttgctatttcatacctataattttgctactgttaggaatcaaaatgtaaattcccgtgttttctgatgtctgaggtgagtcctgtgaaaggatcattccgtcccttcaggaggttgtgtgctgctaattgtgctgctaatgtgctgagaattgaacccaggacctctggaagagcaaccattgctcttagccaccaagccatttctctggcccacctgtgtttttcttcacggtgatcttaaccattattgtgaaaataaaagaactgggatcccaaaattaatttggacagtcttgttcctgtcttcacagaattttcttgttaagattgtgtgtaactgagccacactttgttaagattgcatgtaactgagccacactattatgttaaacatcacttttcttgagtggggctttttatccccattgtctcaggtaaagttcttagacccccgagtggacatttcctcatcgttcctcacttcactgtcccttgttttttaattctcactcttaatttcccacagaaatggtggtgtcagacccactcacatacttcctgggtgctgggctaatcccacagcactcatcgctttgtccttaaagctctgagtctcttctttgtggtggaggcggtgggctttcattgtttctccatggtctctgctctcgtcggcgagctccattcctcaggtcgtctcggactgcaggactttgagctggcctggttttttactttcattttgctcatcatatggtcagacctagtttgttcttccttcttacctcaagcagtagctgttccctttctccctttctgttatcatcggcatctccatcttcattgtcactgtagacgccagttgttctctgtcctagtgagacaactgctgggatgtctttagttcctgccgtgttatatgacagagtagatgcactctttcaacagcctacggtgttctaggttccatgcccccaccccacccccacccggtcctctgccttcacttcacaatcccagagatactgttttgctccagatgactcttagataggattttattctctttaggaacattccatggtggttctttttccaaaggtctatcacatttactatcataatgaacaacctttatgatacagttctttctacccagcctgataatacagtattttccatctaatgtggtcagttcttggcttcaccaaatgatagattaagtatacactcatctcaaggtaactctgggggaattggttctgagacctgttttgcatacccagatcttcaggtgttatgtaaaccacttctagtttatttgtatcacctaatatataaatgccatgtaaaatgttttttcagggacaagtctatgttcagtagagacgctgtattcttcccattcaccttcagtctagaattggtcagctctgtgggcaaggagctcctggctattgagagctgactgtttgccatgccctccatctactctgccggagaaatacctggaccacagcactgtggagtcttgtcttgtctttccaccaccagctttgtgctgctgcctcagtggcttgagtagaactgtcttatttcctgggctgcttttggagcacagacttgacatacatgttagtaaggtatggtgggctcttgtgaaaccacaaacaaatgtcattaagtttatttttcctgtcatacctgacacctcacatagtatgctttgtattctataaatggctgaggaaatagaagaacaaatgatggacacttttgtaatttaaaacctcaattcttgggtataattcatcagaaatgtggagaaaattagataagcactatggggaaatcaagtttgtgttttgtactgtgctcctggctagcacttaaggtagctgtgtaggagttaatgtgttagacaaacttaatctaaccgtcatctccccctttgcagctagtttttctgatgctattaagttattacaaattatacaaattaaagctgctccgccccagcccccttgagacaaggtctcccgtatttctggttatccttgaacttgcttgttttgctatgtgaccaagctggtttgaaactcagaggtcctcctgcctcttcttcctgagtgctggggttagatgtgccccctctccccaaccatgggttttctctgtgtagccctggctgtcctggaactcagtagaccaggctggtcttgaactcagagatccacttgcctctgcctccaaaatgctgaccttgaaagtggcgtactgccaccacctggctgggattagatttctaatcaaatgattaaaatggcaatcatataagcagcaacttaatggaatctggagcagaattaaactagttttaactcttaatcattctgtttacacttttgtggctcttccttctgatagtatacaacagaaaatcagaaatagtgaatcatgcaactgtacaatttttctttgtgccctgtgaactctcaggatttgggcaagtacataaacgtgaagtattttcagtcaattgggtagggccacttcactgagattagataacgcatttctagaactgtagttgtagtttaatataagtgcgttaacataaatagccatatattacctgaggaaattgcttcatctagtctatgttccttacctctgcacatgataggaggtagaacccatcatgtttattggagaaagtcaaatgaccaaacatgacaaatgctctagcacactggtgctttgttacagacagcctcagcttctgggattaagttacaacagtagatgtaagagctgtgctctgggtctcaccatttccttcatgtctgcctctagcttgggctgaaggatgggcacatggaagaaggttcctgagggaagtggaggtagaggaggtgtggcagtaagtggacatttaaaaggtcctgtcagattgcagactggttggaaggtggcggcagaaagctgccttaagataagtgtgactcacatagccagagtgagcagtgcaagggctcacgagaaactgcattcaatacctagtgtctgagaacgcatgttctacctactttcaatttttaccctcctgaaacagcatttggagtctaactctgctgttgtcagagcccatggccagacttcatttgcctcagtcggtgtttgaccgatacgagctggcatcctcagtgctagccataagttaggaatccttcataacttggtaaattaatgggcagcgtttattttataattagtgaatatttctgtattataaaggaagtatcttgtaagaaggagctcaggaaggcatttttttcctttaatactattcttttccacttgtaagcattattttttattgtttctcatgacttgaagtgtgtttactattaagacatattaataatttattgtgtattatacaaggaaaaaattatattgagaactattcagaggccattaatattgctttatcttcatctgtaagcaggttggttattgtgttgccttttgcatatatttcttgcccatttctttcccttcttattaaaattgttctgggaaaagactttttatacttttcctcacccagaagagcttccagttaagacaactgcttgaacaattttatctgaaccaagtaaactttatttgcatttacttaatcatatattcccgtgaccaaccagttcagatcgctcaattaaatttggagttacactgatcaagcttggaatcttcttttctaaatatttttatgactcctatttttagacactcagaactaacactacatgggcactacacgacaggaaggtgttcataactagattttatttggttagctctttagtttcaaaaacctaacgatttgccaggcgtggtggcacacgcctttaatcccaatgcttgggaggcagaggcaggcgaatttctgagttccaggccagcctggtctacagagtgagttccaggacagacagggctacacagagaaaccctgtctcgaaaatctttttttttgtgttgtgtgtggctgcttttgttatttttatttacaagagaggagtgcattaaaataataatcttttggggtcctttgaagacaactcagtagattagatgcttgctgttaaagtaagagtacctgtatgtggatactcagcaccacagaaaagctagacatttgggtggtgggcacaagtaggttctgggtgcaggggacttactggctacactaggtctggtaagagatcctgcctcaaaaactctggtggacagcaattgaggaagacaacaggtgttgacctcagcttccacacacatgcacagatccctgcacactggtatccaccagacacataatgatctgtatgttaagactcaaaacagggttgctgtagccaggctgacctcaaactcaaaactctgctcctccagctggtgttacagaatgtgtcaccacactctgcctgcctgttagagcctttaaaacatcaaaatggtcactattagattgctaacagaactaaaactcaaagctacataggacaaaatcgatggaggacaaaagagggcagagtgggtaagagctcgtaccactcactcccccagaggatctgagtttgatttcaggacccaagtcaagcatctttaccaactacagctccgggaaatctgacacctctggccatttcaggcacctgcatctccctgtgcatactattgcgtgcacaagtccaccctcacacacacaatttaaaaagatcctacaaaacaatcttaaaagcacttgtaaattcagcagtatgagcacccgctcctgcagagaggatcagggcttgatttctagcacccagctgggctcaacctctgcaaccccagttctgggcaacattgtgttctcttctggtctctaggcactgctgcagacacatcagtacacatgaactcaaaactttcagaaggattgctggaacaacattatgaactaaccagtaccccggagctcttgactctagctgcatatgtatcaaaagatggcctaggcggccatcactggaaagagaggcccattggacacgcaaactttatatgccccagtacaggggaacgccagggccaaaaaaggggagtgggtgggtaggggagtgggggtgggtggctatgggggacttttggtatagcattggaaatgtaaatgagctaaatacctaataaaaaatggggaaaaaaaaaaaaaggattgctacctggattttattggcatttgttaagtaccttgttacggtagccacatagtttttcaaaactgaccactttgaatgaggcactatgtctgagacttccaagacaaataattggcataactagtttctgatagactgggaaagtaggttccctaacttcagtaataggcagctcatcatcctaagcaggaggaagcgcaaagtgagcccatcctatataaaaatgccaccccaagactgaattggaacatgaggtggcacccctaaatatttccataaccaattttccccttcataatttaaaagcatatttactctgtttatacagagccacaatccagtaaatgtatccacagttatttaactaaagactttgtatttacatcaagtcctgactatacacaaggtaagaggcatgtggaaaaatgaggtcagaaacaagctttatttacacagggataaagatatcaacttagattttgaataatttagctttggattggctacaagttcgtgccacaccaatcctgtttcatagtagtttaagactacacttgatattttcccttagttctgttatcctttaaacttgcaaacatttggaatactgtatagcttgttgaacagcaacagaaatgagacgatgtactcggaggtcagtctctcacaaaaaagacattatatccaagttctgttagagcgccagccagtaaggcccataaaggaatgaagacataggaaagattcatggtagtaaactgttccagtttagcacacagtgcaaggcagaaggctaacttaagtaacattgcaatgaggtaccaggctttttttttaatattgtgcgatccatgtcgagggtcaaagccagacttacaccgtccggccattttcacaatcagcatgacaagaaggatagtgtcaaatatccagactggaataaatatgaggaaccaattccacggtgccttctcatccagtttcaacaccaacatgatgaggaagagtaatgtgaaaagccaggtgaggagtactctctgagccaaggacattctcatttaaacagtttaaagaggctgtttcggggatgaaataagggagacacaccctgaaaagaaaaaaggtcacaatttgatggcagaaaccactttgattcctagtaaagttgcctgattctcacttctcagagtctctaatttggaaaacattctagcattcaaaacctgttttagcaataaccaactatgtctgcacacacattcatattttcaattctgaatcatgtgtaagtgtgtgggtactgcaagtgccttcaagaggctggaggtggaagattctaccggagcgcggtttaagcagctgtgagcctcccaacagtgggtgccgggaacagctctccagtcctctggaggaacagtctggcttttgtttgttttgtttttcgagacaaggtttctctatgtagctctggctgtcctggaactcactctgtagaccaggctggcctcgaactcagaaatctgcctgcctctgcctcccaagtgctgggattaaaggcatgctccaccactgcctagatagcagtctatgttcttagctgtgttaactgcgaagctctctttccagtccttgcaccatttcttatagtccacgactgacttaagatagtgtggacactgggcatgaacctcattcatgagcaattggttccttttcagtgttatcaggtccaagtcaagcctttcgatgcaccacagggatgttcttaacctctctgcatacttgcaaacttaagagttttgcatttaatttcaagaggtgctaaaataaagcacccgaggtcaacacattgaaacatgttttttgaggcaggatttgtgtatagccctggctatcctgaaactctgtagaccaggctggcatcaaactcagaaatccacctgcctctgcctcttcagcactgaggttaaaggcatgtgccccactgctgggtgcataatgaagtttttgaggatagaatgactgatataaactttatatagtttttataaacagcaagactgaagaggtgtcactggctaaataatccacacaggactgataactatacttgcacataatccttgtttcttgtatttttaagtatttccttgctagagcagaccactaaaaaacttgggattttgttattacccagtgtttaaagatccaatgacaggggctaacttttatatcactgttctcttttattttaaaatagatttcttttaaaaaaaactttttatgtgtatgtctacatgtgtgtgccacatgagcccagaaaaaaaatgttcagtgctaagattccttctgaatgtgaagattacctggcacccctggttggtatcgcctggtactagagttacaggcagtcctaatcgccttatgtaggtactgggacttgactcaggtcctctgatagagtagcaagcatttttagccaacaagcaatctttccattacccagaaccttagctctgttactctagaatgcatccttatgcttggaaagcccagtacccagtacctctcactgccagaatatttttaatttctcttatttttttttcaatgctagtatcactaagataattcttaagaacttctactttcagttgggaattcattaacttataccttagcttaaggtataaagatgtatctaatcttcatgtatggatttacatttcaagatttttttttaatcgaagccttgcgacctttaagtggaagggcagatacaatgggaatcagaaggcaaactacatgcagtggagtaaggcagcttactcaacagagggcaaggaaatggcaaaagctgagtaacattttattcctctgatcacgtggtcatgagagtgtgagaggcacaagtaggaaaatttccttctctccttccaccacccaggtcctggggactgagctcaggccatgggcctgggtggcaagtgcagcatttacctgctcttaccatcccaagaacaactaagtaggaaagtaatctccatgacaaagccactggcaaaagacagagtgaagacaggcacacaggagagaagggaaaggtcaccagggggagaggtaaacaaaaggtgagagtgatgcaggagaagcagggacagacaagaagagctgtggtcaatctattgctaaagtctgcacatctcgaggatgctaatcttggtaaacacacacctgttgaactttagcagttggatgctgatgtcctagcaccttctcactctcaactattagcagtttgtttagtttgcaaatgctttggactgcagggatttggcagacagagctctgcctacatagcctggccagcctagaactttgcttacatagaccagcctggccttgaactctatctaaagagctacctgacttgactctgctaggacttaaaggcacaggggtataaggaactgctcacattaggttaagtcacggaaggcaattttctgtaccagtcttttacaaaaaatagaatataatggaatgagattaagtttggaagcagaggtggagatgtgggcagactgcttaattaactgtgtgtttttaatcctgtgaattatgtttgctcagtcctaacctctgatttggtcaatttaaagaacctttaacaaagttttgtgattattaatatccttaaacacaacttttctatatggtacaggataatacaaacttttttctcccccatccccacccccttcaggaacaagtgccaagtcgagtgcaatgactataggcattttaggacaagaggtgaaaggaggccagggcctaagcttattgcggttacaagtttataattgtgggtggaaacaaaactcggttgtagaaaagtattctcaacaatggagatgaccttcctgacatttaactgacgtttaaggattacatacgctgaactacagtggtaatacaaggttccaattttacaaagacatactgttttaatagaatttatttggtttttaccaccattttctctctatgtgttggtccaaggctaagatttgctcaatagatatttctcacttaaggtggttatatctgtacacagaaggtgtttttttgtttttgtttttttttgcccgtatgattccggatccattgttgaaaccttcagagtttctttccccacacatggaaatacacacctgcatctagtaattagttgtgcgtagtagactcatccaaggtccttcccataccattccatttcccttctcccgctactcttaatacttataaatgaactctccttacccgaagacagctctgtttaaccagctcacaatttccttctcaaaataagtggcctcgctgcttacaacttggttgactttagggctcatctgccctggaacgtgaggatcctgctaaactatcctggtctttggtttggaaatgcccatggtggtttcgcgggaatatctggactctcccaaactcatgctggaatttaatgcgttttttgcaagacgcatcccatagccgtcgtgcaaacgcgcccgcacgcagcatgaaggggtgaggtcacccggaggcagcacggacaggacaagggccgagctcccgactcacctggtagagcggctggccggagagccgagagggcagcgaaggtcgggaaatccgccagtttggatcctaatcctcttccacacttttccccccattaaattcttaggccctcacatgataattaaggagaagacatagttccgcctctccaaacagccgcagctgaggccctccgcacctcaaggttccgcccacatccggggctgttcccgccgcccttggcctatcccggagagcagagcgaacggcgttcggcgctcacgggcccgtttttcttgtttattggttcatttggccgccagtaactgactgccctccgttttagagcgataaaaaagggaggcaatgaccgcgccccctgggcccgcc

SEQ ID NO: 248 - DNA, 7702 bp, Mus musculus
agcgttcagtttcattccaacactttccatgttgtacccttatttgctcagtcacaccaccactccctcatcccctgccctggatgtagacatactcattcccaggtgagggagatgaagtgactttctttcttatgctcatcacctttctttttcccatttcccttctatttttatgttgtgtgtgtgtttttaaaactagattacacacattagagaaaatatgcaaaatttgtctctctgggtctagcttcagggaatactctatatattaacaatttacttctaaaaactaaaaacaatgaggacagatgcagtggtacacacctttctttaattccagcactgggggaaagggagttgggcaaatgcaggaagatttgagttcgaggccaggctggtttacaggacagccaggacaatattggaagactatgactcaaaaaacaaacgaaccaaccaaccaaccaaaaaaagaaaaatgtatttacaaacagcgttagattttgatgtgttcccctcaccgagtcctaaagaagtgggtttggagtaaaagaggagtaacaacagaccattgcagtttcctgaaaggcaactgttagctgcggaaagtaactgctaatgtccctcttaggggatcagaaaactcctttttcttgctgagctaatatgatcatgtgttatctttacattctaatctcacaaaagatctaagactttaaggcatgctcttgtctaaagcttgaactgtgttgtaacccattcccccaaattccttatcttttgagataaaaatcaaggtacatgcttggcgaagtttcatagcgctgactctgaaatacagaactctaactgcattttcaaacatttacaaacaccgctagtggctttttcctggtgtcgtttaaagaataattaaagtgaaaacctttagcactcaagctcaatttaaagcctccaaacggtgggtgatttttatcttcacgatcggaagtgatccaagttccagctctgcagaaaactctcttttaaagtacgaacttttacgaccttagttaaaataaggcaacttttcaccatttctgcctttgctgatcggactctcgacaaattttctccgagacgagcaacccagaactcgtttttcagaacctgcagaagggacccaagccacctcaaggtaaaaagagagagcggtacaaacaaggcaaagtctttgagcgaacggcagcgctacctcggtccgggcagattcggggctcccgagcgacggtcgggagatcctcccttctcagcgagctctccatcagccgcgccgaaaagacctctgacctccaaatgaaggtccgctcggtgaccccaccccgacggcttctgtccgcgtctttgattggtttgttccgggatctctcagtttagcgcgcccaatgggagctcggcctggacctaggcaccccgccccgcgcccccgctccggggagcggcggagagtaaatacaacaggagcgcaaaatggcggaaccgccgaacccagctcgcggcgccgtggctctcctctctgagaaggaagcatctggcaaagtacagccttcctcgcgggagccgccgggctctatgtctgccaagaaggttcgcaccgaggagaagaaggcgccgcggagagtgaacggggaggggggcagcggcgggaacggcgggcagctgcagccccagagcttcggcagcccggcggcgtggagcttcgcggctcggcccgccgcctcctcctcgtccacctctcggagctgttactctttctccgccagcccgagcgtctcctcagcctccgcttcctcgtctcagccgctgccgcgcaaactgctggtcactccctcgctgctgcacgctcagcctcaccgcgtcctgctcccgcccgtcgctccgccggccgccgccaagccgcgcagacccaaggagaagcgcgagaaggagaagcggaggcagcacggcctcggcgccgccgcccgggatgagaacggcgaggcgaagccgctgccgcgagataaaatcaaagacaaaattaaagagaaagacaaagagagagagaaaaagaagcataaagtaatgagtgagatcaagaaagaaaatggagatgtaaagattttactgaaaagtgggaaggagaaaccaaaaacaaatatagaagacttacaaattaaaaaagtaaagaagaaaaagaaaaagaaacacaaagagaatgaaaaacggaagcgtccaaaaatgtatagcaaatctattcagaccatctgttcaggattgctgtctgctgaagatcaagaagccaaaagcatcttaagtgataatgtaaaggattgcattggaaaaaatttggataccaaaaactgtgattcaaaaattcctgataacagtgactttccatttgtgtcattaaaggagccccgcgataagaataaccttagaaggttggacactttggcgttcaggcagctcattcacattgagcaccagcctaacggaggcgcggcagtcatccatgcctacagtaatgaactctcctgcctgtctcccatggagatgcagagatttgcagaagaatttgtgggtttagtgttcagtgaaaacgaaagctctgcggctttctatgtaatgggcattgttcatggggcagctacatacttacctgactttttagactacttttcgtataattttcccaattcaccagtgaaaatggagatactgggaaagaaagatatagaaacaacgactatgtccaattttcatgctcaggtaaaaagaacatattctcatggtacttacagagctggcccgatgcgacagatcagcttggtgggagcagttgatgaagaagtgggcgattacttccccgagttccttgacatgttagaggcgtcaccatttttaaaatgtacattgccatggggaacactatctagtctaaaattagagagtcggaaagatagtgatgatggtcccatcatgtgggtacgtccaggagaacaaatgatccctgtggctgatatgccaaagtcacccttcaaaaggaaaagaactaccaatgaaataaaaaaccttcagtatctacctcgaaccagtgagcctcgggagatgctgtttgaagacaggacgagagcccatgcggatcacataggacaaggctttgaacgacagaccacggcggctgttggggtgctcaaggctgtgcactgtggacagcggcctgatcaaccccgagtaaccaaagatgtaatttgttttcatgcagaagatttcttagaagtagttcagcgaatgcagttagacttacatgagcctccactgtcccagtgtgtgcagtgggttgatgatgcaaaacttaaccagctgaggagagaaggcattcgctatgccaggattcagctgtatgataatgacatttattttattccaaggaatgttgtccatcagttcaagacagtttcagctgtatgcagtttggcatggcacgttcgacttaaattctatcacgcagaggaggacacttgtcacagtacaagtgaaagtactcatgaaaagggcatagcatcaggtcccacatcatcagttctgggagctcacactgagaaccaagcctcctcagactctgtgttgtcagacaaacttccttctaagtatgaatcacaacaaattaaacacgaacctggtgcagctctaagaatcaaggaagagcctgggatggctcccatacctgaaaagatcagaacaccaaataacacggaaggcaagaacagtaaggcgagactggatcgcgctcagttttcagattttcacattgacatggattctgcatttgagaacaccaacaaagacttaaaggaagactcgtgtcctggcagtgtcagtaatacagttgatacacagcagcatagttctgtacgttcaagtcaagacagaagtgaggatgacagtttgtgctaaatttgtacattacgtatagccttttctttaaaaaataatttgtaatgattcatgaaatctgaaagcaagcctaggaattgctctcaagtctgttacaaaatatagttgatgtagcgttgtcacattcctcagtgcctgtccataactgtgaagtatcaagcacttagggccagatgcactgtaaacattgcaggcggaaacacacaggagtctttagaaaagtcattgagttggagttgtaggctttagaatagagctgacaaaatcatataaatatattttttgtaatatgagccagaatttttttgacaatataaagtttttccatagagcttatttataccaactttttttttcattttaaatgtcagcactgtagtgtaaatagctttacaaaacctttttagtgtgatttatattgaaatgtgagccacttaataaaggttcataataataaatgctttctgttgagcttgcaaaaacatactgacaattcagtttgtttgatatattatgttcccgttaatatacatgaggtgaagtgatggagggaaaatgtgtgttccaatctagtaaatatttaaaatttccatactgtacaagcattcagaaagccacaattctgttattaaaacatatacatatggattgtgtgtgtatgtgtgtgtatgtgtgtacacgtatgtacatgtgtgcttgggaatgtatatatgtacattgttttgcacaatttcttaaattgatgaatatataaaagttcttagtgctacttcctggattgtattctaaaatatttctgttcagcagtaagaaaataatttaattaatagagttttagaagttgggagaacctgtgttgatggttttatccttctaactaatgaagtcaatgtggctggagtctttagccctagtgtaattcttttgtgcaaataataagtttagaaaattttctaataagcacctatatgtttagtaatagttgacttaaaaattgacatacagaaagtttaattaggagtaattaaaagtcttttacattttttcatatcacaaaaatgaacttttaaaccaagggcagtgacagtgacccagccatcattcacagatgtgactagcaaacactgtcagatcatcttcctcaggatgtaggagacagggtggccagtgcctgcacggtgaagtagaccatctgccacccatggacttgagcatggttccagtctgcttccactccgtcctagtgattgcaaatgccgtggtgtttgttttagtctgggtccctgccttgattggcgactttgagttggctctccttgtgctgcgtggccttttgggagaccgctgttcccacctcagtgggctccactttcacctcagttttggtaagccatcaaagctcatgcttctagctggggagaaaccacttagagaaatgtatttcactagaactgatgaaaatcagcaccagcagcagtgtcttgtgtccttacttgaggtgggcacataaagtagaaaatgctggtggcttataggaggatctcaggatgtttgcaggtggcgtggaggtgggggtggggattcatggagcagagaaattaaaaatcgtggcagtgtaaatagggtttggttttctatgtaactagctgtctttcactgccctcatttaatctattctaagctaaatttagggttcttcatctttcttaaggtgggatagcaaaaattcttaacatatgagtattaagaaatagggagggatattgttaaaatttagtttttaaattgacggtgatatatttatcacagtatgttttatttccagttgcacatatgtaggcccactgagatcatactgtaagaaaacactgttagggtatttccaaaacatatgagccttaagttttagcttaaaggaaggtacacctgagatagcatcgccactgcttttaggtatagtttcttatgtgacccttagttcacatagttatccatacagattaattgctctgtcaaatgcatacatctctgaaggtgaagtatgtgtaaaccagcaggctcaagatttcaagataaagccttacagacttgaatcatgcttacgccccaggcttacgggttattttttaaaatcctcttcagatgccatctgagaacttgttaactacttttgttacagacaaattcctattttaatattgcataataatggttttctagttagtatactcccattctccatgtgaatataagatttttatttccagtatcttggaccagaacataaagcagtcaaggtatagttttaataaggtcatatgctatatagagtgaatattatataagttattaagtgatatactacagacctttacatcaaaacgtaggtacatcagtggtatttgatatatatactttttccccctttttctaattttatttatattttcttagatgtagtatatatcccatgctcaggttagctatcaaaagaatgaaacatttttgatatttagttgcaaatttacataaagccatatattatcttccttatgactgacgaaactattgaccttaatgatcaggttggtttagcacaacactgtgtattgtatttatgtgtgtatttctgaataagtttgtttgaaatatgtttccaaaataggaggggtaggaaattaaggatgggaaagactttcttaggtttaacttttaaggaatgtacttaatgtattcaaagtaggatttcattttttcaaaattcagttctatgtaaggttttttgttggtttgttttttctttttttgtaaataataaattagcattgtttggtaactttgcttttttgagggtattggaagggacaatttatttatatgtaaagtgattatttccagttagccaaggtacagatttggttttggcatttgagaggctattttccttgtcttccacctttcaataaatactaagattgataaccacaatctttttacctttgttttgtaattattttcttggatttgacattatattttagtctcagacttcctatttctgtctgtacctactgtcttctgaaatagcaaggaccgaggtgggggtgggagtctagtcttatatttcaggttatctatctttctagcttgtcatggacttcacacccaattaatgaatatgaacgagctgcgagaaatacatgggcatgtagaatttatgttaacagaaattataagcaaaatgtatgtttctttttaaaatattatagctttatgtgtatgggcttttgcctgtatgtgtatctgtgcatctcttgtgtccaatgcccagagaggtcagaaagggctttggtttccctaggacagtggctctcaacctgaattctgcgatcctctcttatgttccttatgttatggtgaccccacctataaaactgtttttgttgctatttcatacctataattttgctactgttaggaatcaaaatgtaaattcccgtgttttctgatgtctgaggtgagtcctgtgaaaggatcattccgtcccttcaggaggttgtgtgctgctaattgtgctgctaatgtgctgagaattgaacccaggacctctggaagagcaaccattgctcttagccaccaagccatttctctggcccacctgtgtttttcttcacggtgatcttaaccattattgtgaaaataaaagaactgggatcccaaaatt

SEQ ID NO: 249 - protein, 809 aa, Mus musculus
MAEPPNPRAVLSEKEASGKVQPSSREPPGSMSAKKVRTEEKKAPRRVNGEGGSGGNGGQLQPQSFGSPAAWSFAARPAASSSSTSRSCFSDSVSSASASSSQPLPRKLLVTPSLLHAQPHRVLLPPVAPPAAAKPRRPKEKREKEKRRQHGLGAAARDENGEAKPLPRDKIKDKIKEKDKEREKKKHKVMSEIKKENGDVKILLKSGKEKPKTNIEDLQIKKVKKKKKKKHKENEKRKRPKMYSKSIQTICSGLLSAEDQEAKSILSDNVKDCIGKNLDTKNCDSKIPDNSDFPFVSLKEPRDKNNLRRLDTLAFRQLIHIEHQPNGGAAVIHAYSNELSCLSPMEMQRFAEEFVGLVFSENESSAAFYVMGIVHGAATYLPDFLDYFSYNFPNSPVKMEILGKKDIETTTMSNFHAQVKRTYSHGYAGPMRQISLVGAVDEEVGDYFPEFLDMLEDFLKCTLPWGTLSSLKLESRKDSDDGPIMWVRPGEQMIPVADMPKSPFKRKRTTNEIKNLQYLPRTSEPREMLFEDRTRAHADHIGQGFERQTTAAVGVLKAVHCGQRPDQPRVTKDVICFHAEDFLEVVQRMQLDLHEPPLSQCVQWVDDAKLNQLRREGIRYARIQLYDNDIYFIPRNVVHQFKTVSAVCSLAWHVRLKFYHAEEDTCHSTSESTHEKGIASGPTSSVLGAHTENQASSDSVLSDKLPSKYESQQIKHEPGAALRIKEEPGMAPIPEKIRTPNNTEGKNSKARLDRAQFSDFHIDMDSAFENTNKDLKEDSCPGSVSNTVDTQQHSSVRSSQDRSEDDSLC

SEQ ID NO: 250 - DNA, 5884 bp, Mus musculus
tgtctgcagatgtctgccttctctactgtgggctcatatagagagcccttcctcagggcttggcttttgtggggcagggaaggagccactggcttcttttcttcctgtaaggccccagtctctcaattatgactccttcctatgactttttactctcccctcatatttgaccaggctctagatccagtcagctggaaggaacgcctctcagagcctctcagagataaaatcaaagacaaaattaaagagaaagacaaagagagagagaaaaagaagcataaagtaatgagtgagatcaagaaagaaaatggagatgtaaagattttactgaaaagtgggaaggagaaaccaaaaacaaatatagaagacttacaaattaaaaaagtaaagaagaaaaagaaaaagaaacacaaagagaatgaaaaacggaagcgtccaaaaatgtatagcaaatctattcagaccatctgttcaggattgctgtctgctgaagatcaagaagccaaaagcatcttaagtgataatgtaaaggattgcattggaaaaaatttggataccaaaaactgtgattcaaaaattcctgataacagtgactttccatttgtgtcattaaaggagccccgcgataagaataaccttagaaggttggacactttggcgttcaggcagctcattcacattgagcaccagcctaacggaggcgcggcagtcatccatgcctacagtaatgaactctcctgcctgtctcccatggagatgcagagatttgcagaagaatttgtgggtttagtgttcagtgaaaacgaaagctctgcggctttctatgtaatgggcattgttcatggggcagctacatacttacctgactttttagactacttttcgtataattttcccaattcaccagtgaaaatggagatactgggaaagaaagatatagaaacaacgactatgtccaattttcatgctcaggtaaaaagaacatattctcatggtacttacagagctggcccgatgcgacagatcagcttggtgggagcagttgatgaagaagtgggcgattacttccccgagttccttgacatgttagaggcgtcaccatttttaaaatgtacattgccatggggaacactatctagtctaaaattagagagtcggaaagatagtgatgatggtcccatcatgtgggtacgtccaggagaacaaatgatccctgtggctgatatgccaaagtcacccttcaaaaggaaaagaactaccaatgaaataaaaaaccttcagtatctacctcgaaccagtgagcctcgggagatgctgtttgaagacaggacgagagcccatgcggatcacataggacaaggctttgaacgacagaccacggcggctgttggggtgctcaaggctgtgcactgtggacagcggcctgatcaaccccgagtaaccaaagatgtaatttgttttcatgcagaagatttcttagaagtagttcagcgaatgcagttagacttacatgagcctccactgtcccagtgtgtgcagtgggttgatgatgcaaaacttaaccagctgaggagagaaggcattcgctatgccaggattcagctgtatgataatgacatttattttattccaaggaatgttgtccatcagttcaagacagtttcagctgtatgcagtttggcatggcacgttcgacttaaattctatcacgcagaggaggacacttgtcacagtacaagtgaaagtactcatgaaaagggcatagcatcaggtcccacatcatcagttctgggagctcacactgagaaccaagcctcctcagactctgtgttgtcagacaaacttccttctaagtatgaatcacaacaaattaaacacgaacctggtgcagctctaagaatcaaggaagagcctgggatggctcccatacctgaaaagatcagaacaccaaataacacggaaggcaagaacagtaaggcgagactggatcgcgctcagttttcagattttcacattgacatggattctgcatttgagaacaccaacaaagacttaaaggaagactcgtgtcctggcagtgtcagtaatacagttgatacacagcagcatagttctgtacgttcaagtcaagacagaagtgaggatgacagtttgtgctaaatttgtacattacgtatagccttttctttaaaaaataatttgtaatgattcatgaaatctgaaagcaagcctaggaattgctctcaagtctgttacaaaatatagttgatgtagcgttgtcacattcctcagtgcctgtccataactgtgaagtatcaagcacttagggccagatgcactgtaaacattgcaggcggaaacacacaggagtctttagaaaagtcattgagttggagttgtaggctttagaatagagctgacaaaatcatataaatatattttttgtaatatgagccagaatttttttgacaatataaagtttttccatagagcttatttataccaactttttttttcattttaaatgtcagcactgtagtgtaaatagctttacaaaacctttttagtgtgatttatattgaaatgtgagccacttaataaaggttcataataataaatgctttctgttgagcttgcaaaaacatactgacaattcagtttgtttgatatattatgttcccgttaatatacatgaggtgaagtgatggagggaaaatgtgtgttccaatctagtaaatatttaaaatttccatactgtacaagcattcagaaagccacaattctgttattaaaacatatacatatggattgtgtgtgtatgtgtgtgtatgtgtgtacacgtatgtacatgtgtgcttgggaatgtatatatgtacattgttttgcacaatttcttaaattgatgaatatataaaagttcttagtgctacttcctggattgtattctaaaatatttctgttcagcagtaagaaaataatttaattaatagagttttagaagttgggagaacctgtgttgatggttttatccttctaactaatgaagtcaatgtggctggagtctttagccctagtgtaattcttttgtgcaaataataagtttagaaaattttctaataagcacctatatgtttagtaatagttgacttaaaaattgacatacagaaagtttaattaggagtaattaaaagtcttttacattttttcatatcacaaaaatgaacttttaaaccaagggcagtgacagtgacccagccatcattcacagatgtgactagcaaacactgtcagatcatcttcctcaggatgtaggagacagggtggccagtgcctgcacggtgaagtagaccatctgccacccatggacttgagcatggttccagtctgcttccactccgtcctagtgattgcaaatgccgtggtgtttgttttagtctgggtccctgccttgattggcgactttgagttggctctccttgtgctgcgtggccttttgggagaccgctgttcccacctcagtgggctccactttcacctcagttttggtaagccatcaaagctcatgcttctagctggggagaaaccacttagagaaatgtatttcactagaactgatgaaaatcagcaccagcagcagtgtcttgtgtccttacttgaggtgggcacataaagtagaaaatgctggtggcttataggaggatctcaggatgtttgcaggtggcgtggaggtgggggtggggattcatggagcagagaaattaaaaatcgtggcagtgtaaatagggtttggttttctatgtaactagctgtctttcactgccctcatttaatctattctaagctaaatttagggttcttcatctttcttaaggtgggatagcaaaaattcttaacatatgagtattaagaaatagggagggatattgttaaaatttagtttttaaattgacggtgatatatttatcacagtatgttttatttccagttgcacatatgtaggcccactgagatcatactgtaagaaaacactgttagggtatttccaaaacatatgagccttaagttttagcttaaaggaaggtacacctgagatagcatcgccactgcttttaggtatagtttcttatgtgacccttagttcacatagttatccatacagattaattgctctgtcaaatgcatacatctctgaaggtgaagtatgtgtaaaccagcaggctcaagatttcaagataaagccttacagacttgaatcatgcttacgccccaggcttacgggttattttttaaaatcctcttcagatgccatctgagaacttgttaactacttttgttacagacaaattcctattttaatattgcataataatggttttctagttagtatactcccattctccatgtgaatataagatttttatttccagtatcttggaccagaacataaagcagtcaaggtatagttttaataaggtcatatgctatatagagtgaatattatataagttattaagtgatatactacagacctttacatcaaaacgtaggtacatcagtggtatttgatatatatactttttccccctttttctaattttatttatattttcttagatgtagtatatatcccatgctcaggttagctatcaaaagaatgaaacatttttgatatttagttgcaaatttacataaagccatatattatcttccttatgactgacgaaactattgaccttaatgatcaggttggtttagcacaacactgtgtattgtatttatgtgtgtatttctgaataagtttgtttgaaatatgtttccaaaataggaggggtaggaaattaaggatgggaaagactttcttaggtttaacttttaaggaatgtacttaatgtattcaaagtaggatttcattttttcaaaattcagttctatgtaaggttttttgttggtttgttttttctttttttgtaaataataaattagcattgtttggtaactttgcttttttgagggtattggaagggacaatttatttatatgtaaagtgattatttccagttagccaaggtacagatttggttttggcatttgagaggctattttccttgtcttccacctttcaataaatactaagattgataaccacaatctttttacctttgttttgtaattattttcttggatttgacattatattttagtctcagacttcctatttctgtctgtacctactgtcttctgaaatagcaaggaccgaggtgggggtgggagtctagtcttatatttcaggttatctatctttctagcttgtcatggacttcacacccaattaatgaatatgaacgagctgcgagaaatacatgggcatgtagaatttatgttaacagaaattataagcaaaatgtatgtttctttttaaaatattatagctttatgtgtatgggcttttgcctgtatgtgtatctgtgcatctcttgtgtccaatgcccagagaggtcagaaagggctttggtttccctaggacagtggctctcaacctgaattctgcgatcctctcttatgttccttatgttatggtgaccccacctataaaactgtttttgttgctatttcatacctataattttgctactgttaggaatcaaaatgtaaattcccgtgttttctgatgtctgaggtgagtcctgtgaaaggatcattccgtcccttcaggaggttgtgtgctgctaattgtgctgctaatgtgctgagaattgaacccaggacctctggaagagcaaccattgctcttagccaccaagccatttctctggcccacctgtgtttttcttcacggtgatcttaaccattattgtgaaaataaaagaactgggatcccaaaatt

SEQ ID NO: 251 - protein, 668 aa, Mus musculus
MTFYSPLIFDQALDPVSWKERLSEPLRDKIKDKIKEKDKEREKKKHKVMSEIKKENGDVKILLKSGKEKPKTNIEDLQIKKVKKKKKKKHKENEKRKRPKMYSKSIQTICSGLLSAEDQEAKSILSDNVKDCIGKNLDTKNCDSKIPDNSDFPFVSLKEPRDKNNLRRLDTLAFRQLIHIEHQPNGGAAVIHAYSNELSCLSPMEMQRFAEEFVGLVFSENESSAAFYVMGIVHGAATYLPDFLDYFSYNFPNSPVKMEILGKKDIETTTMSNFHAQVKRTYSHGYAGPMRQISLVGAVDEEVGDYFPEFLDMLEDFLKCTLPWGTLSSLKLESRKDSDDGPIMWVRPGEQMIPVADMPKSPFKRKRTTNEIKNLQYLPRTSEPREMLFEDRTRAHADHIGQGFERQTTAAVGVLKAVHCGQRPDQPRVTKDVICFHAEDFLEVVQRMQLDLHEPPLSQCVQWVDDAKLNQLRREGIRYARIQLYDNDIYFIPRNVVHQFKTVSAVCSLAWHVRLKFYHAEEDTCHSTSESTHEKGIASGPTSSVLGAHTENQASSDSVLSDKLPSKYESQQIKHEPGAALRIKEEPGMAPIPEKIRTPNNTEGKNSKARLDRAQFSDFHIDMDSAFENTNKDLKEDSCPGSVSNTVDTQQHSSVRSSQDRSEDDSLC

SEQ ID NO: 252 - DNA, 105628 bp, Homo sapiens
caggagaatggcgtgaacccgggaggcggagcttgcagtgagccgagatcccgccactgcactccagcctgggcgacagagcgagactccgtctcaaaaaaaaaaaaaaaaaaaaaaaaaaaaagagagagaggttatttccttgatgggtctttagctgttttaattattcatctattttcaaactaatggtatagaagtagttattaatttgaggggaatcaagaagagccagcacttgaatctgaggcaaaatatgtattaggatagcatcatattgttacctcaaggcacataaatcatacagacaagcttttcaaagcagaatctgcaaaattaaaattatgaaataactttgtgacagtcatagttttgtactttgttggctctactggcatgtgcagtatttgtacaaaactgcactcttctaactgtgggttatcagttatcaggaacccgatcctgtaaaaactaatctactcctggataatggcattaatcctttcatgagggcggagccctcataacctaatcacctcttaaaggtcccacctctgaacactgttgcattagagattaagtttctaacccatgaactctgggggacacacaactttcggggacacattcaaacctgttcttttctatgagataaaagcactggaatctaccagcactctaagaaacactgcatcttttttgaatgcctattttctaaacataaaacttaaattaacttaaacttctaaagagccctgaccaatgtctggatttaacattttgatgctttagacttctgcttcctcttgcaaaataggatatattagaaagaaaactggtgtagagtcagaataaacatgaaattccagctcagttttgaaaaatgccttggaaagctttgtagaactgggatgatgcataacacccacaaacataagagatacacaaggcactcagtaaacactatcctcttaaccacaagtggtctgacagtgtggctcaaactatgaagccaagaatggttattctggaggttattcactgttcaaaaagaaagtaaaggatagtaaagaaaattaacaaattacgtacagggctgcatttgcaattcagacattctatgagtctatcatttttccttacatttctttgccagacctaggcttcaaggtgtggataaatacactttactctctacctaccagttcttacctaaaatagcttcctcttcctggagaattgactggaaccacaaaccttttttttttttttaaacaaccacaaaacttaagcttttcttttcagagatttatattattgaataaggctcctgatacacattttataggcctcctatccctttcttaaaataagtatcaaaatgagctgatgttcttccatatgaaaattctggcagcataattaaccccaggagagacatttatggatagtttctatttactctatttggccccttttactctctctaccttttgcttcctgctgtgtggctgctaatggctcttcagtgaagcctttaagcagtggctgatgcctgtactacaattttcaactttattttcccccagtttgctctccttaagtacacattcaaactggaaagaagactgtggttgagcaagtggttaggctatatttgtagtgagacaattttctggttaagaggtgagaatttggctgggcatggtggctgacgcctgtaattccagtactctgggaggctgaagtgggtggaggcctcacttgaggccaggagtttgagaccagactggccaacatggtgaaaccccgtctgtactaaaaatacaaaaattagctgggcgtggtggtgcatgcctgtaatcccagctacttgggaggctgaggtgggagaattgcttgaacccagaaggcagaggctgcagtgagctgaaatcacgccactgcattctagcctgggcaacagagtgagacttggtctcagaaaaataaagagttgagaattcaatttacctgaattacctgaaatgttgaataagcaaaatatgagctgaaagcttacaatcttcataattactgccccacatcgccttctccaaatttcaggaaagagagaaaggggtttcctctcctcttcacccaggaacttccctgaaaacctcacccaaagactttccctgacatgtcactgctatccctaagagaaagaagggcaagcaacttttttttttcttagctagatactttgcaatctcaatgaattaagggatcaggtaataaggaagaagggagaaacagatacttggcaggaaatgagcagtctctgtcatagatatgctgagttttaagtgctgacatatctgtggaagatgtggagtagttagatcacaaacacagaggagcagtcaggtttagagatataaattggggagccattaacaaaaaaaaaattatttatttatttatttttgaggtggagtctcacactgtcgcccaggctggagtgcaatggctcaatgcaatctccacctcccaggttcatgtgattcccccgcctcagcctcccaagtagcagggtttacaggtgcacaccaccacacctggctaattttttgtatttttagtagagatggggtttcactatgttagccaggctggtctcgaactcctgacctcaggcagtctgcccacctcagcctcccaaagtgctgggattacaggagtgagccactgcacctagcctgaaaaacaatttattgaatacaaaaattagccgggcatggtggcgggtgcctgtaatcccagctacttgggaggctgaggcaggagaattgcttgaacccgggaggcggaggttgcagtgagctgagactgcaccactgcactccagcctgggcgacagagtgagactccatctcaaaaaacaaaacaaaacaaaacaaaaaacaaaaaacacaaaattcataggagccagcaaactatgacctacaggccaaacccatcctgtctcctgtttccataaagttgttttggaacacagccatgcccattcctttatatcttgtctatggctgcttttgtgctatgagcagcagctgccacagagaccacaaagcctaaaatatttacaaatattttaggtctgcaaagcctaaaatatttactatacgtctgtttacagaaaaagtttgctggcccctgtactagagtatggactacactggaactgacagcatgaaagtttaaaggtttcaggttttctgaaagcagagtaccagcctttataactggccagtgattgattgattcaaatgagaaagacacataaagatgagcaggtcggctgggcgtggtggctcatgcctgtaatcccagtactttgggaggccaaggcgggcagatcacctgaggtcgggagttcgagaccagcctgactgaccaacatggagaagccccgtctctactaaaaatacaaaaaattagccgagtgtggtggcgcatgcctgtaatcccagctactcgggaggctgacgcaggagaatcagttgaacccgggaggcagaggttgcagtgagccgagatcgtgccatcgcactccagcctgggcaacaagagtgaaattctgtctcaaaaaaaaaaaaagatgagcaggtcaacgtggtggaggtagagctttgagatatctatgccataaggacagaagaaatgtccttttttgtttgtttgttttgagacggaatctcaccctgtcacccaggctagagtgcaatggcacagtcttgcctggctgtaacctccgcctcccaagttcaagcgattctcctgcctcagcctctggagtagttgggactacaggcatgtgccaccacgcctggctaattttttcatatttttaggagagatgaggtttcaccttgttggccaggctggtctcaaactcctgaccttatgatctacctgcctcggccttccaaagtgctgggattacaggcgtgagccactgcacctggccagaaatgtctttaaggttagtacatggctgcataaagtacaagggtcaaataactgctttctttatacaaggggatcaggaacctggacaaggccagagggatagtacatgtgcagagtgaaaatacagttcagctcagaaaggcagaaggatgtcacgtgcagagaaaccagattctaggttgtacagaggacagctctaagcactgcgaacacacatttgttatggctggaagtttgaatatattcgattagcatctattccagcaacggacaaagacagggttgtgaattaaaataaacaaaactctcaaaacgatcttaacaaaacgaagctactcctttctagatcagaagtcagcctgctagtctgtgggttataactgactcacagatgtttgtttggcttgcatggtgttttaggaaacttcccattaaaaaatctatatatttagcaagtaggaccactatttccataagggaacgagcagcgagagctgagaaacacaaatgtatattgtagaaaacacatcatattcccagttttctatagtaccctccacttcctgtgatctcacattcaacctgactctgacttattattttttacccattgctatggtttcaatgtgtcccctccaaaattcaggtgttgaaacttaatggccaatgtaatggtattaagatgtggggcctttaagacgtgtttaggccagaggggttgctctcttgtgaatgaggtttatgggattacaagaggcttcatgggcaagtggatcgcttgagcccaggagtttgtgaccagcctgggtaacacagtgaggccccatctctacaaaacataagcaaaaattagctgggagttatggcgagtgtctgaagtcctagctacctgggaggctgaggtggtaggatcactttagtccaggaggtcgaggctgcagttgcgccactgcactccagcctgggcgacaaaacaagattctgtcaggccgggcgtggtggctcacgcctgtaatcccagcactttgggaggccgaggtgggcggatcacgaggtcaggagatcgagaccatcctggctaacacggtgaaaccctgtctctactaaaaatacaaaaattagccgggcgtagtggcgggcgcctgtagtcccagctactcgggaggctgaggcaggagaatggcgtgaacccgggaggcggagcttgcagtgagctgagatcgcaccactgcactccagcctgggcgtcagagacagattccgtctccaaaaaaaaaaaaaaaaaaaaattctgtctcaaaataaataagataatagaggcctcatgaagccttcagcctgctgccttctaccatgtgaggccaatatgttcctcccctcaggaggatgtggcccatatcaaacaaatgaacctgccagtgccgtgatcttgggctcccagcccctagaattgtgacaaaataaatttctgttctttataaaagacccagtttcggctggctatgctggctcatgtctgtaatcccagcactttgggagaccgtggtggtcagagtgtttgagcccaggagttctcgaccagcctgggcaacaacatggcgaaaccctgtctctacaaaaatacaaaaattagctaggtatggtggcaaatgccttagtcccagctactcgggaggctgaggtggggggaatgcttgagcccaggaggtcaaggctgcagcgagctgtgaagctgccactgcactgtagcctgggtgatagagctgagacctgacctcaaaaaaaaaaaaaaaaaaaagaaaaaagaaaaaaaaaaggtggagaagcagggtgtagggtaggtagggtagtatgctttcggtagagctgttacagagaatgaaatggaaaaggaagcaagagataaccagtgagtcaacaacaccaacgactgaaaagcaaaaaggaatggagatgagaaaaggcacgtcgcgttcaacaggtccaaggtccaagagtacctgaaacttgtcactcttccactgtttcttggctcagggaatggtaccactgccaagttttgctggttagaaatatagaaggtattcatgatatctgcctcccttatgttcattatccaaatcatcacataggcaacagccaaaggaaaaagcacgtcaagtagagagaatcacatatgcaatgtttctatgttgaaagacaacatggtgggttctggagattaaagacctgttagtttgaaatagaagaaggggatagttcatgaaaggtcttacaggacacattaaggattttgttttttgtcccgagagcaatgaaagccattgacttcaggtctgaagcaaggcaagagagatggtcagatccaggttttttcgttttcgttttttttttttttttgagacagagtctcattctgtcgcccaggctggagtgcagtggcgtgatcttggctcgctgcaacctccgtctcccagattcaagcgattctctaccacagcctcccgagtagctggactacaaggacgtgccaccatgcccagctaatttttgtatttttagtagagacaaagtttcaccatgttggctaggctggtctcaaactcctgacctcaggtgatctgcctgcctcggcctcccaaagtgctgggattacaggcatgagccactgtacccggccaaggttttgaaaagagctttctagctgtagaatggaaaacctatatgagattataaagagattatgctaaaagaaattggtgatagtggtagaaaacctctgccagttaagtgttgacaagaataatctagttgaaagggaatggctaattacacagcacagaaaagagatagttgcgcatgttttaataacagacaagtcctgtctttagatctgggtaaggggcctctgtttacttggccctcctcttgctgtaaagaacaaggagcccatgaggtcaggggccatgtctgcctggagcctgccctcctcttttagactggctagatctgagggcagagtgagctgccgattgtacatcaccatttgcggagtagggggatgtggacatacacctggacatgttgggtgcatgtatggcctttccgtgtggcaggtgaacttggggatgggaggagaatggggtcagtgtggggactctaagaactctaaattcaaacatggacttccagatcatatgaaagtggatctgtcaaggtagtagaatagaatgtattttatataatagtttgttatcttgatttattttttaaatatttagacagatggtgtgtggacctctatagccacactcttgcttaggctctacaaattaagtgccaggcctaataacagtgcatgaaagtataatgtaatgcaaggagtaacaaattcatgcaggcaagggtgtagtttaactgggctcttaagaagtccgattttccagacctgtgtgctagagattagagaatgagtggtgcaagtttccaggcactacattaatgtatgttagagacacttttctagatcaggagggccaacaattaaaaaatgaattcaattgtaatggtttcggtgtgattttgaaaagcttcttgaatatggcataagttgagtgtggaagggaccttagtgatcacgtaatcaaatatgctaactcaacaggtaagaaaacggaggtcctaacaagtgaagcagcctgactaaggtcacgaaactagtgcgttagcagatgatttccagcctaatccactcagtccactctcccaccaatgctaattttcttgaagacatctgctgccagtcaattccaattagaaagttttcatgttacatattaaatactgttattactttaaaaaatttgaggcacataaaaataagtccataaaccaatattaaatttgactccaaaacattcttttttttttttttgagatggagtcttactctgtcacccaggctggagtgcagtggcacgatctcagctcactgcaacctccacctccaggggtcaagcgagtcttttgtcttagcctcccgaggagctgggactacaagcacgcaccaccacgcctggctaattttttttgtatttttagtagagacggggttgcaccatgtcggtcaggctggtttcaaactcctgacctcaggtgatccacccatcaccgcctcctaaagtcttgggattacatgcgtgagccacccaccactcttggccgaaaaaaaaaaaattcttaaaaatattcttaaaaaaatgagtaaataggcactgtcgccccgggtggagtgcaatggcacgaactcagcttactgcaacctctgccttacagattcaagggattcttctgcctcagcctccagagtagctgggactacaggcgcatgccactacgcccagctaattatgtatttttagtagaggcagggtttcactatgttggccaggctggtctcgaactcctgacattgtgatctgcccgccttggcctcccaaagtgctgggattacaggtatgagccaccgcgcccggccacattccttatcttttaagctaaaacccatctccccaaattgcttattttcgaagcaaaaatcaaagcacatgcttacaaaacatcgaacacgcagtgtgcttactaaacgctaaaatacagaaacctaaaaaaacaattcttgcttttcaaacatccataaataatcgccaacgaatttttcctggcaagtctacgttataataataataatattattattattattattattttttgagacggagtcttgccctgtcgcccaagctggagtgcagtggcgcaatctcggctcactgcaacctccgcctcctgggttcaagcgattctcctgccccagcctccccagtagctgggattacaggtgcgcgcctccatgcccagctaatttttgcatttttagtagagacggggtttcaccatgttggtcaggctggtctcgaacttctgacctcgtgatccgcccgccccggtctcccaaagtgctgggattacaggtgtgagccaccgcgcccggctataataattattataaaattcaaatcttaaggccgcacatggtggctcacgcctgtaatcccagcactttgggaagcggaggtgggccgctcacctgagatcaggagttcgagtccagcctggccaacatggtgaaaccccgtctctaataaacacaaaaattagccaagcatggtgccggacgcctgtagtccctgttactggggaggctgaggcaggagaatcgcttgaatctgggaggcggaggttgcggtgagccgagatcgcgccacggcactccagcctcgacaacagagcaaaactccgtcccaataaataaataaataaataaaataaaaatcttaagggtctagtcacaacagttcaaaagtctccaaagggagactctcaccttcaagcttgtaagtaatactaaagttctagatttgctggaagttatctccttcaatggattacagcacatgatctagcaataataacgtaccttgtcaccacatcgaatgattttgaacacttcccatcaatcgactaccgactaacaaaaagaaggacttgattcccggcaattttttctcttctgaactgagcattcccgaaatccagcttgctgaacgcgcagatgcagggtgagaggcaccccaggaaaaatggaagggaaagtggtacaagttaaaacagtcttcgtggccgcagagacgatcgctacctcggccatggcagatctgggggtccggggcgggggttcttccctgatacccaccgggcacgcgagttcacgccagcgacagtggaaagccctcccctcgcagcgcgctccgccactagccgcaccccgccgagctctgacctccgaagagggtccctgtggcgatcccgccccttcgtctgatgtttgtgcctttgattggctcttaggtggatccctcagcgtggcttgcccaatggagcaatgccggctggtggcctggccgctccgccccttccctacccctcgcggagggcccgccccctgccccgcgccggctagcggaggagagtaaatacaacaggagcgcaaaatggcggaaccgccgagccccgtgcactgtgtcgctgccgcggcccccaccgccaccgtctcggagaaagaaccgtttggcaagctgcaactctcctcccgggaccctccgggttctctgtccgccaagaaggtccggactgaggagaagaaggcaccgcggagagtgaacggagaagggggcagcggcgggaacagcaggcagctgcagccgccggcagcaccttcgcctcagagctatggcagccccgcgtcttggagctttgcccctctgtctgctgctccctccccgtcctcttctcggagcagtttctctttctccgctggcacggccgttccctcctcagcctccgcttccttgtctcagccggtgccgcgcaaactgctggtccctcctacgctgctgcacgctcagcctcaccatctcctcctgcccgccgccgccgccgctgcctcggctaacgccaagtcgcgcagacctaaggagaagcgggagaaggagaggaggaggcacggtctcggtggggcccgagaggccggcggggcctcccgggaggagaacggggaggtgaagccgctgccccgaggtgggtgccgtgcggggagggggaggggagggcgccgtgggtccccgccgccccctggcgcccacggggcccgggaagggggagcgcggcggccgcgtgcgccggcctggaggggctgggaggcgtccggttttcagcagaggattttgcagttcccaaggggacaggaaatggagcctgtaatttcggttgcagagagggggatggccgacactcttattttctgtatcgtttcttcctcccagttagtgcgctgcaggatttgtgaaaatccatcttgaggactctcctaggtttgtttggctagggagagagatggagggaacgggatgggggaagggtttggttttgtaaaagatgcttgattgattgttagaccacttagacgtggtcgcgggaattcgtatttgtgacacagcgttcaaccccggataatcctgtcaaaaaaggggtgtggagagagcactggcgtcagctggaagctaccagaggcctgagcttttcatccctattagggaaatgaggtagcgtgcagggcccgaagtgcgctgtttcgtaaggtaccctccctgcaccctactctccgctgcgtattcttaagtgttttgggtggtcctgtttgaaataccacccttctgaaagaattttcagccatattctttttttccctgcagcaaatgataaaaccaggagctttgacgatttttcgccagatcaagcggctgcagaatgtttgagcattagaaaaaggcgaattcttaagggttcttgtcagacagggtcagttttgtttttaaatgtaggctagtcgtataatttttcaggtgtttccaccacttcagctacggatacacaatgatctgacaatagtgcaacatacggactagttgaaaatcaaatctttatgtgatcgcaagcttaaagcgcataatctttattataaatgtgcactgctacacagtgttgtcaaataactctttttgttttttagaaaaagaaatgtcaagcagtttcagcattgctgatctaacagtagctcagatcatgaaaaattctgtttggattataatggtttgttttcacaacttaaaacatgctgcatgtgcatgtagcaatagtgtcacttcttccttgatattttttgcctgtagcaaagctttaacatctaagcatagccatcagggactctggtgcaatgtaaatatctttcagcttctgggagtgttgtttctaggaaagtggttttgaggatgggattttggtacttttagtcaggaattccaggtgattagtattttaaagctattttgttttaacaatttatatgtaaaatttaggagataagtgcctggaagtttgtccatatgcagcttggtatcatcactagtgtttgtggtgtgtaaactgcacatttgctgtaagttctctgaaagaggaagtgaatatgagtattacatagttggagtaatggaatatttgagaagaaataagtaagcattctttaacaattctaacttaaaatgtggagtacacaaatggtccttaaagtgaaatggctgttaaagaggaatttttatagtcttttcaattacatttagaatccttcttcttttgagggttaacactaatattattaatcctgaatataaacagtgataggttttacattaagatgtgggaatgatcttttcccatgacctatgtgggttttttggagtagtgacaagatattaacactactgtaagattttcattttttcagacacaaatgctatcttgttgaggaaaaactatcagagaaaaagattcctttccagtgtcttggtggtaaatttaatggtgaaaatttttccctcgtaacttggggaatacttatatctttctaaagtttggatttaactgaattgatgttctgttttaacgaattaagaagattcttaaatagcggtattaacacgtggtatagcaagaatacatatatgcctttattatagatataattgcaaatatgaaagtcctgatttgcaatacaatgatcatttctctgtgctttttgtaaaaatcttagtgaatgggtgaccaagtgtttgtttaggtatatacctctttttagtgttgccctaagttggctgtgcatggttcagtaacccctcaattatccacagctggctgattgaacagtctgagtcagaaccagacattagctataaagacacctaaacaaggaagagattctccctcaacaaaacaaaactgaaccacacacactcgaaagacctagcctgcaccccaatttgattaaacaattaagctcctgtatttattaatagtagggcttttaaaaagtcctaagtcagaactgctttatttttacattggtgaccattctaacagaacgtatttgggttaaatgaaagcatgtataagaaagggcctagcagggtatttagtaaatgttatttgagtctgaagcatagttattaattttttaaccctataactaattgaaagatgggtgaatgctgatagaggaaggatcattgacagatatgaaagttaagaatgctgaacaagagaattatgaaagtatactaatatggccccatttagtaccagggcctgatgcctcacaatctctaaggccatctaatcatagtactgtagctgacttgcgtgatagcttgactcaccaagtaaaagttaaatttcttataagaaggaaaagtgcaaaacagtttagattttttttttttttttggaaacagagtctcgctcttgttggccaggttggagtgcagtggcgcgatctcggctcgctgcaacctccgcctcccgggttcaagcaattctcctgcctcagcctcccgagtggctggaattataggcactcgccaacacgcctggctaatttttgtatttttagtagagagggggtttcaccatgttggccaggctggtctcaaactcctgaccttgtgatctgcctgccttggcctcccaaagtgctgagattacaggcgtgagccaccgtgcctggccaacattttagatttttaaaaccagaaaataacctgattttagtgcttacggaggtaatttactggagagttaatcaatattcctgtaagactgaataaattgtagaattggtaagtgtggaaagtaaaagtggacatataccaagggtatccaaaatttagaattattttatggcaaaccacaacaaatatttcattagctgtcagtgtgccttcactgactccagtaaccagcaaaatttgtatagatcttctaacttttgttagtacttttgctttgtatttgttaacttacttttttccttaaaatgaccctgtgaagtatttcaagataaaaccagagcatttcactgaatttttgccttgaaagtgtagttgcaggatttaactctaatgaaaatagcagcttttcttagaatcaaataatttgaggtatataaatgtgagtgatgtcaaagggatgggtgtctgaagatttttctaactacactctcctccagtattgttactgtacaattttaggttaaattcatattcagagtttttatcatatgactaaatatttgtctctgctgagggaataatttactatgattttattttcttgtgtaaccttttgtttttcatgtctcatttttttcatttgcttagttttctctggcagagtctttctgtaccctccagtagctccataaaatgcttctcagtacaattttccacatgggcaaatctgtcagataaacttacccattccatttgttcctgtagacatcccttctggggccgggcgcggtggctcacgcctgtaatcccagcacttcgggaggctgaagctggcgaatcgcctgagctcaggagttcaacactagcctgggcaacacggtgaaaccccatctctactaaaaatacaaaaaattagccgggtgtggcggcacgcacctatagtctcagctacctgggaggctgaggcatcgcttgaacccaggaggcggaggttacagtaagctgagatggcgtcactgtactccagcctgggcgacagagcaagactctggctcaaaaaaaaaaaaaaaaaaacaacaacaacaacaacaacaaaaaaaaacgacatcccttctgtagctgtccttactgctttagcctgggttgtttcctctttaggcctgctgcatagctgtcaccttgggactttccttagttgacattctgggaatttctttaacttttgttgaattttatttttccggatctcatgccttccttttggtttcttccttcattttggattttcattttggatttcatttttatccttttacttgactggcagttaagagatttctgcattggaaataattttccctcaaaagtttgaaggtggtgttcccttattgcctggttcccaaagtagatgttaagacgtctgatctccaaaaagttgtctattctactatctggggaatgtcaatcctttcactgaattttataatttatatatttttttctttggtgtttttcttcacatctcactcttccttctgaactttcactgaattttacttttttttttttttttgagatggagtcttgctctgttgcctaggctggagtgcagtggcatgatcttggctcactgcagtctctgcctcctgggttcaagcaattctcctgcctcagcctcccaagtagctggtattacaggtgtgcgccaccacgcccagctaattttttgtatttttagtagagatggggttcctccatgttggccgggatggtctggaactcctggcctcagatggtctgtctgccttggcctcccaaagtgctggggttataggcgtgagccaccgtggctggccttgactgaattttaaagttttagcttttgtttttttgagacggtcttgtactgtcgcccaggctggagtgcaatgcagttttggctccctgcaacctctgcctcccaggttcgcatgattctcctgcctcagcctcctgagtagctgggactacaggcgcacaccaccacacccagctaattttttgtatttttgagtagagatagggtttcactgtgttggccaggctggtctccaactcctgacctcatgatccacccgccttggcctcccaaagtgctggtattacaggtgtgagccactgcgcctggaaaagtttaagcctttaataagaatttttaagagctcctgtcctttgtttcagtattatagtattttgttcctttttcatgggtgcaacgttttctgtttcctcttcaaggatattaattacagcttctttgaggtgttcttctgttctccctattatttttggtttttcttacttatttctgtttgttttggttgctttcttttagttggaggttttgttcagatctttgtgatcatgagcaaggttaatgactaatggactgctgtgtttttaatcttcatttcttttctctgggtggtgggcaagaaggctttcagtttcttcagatagatgtcctttaattttcctgtctctttgtgggtggaatgatggagagaggaggggtgtcttagtcactcgggctgctataataaaataccatagaatgggtgacttaacagaaattaatttttttataattctggtggctggaagcctcaggtcagcatgccatcatggccaggttctggtaagggctcttttcctggtctgtaggtgactgccttcttcctgtgtgctcacatgacttttcctataatggaaagaaaaatctcttccttttctctttataaagctaccaattttattggattgggactgtgccctttgacctcatttaatcttagttacctccgaaaagccttattttcagatacagtcacattgggcattaaggcttcaacatatggattttggggaggcatgattcagtccatagtgaagggcttggcagaggtaatgagtttgtatgacagggttctagcgcttcatgggggaagaaagctacaagtcttgtcattcatttcataagtttttacctagtctccctgttttcataccagcatttcacttctcttttctgtgagggatacccctcatcttggagccactctgattcagttttactgaggaccatacctcttgtttccttaggagtgtgtgtttgtgggtattctgccctatttcctagcgccctctgatttctgagcttttctggggtattgcaggataaagaggattgtttgtcattatctctcccattatgctaaggcatttaccattctaccatcagctttttgtctttatacattgtatttcaggtaatagttacagtatctcctagttatgtcagacgtggagtgtgtgtgtgtctcttttttcctactgtttgggttttttttttttttttttttttttttttttgagaaggactctcactatttcacccaggctggagtgcagtggcacaatcttgctcattgcaacctctgcctcccaagttcaagcgattctcctgcctcagcctcccaagtagctggaactacaggtgcccaccaacatgcccagctaatttttgtatttttgtagagaaggggtttcactatgttggccaggctggtctcgaactcctaacctcaggtgatctgcctgcctcggcctcccaaagtgctaggattacaggcgtgagccaccgcgctcggcctatttgggtatatttttaagagacaggaatcttgctctgttgcccaggttggaatgcagtggcacaatcatagctcaatgtaaccttgaactcctgagcccaaaggattctcctgcttcaccctccccagtagctaggactacaggtgtgcaaccacgccccgatacacttactctttttgagctgatatacatccgttataaagggatgatattttcacagggtgattgttagaattatgtgaacatggtatattgtagaacctggcatattgttaggcattcataagggatgctagttcctgacctttctttcatacctaacgcattggagacatgtagtttcactgaattcacaagtaagtataatttgtctaattttctcatggtgtcctggtttctgagaccatctgatatgttagaatgaacaatactaactttttgaaagaagtttgtatttcagaagttttaagttgattataataaatctcattaatttttcaccaatctcaaatgaattaaacttttcaagtaatggataaactacctaaaataggatattgaaaaataatgataaacttaaaacttcaaaacatttttatttttgagtatacattaaactttatgttgtatgttttattttttcttgaattacagattgaaaagtttaactttttaatcataagattttaaattaatacaaaagaaaccagtatacattgaattctgggtgtacccattatgctacttcaacagtttttttcacctccgctcctccattaatttatttatttttggctctagcattttaaagcatattccagacataaataatttcattaagaaacaattagagctgatttttttttcccattaagtaactaatagtgcttataaagtttaaattgtggccaggcgtggtggctcatgcctgtaaacccagcactttgggaggctgaggtgggtggatcacctggggtcaaggagttcgagactagcctggccaacatggtaaaaccctgtctctaccaaaaatacaaaaattaggtgtgtcgggcgcctgttatcccagctacttgggaggctgaggcaggagaatcacttgaacctgggaggtggaggttgcagtgagccaagatggcaccattgcacttgaccctgggcgacaggcaacaagagtgaaactgtctcaaaaaaaaaaaagttgtgtgtgtgtgtgtgtaaatgtataaatataagagtgagattcttcctctaccccaaactatcattaattgatgtatctccaatatcttaacccccatactatcattaatttggtatattgccagtctagattcgcttttatattttccagattagctcttgttaaaaaattatttttaaaaattgtgataaaatacatgtaccttgactttttaatatgacattgactttttgaagataccagtccagcatacctgttatcatgcagattttcctgtattcataatttttaaaataattgtcttattgtggtgatatttactttgtatttcatgtaaattgaaagttaactataaagacttgattaaattcgagttaaacaattttggtgagagtgtttcctaggtactcatattacgtttggatcaggaggcatacagtctttagattgtcccattattaatgatgctaaatttgattacttgattgaggtgaccactaggtctctccattgtaatggtttttttttttttttttttgtgatggagtcttgctctgttgcccaggctggagtgcagtggctcaatctcggctcactgcagcctctgcctcccgggttccagtgattctcctgtctcagcctcctgggtagctgggattacgggcgcatgccaccatgcccagctaatttttgtatttttagtagagacagggtttcaccatgttgaccaggctggtcttgaactcctgacctcaggtgttctgcctgcctcggtctcacgattacaggcatgagccaccacgcctggcctgtaatggttcatttttatatttgcatttagcttgtaatctgtggggtgatgctttgtgaatatccaattccctaattgtcttttacttaataacattttcttttttgtttttttctgagatgaagtctcactttgtcgccaaggctggagtgctgtgatgtgatcttggttcactgtaacctccacctcccaggttcaagcgattcctgcctcagcctcccaagtagctgggattacaggtgcctgccaccatgcccgcctaacttttttatttaatgtttttttttttttgagacggaatcttgcttttgtcgcccatggtggagtgcaatggtgcgatcttgattcactgcaacctccgccccccaggttcaagcgattctcctgcctcggcctcctgagtacctgggattacagacgcctgccactacgttgggctaattttttgtatttttagtagagatggggtttcaccatgttgtccaggctggtttcgagctcctgacctcatgatctgcctgccttggcctcccaaagctctgggattacaggcctgagccaccgcgcccagcaacttttgtatttttaatagaaacagggttttaccatgttggccagactggtctcccaactcctgacctcaagtgatctgcctgcctcgacctcccaaagtgctgagattacaggtgtgaaccactaggcctggccttaatggtattatattgttaattatcccagcctaaccatttcattgggggttaaagaatgatgccaaatgatttctaaatataaaatgaattattctggggggtgggaaattcagtataaattgctcctcctatgtctagtttaaaatttggcaatctattttgatttcagataccagagtaaatactgtaagtttattgttacctgtatggtcagaatcttttggtaaactcttttattgaattcttaattcaccatagtttgaattttggaaggccacttgcacagtgcttgtagataaagattgattgtagtagggcaattacagttggtaatctattacaatattggcaacatggccaaaaataaaaaagccctgccagtttttaaatatagcaaatatatattaatgatactgtgtataatttagaattataatctctattccataatgtcctctcttggctaatgtaaattaactgtatacccgtatgaattcccattaaactagatttttttttttttttttttgaaacagagtctcactctgtcacccaggctggagtgcagtggcgcgatcttggctcattgcgacctctgcctcccaggttcaagtgattctcatgcctcagccacccaagtagctggacttacagttgtgtgccaccacgcccagctaatttttgtatttttagtagagacagggttccaccatgttgaccagactggtcttgaatgcccgacctcaagtgatccatctgccttggcttcccaaagtgctgggattataggcttgagcaaccgtgtctggccttgaactagattttataaagtccttcagagcaggtattgttttagtgatcatttatgacctttcctttactctcaatgattaatctgaagaaaaaatatataatacctttttattaagaaattaattttatcagccatctttgcattgcatatttaagtagctacttttgttagctttttttatagaagagtatatatttcctgtagatatttaactcagagccactttcactggtttgtcattggagcaatgtatagaaagcagatgtcctgggataatattctggttgaattagtgatgaattttatatcttaaaggagtaaatgttcactattactcaattttctcatttgataataatgaaagtaccaaaatttgtaaactttgtcaagcacttctttctttttttaaattatagatgactggcatctatatcaagcactttcgagataggtcataagcttatgcagtgagtacttgggtgcaccatgagctgggatatgagctctttgaggacagaaacaataataataatagctaaaatgtatagacctgtactcagcactttacatatactgtggttttatataattttcacaagtcctttaaagtttaattagatattagcctttcataaatactgtatggaagttcagaaaatttaaatataaaataagttgtaaatctaggtttcagatctttagatagtctgatttcagagccccagttctcaaataccttgcaaactttgttaaatttgtttttaagtcaccttcatccagaatcgtactttgcgttgtgagactaccaaatgaatgaactgggttttggaggaagagtagaatttaggtaaatggagatgatggagacaggcttgtttggggtagggggtgggatggtgtgaataagattgtagaggcaggagggtgcgtggtgtgttcggtggtgtgtgaagagaaccactggctaagattgatgcttttgtacggaattggaagttaagatggcatggcagttgaaagttggccacagtgtgccttccttttgccaggatgagactattttttttttttttttgagataagtctcgctctgtcacccaggctggagtgcagtggcatgatctcggctcactgcaagctctgcctcctgggttcatgccattctcctgcctcagcctccggagtagctgggactacaggcgtccgccaccgcgcctggctcatttttttgtatttttagtagagacggggtttcacggtgttagccaggatggtctcgatctcctgaccttgtgatccacccgcctcgaccttccaaagtgctgggattacaggcgtgagccaccgcgcccagccgagttcagactattttgtgggcaacagcaagacatggttttttaggagggtgataatatattcaaattggtattttagcagtcataactttggcattgtgtaggatggattggctgagggaagaattggagacagatattgaagactactgtattagttaaatgaagtgattttactgataaaatgattggtatacttggacatggcaaggaaaacctagagagaaatatatgataaagcatcttgattattgaatatgtagcaagaaagaaggattcatagatattttcatggcttcagatgaagagaataagcatatcactgaagaattgagagttggcccacagaactgagtttgaaatgtaggcaggtaccttatattagagttttgttatcagatagaactcaaaattagtggtgagtcagtggtaagggttaaaaataactgctcgacatagaagggattctgtttgtgtgtgtgtgtgtgtgtgtgtgtgtgtgtgtgtgtatgtatgtgtatgtgtatgtgtatgtgtgtctgcctgcctgtgtggaggggacccttttagaactctccttacagtggcagatagcagtagttatttttttcttttctttttttttgagacagagtcttcctgtgtcacccaggctggagtgcagtggcacaatcttggctcactgcaaccgccacctcctgggttcaagtgattctcctgcctcagcctcccaattagctggaattacaggcacccaccactacgcctggctaatttttgtatttttagtagagctggggtttcaccataatggccaggctggtctcaaactcctgacctcaggtgatccacccaccttggcctcccaaagtgctgggattacaagcgtgagccaccgttccccaccaatagttacttttttttatgaggagcaaataatctagaatccttcttagttcctaggtaagcaattaactgttcagagtcttccagccccaccccctaattttccttatttgtcttctgccactaagtttcagcatttggtttggttttgggccctttgtactcttctttctggcttttgctaattgccctggtatttttctagtgtccattgttagcactcctcaaattttaacttagtccatttttaaatctatataaattgcctccttgacatttaatatgtccttagatattttttaaactgtaaaattaacgtgttcaaaacttttagtcttctttatccagatttgtcttgctatgtatgttccttgtctcagtaccatatacctagtggctccgtcttggaaactggatttgtaccctctgctctcattgaacttgtggccaaatcttgttaccactcactgtctttcatatctttccacttttgctctgtcttttctactagttttagttcaaattaccattatctcttgccaggattattgcacagttgcctccttagtgggctccctatttcagatccatgtgctttcacttcattcttcatgctatatagtcagagtgataaccagatatctaaatgcatatagtctacagacataccaccctgaaccctgtatctcatctaaatgcatgtctaatcatctcacttttctgtttatgggatgaagttcagattccttgaaatgtcttccacagctctggatgatcatattcttgttttgttcttcaggttctcctcagtgctcctcgccgcctagaactttctctacccgttttctttccatccccagctccacacttttactacacctagctaatgtctgctcatctctctaggtctcaacttgagagggaggcctgtgctcctctatgactaggttaggttcccttcactttgttcttctcttatcctgactttctttgcttcattttcttgtttgttttttgttttttttgagatagagtctcgctctgttgctcaggttggagtgtagtggcgcgatcttggctcaccgtaaactctgcctcctggattcaggtgattctcctgcctcagcctcccgagtagctgggattacaggcgcctgccatcatgcctggctaatttttgtatttttagtagagatggagttccaccatgttggcctggttggtctcaaactcctgacctcaagtgatacgcccgcctcagcctcccaaagtgctatacaggcttaagccaccgtgcccagccttctttccttcattttagtaactcgtttgtcatctttgctagactgcaagttctgtgaaagctgggtctgtgattatcttcttttggatcagaccttcaacttctggatacatatttgggaactgaatgacttgcagtatatttcagccctttttgcctgctcagaagagatgcccgattatcatttagaaaaacaattggctggtatttcaaactgaaaacagcagaagggtgataatgggataagaagttgaccagcagctcatagacaacaggcaaattgtcaagtggaaaggaaataaactgtgggtaaataataaccaaattatatttgacaaattgagttatcagaattgccattttgtatactctaactgcacatagttgaaacttagcactacattgtataaaaaagatattttgcatattaatttttttttttttttttttttaccatttttattctttggcacatagtcttgctgtcacccaggccggagtgcagtggcttgattatagcccactgtaacgtcgaactcctgggctcatgcggtccccttgccccagcctcctgagtagctaggactacaggtgagcaccactacacctggctgatttaaaaaaagtttttcatagatatggcttcttgctgtgttgctcaggctggtcttgaactcctgcgttccggcaatcctcctgtcttagcctctgaaagtactaggattacaagtgtgagccaaagtgcccagcctgtattgttaaagctgtgttaaccaacaacagtttgggaatgaataaatagaagtaaaggagggaatactttttcttattttagaatagtggcattttgagtaattgttctgtgttcagaagtaaccatgtttaagtacagtgtaaatttttagtaaaattttacctgttgtgcatatttccatatatatagaattatgagtgaaaacatacatgttgtgtaatatacaatggaaaaaccataggactgagaatcaggaggccttaggagcaaattcttgccctaccacccatttgtgatctgaaggaaaggagtaaaacctgtgtgagggtaagggtcttcatctgtaaaataagaggtttgaaccaaatactgaaagttctttgtaagctcgtttgacattttataattgtatgtttttttgtaatcataataaaaattgcctaattaaattttctaattataataatatatgttcattgtaaaaataattcaaattttaggaagaaaagcatctgaaatactgttgttttaatgattacattttcacttagtgtattattttcacttagtatatatacatgtatataattttttatgcatatgcttttttatatgtgtacaaatcttatatatacatacatgttttttttttttttgagacggagtttcgctctgttatccaggctggagtgcagtggtgcagtctcggctcactgcaacctccactccaggttcaagccattttcctgcctctgcctcctgagtagctggaattattgacacgtgccatcatgactggctaatttttgtatatttgtggagacgggtttcacgatgttggccaggctggtcttaaactcctgacctcaggtgatccaccctcctcagcctcccaaagtcctgagattacaggcgtgagccactgtgcctggccacatatgtgattttttaatgcacacaacattgtttatgtgttctgcaacctgcttttttcatttagcagtatattagaaatactgttccatgtcaatatgtgtagaactatattatcaattttaattgcttacctagtattcatgtttgcattatatgtataaaccataatatatttaactgatactgtattgtgggacattagattcttttttctgttgtaaatgatgctaaaataaaacaatgtgtaggcgtttattcacttaaaacttaggataaagttctaaaagttgaattatagggggtaaggggaaagttaaagatacatacactttaaattttgataaataatgctttcgtgaaagataaacaatttgctgtctcacttgcattatatatgagactgtccattttttacattctttccaatgctaagttttctcagatttcaaaatcttccatgttttgattgttgaagattttattatttgcatttattaatgattaagattaaacattttttcacatttcacttatatgttcatgtgctttgccaagtctaagggacttatccttttctttttttaaaaattgatttgtgaaactttgtatattagaatattagccctttactgttgcaatttttttctctctaaactatcattagttcataaacattatttaagggggtgtacttggtctttcatacagaagttttctgtttttatgtactcaaattcatcagtaatttaattttttggcttttatttctctctcttcctttttttttttcctttgagacagagtctcactctgtcgcccaggctggagtgcagtggtgtgatatcagctcactgcaagctccacctcccaggttcacgccattctcctacctcagcctcccgagtagctgggactacaggcgcccgccaccatgcccggctaattttttgtatttttagtagagacggggtttcaccatgttagccaggatggtctcgatctcctgacctcatgatccacccaccttggcctcccaaagtgctgggattacaggcgtgagccaccatgcccggcctctctcttccttttttttttttttaaaaatagagacacagtcttgctgtgttgcccaggctgatctcaaattcctggcctcaagcagtcctcatgccttggcctcctccctgtgttggagttataggtgtgagccacctcgcctggctcttctggcttttatttcttagaaaagttatttctacctttagttcataacaatattttcttaaatagcctattgttattttatatgacattattgattaaaatctttgctctgtttagaatttatttagacacaaaattaggaatccaaattaattttgttccagtaattagttgttttaacatcatttattgactagtccttcctttccataaagatgtagaatgctaatgtttatcatactaaaatcacatgtgtagttgggtctgtttttagatttgcacttttttacatttacctctgtaagtttgtttctgctcaactaacaccctcattactctatctttaggatagatttgatatctatagggcaaaaatcccgatattcttattcagaattttcctggctttttgaaacattattgaattataatttacataaaatagatttgccctttttaggtatatagttttatgagttttgatgaatagttgatagccaccagtagagtaatgacatagcagatttttatcaccgcagaaagttctctcttgctactcagtgctctcccatcatctctaatccaagggtgatctgttttctgtctcagtagttttgccttttttagaatgtcatataagttgaatcatacactagctttttcggtctagcttttttcacttgttatattacttttgagatccatcagtacagttgcatgaatcagttcatttatttttatttctgagtagtaattccttttgtggagatagcacaatttggtgctacaagttgatggacatttggattgtttctagtatttgaagattgtgggtaagcctgccctaaacattcacatagaaatcttgtagtgggtggccgggcacggtggctcacacctgtaatcccagcactttgggaggctgaggcgggccgatcacgaggtcaggagattgagaccatcctggctaacacggtgaaaccccgtttctactaaaaatacaaaaaagttagctgggcatggtggcaggcgcctgtagtcccagctactcgggaggctgaggcaggagaatggcgtgaatccgggaggcggagcttgcagtgagctgagatggcactactgcactccagcctgggtgacagagactccatctcaaaaaaaaaaaaaaaaaaaaatcttgtagtgggctggatgtggtgactcatgcttgtaatcccagtactttggtaggctgatatgggcaggtcacctgaggtcaggagtttaagaccagcctgaccagcatggtgaaaccctatctctactaaaaatacaaaaattagtcaggtgtggtggcatgtgcctgtaatcccagctacttgggaggctgagacatgagaattgcttgaacctgggaggcagaggttgcagttagctgagattgcaccactgcagtccaacctgcaacagagtaagactctgtctcaaaaagaaagaaagattagagtggatgtatgttttcatttttcttgggtaaatacctagcagtgggatattttgtgtgtgtgacagagtctcactttgtcgcccaggctggagtgtagtggtgtgatctcggctaggtgattcttgtgcctcagcctcccaagtagctgggattacagatgcccgccaccacactcgggtaattttttaaaaatttttagtcaagatggggggctcaccatgttggccaggaaggtctcgaactcctggcctcaagtgattcgcctgccgtagcctctcaaagtgctagaattacaggcacgacactgtgcctggccctagcagtggaattgttgggctgttaagtgtaagtggcctgttaagtgtgtttaagttcataagaaactgctgaactgttttccaaagtggttgtatttttcatttctgccagctctgttttttccttattcagacctcccctcaagaaagaatcctaacttgatattgccagtttaaaaatcttcagccattctagtagttgcatagtagtagttcattgtagttttaatttacattaccctaatgaatagtgatgttgagcatcttttcatgtacttattttctatatatatctctttgatgagttgtctgttcaaagtgtctgttattgggttgttttcttattatcaaattgtgaaagttctttacatattctgggtagaactcctttatcagatacatgttttgcaaatgttttctaccattctctgtcttttctttctcttaatactttcacagtttttcatagcagaaatttataaattaatgaagcccactttatacttttatttcttttatggtttgcatcttttgtttcttaacttcgaaagcttttcctaaccctagatcacaggattttctcttagatttctctaggcattttataggtttaggtttcacatttaggtccgcaatgcattttgaaaacttccgtctgtaaggtttgggtcaagattccctttgtctttttctttgttttttttgttttgttttgtttttgtttttgtttttgacaccgtctctcacttttgtcacccaggctgcaggagtgtggtggtgcgatcatggctcactgcagccttgaactcttgggctcagatgatcctcccgcctcagctgtctggctcctttttttttttttcaccatttttattaacttgagaattattctgtaaagttcttctacccactgtcacgctctagatattttcattaaatttattgattaaactaggaggaaattatagtcatgacagaattatctttgtacttaaaagctgcatgtgtatcttcatctttttttttttttttttttttttttttagacggtgtcttgctctgtcacccaggctggagtgcagtggctcagtcttggctcactgcagtctccgcctcctgtgttcaagcgattgtcctgcctcaacctcccgagtagctgggattacaggcgtgcaccaccacgccaggctattttttgtatttttagtagagacggggtttcaccatgttgaccaggtggtcttgaactcctgacttcaggtgatctgcttgccttggcctcccaaagtgctgaaattacaggcatgaggcatgaggcatgagccactgtgcctggcctatctattcttacattcttttttttttttcaaaggagacagggtcttgctctgttgcccaggctggagtgcagtggcgtaatcatagctcattgcagtctggaactgctggccttaagctatcttcccatcttagcctcttgagtagctaggactacaggtgagcgacaccactcccagctgttttttattttattttttgtagagatagtcttgccatgttgcctggactcaaggaatcctctctccttgacctcccaaagttgggattacaggcgtcagccactgtgcctggccgtagtcttatattattttatatcgtcttagagatttttattggtatttaatacagattgtaagttttcttctagtatttttatttttatgatgggagtttttcctagtatatttttgtgagattattactagtatataaaaaagactttggtttttctacatataattggtaattggatatataatgttataacagtgagaagctatacaattgtaatcagaaacagaatgaattatagtaaaatactttgtggtacttcaagcattgtttttgtctttgaaatctgagattagcagagataaatatttttggttcttaaatgctgtggcaaagtgttaagaaaaatggcaaaatcgataaatacaatttctgcctccaaacaatgtagcaggatacttataatatatactgcagtaagttaaataccataagtagaaagttgtggtgtggagtgagggcaggcagatactaaggcagttaagaaagggacaaggtcccgggtgtggctgctcacacctgtaatctgagcactttgggaggctgaggtgggcggatcacctgaggtcaggagttcaagaccagcctggccaacatggtgaaaccctgtctctactaaaaaatatataaattagctgggcgtggtgctgtgtgcctgtaatctcagctacttgggaggctgaggcaggagaatcactggaacctggcaggcggaggctgcagtgagccgagatcgtgctgctgcactccagtcggggcgacagagcgagactgtgtctcagaaaagaaagggagaagagatgtaggagaggagatatttgagagaaactttgaaagggcagtatggtaggatttcagcaaagagataaaggagttgtggggagagagaacattatatgaactaatattcatggcagctagataggaaaagcgagctctacaatgtcacagaagttatgggaggaaataatttcaaggcgtttgattgtgtttatagctctgacattatatattaagccttttttcttttagcccttcacttcttgattttaatatatcagtgtattttgttttatgttttttgagactgagtctcactgttgcctaggctggtaggcactggtgcaatcacggcttcaacttctgggctcagttgatcctcccacctcagtctcctgagtaactgggactacaagtgcacgaccacacctggctaatttttttgtattttttatagagatgaggttttatcatgtttgccaggctggtctcaaactcctgggttcaagcaatctgcctgccccggcctctcaaagtgctagattacaggtgtgagccaccgcacctggcccatcagtgtattttgtaagacagttttctactttaacatttttctagagtcagtgcatgtcttgtatatacttaaacaaaacaactttttcattatctataataagactttgtgaaggctgaattatctcttaatgcataacaaactgccctaaaattttgtggtttgaaacaataaccattttattatatcagatgattttgtgaatcacaaattctggcatgattggctgggtgatttcctctgcttcacgcagtgttgactggagttgctcattggtgttgagttggtggctggtctggtatggaaggtccaagatgactttactcacgtgcctgttgctgtgttatgtatggctagatactgaactgagtgaacccttctctttctccaagttgtttcaggaccattccacatggtctgttaattaggaagttggatttcttacgtggcagctcaggactccaagagtcttgacacccagcgacataggtggaaacagcaagtcttcttatgacttagctttggaagtctgaaccaatttctcactgcacatacattagggcacataatgtatgtgtgttttggaaaatttcacttggagcacattccaattgaattaagattgataaagcatctgtaggtgtgtatctaatgatgttagctaaatatacaacttttaaaaaatgtagaactttaattggttgtgtgaaaaagtgtaactaagagtatataacaagtacaacgagagtctggttcccatagttacatatgcccacacatattgttatcattaagaactatgtatatgatttaccatttgcattacagagtataatttaaattgtaataaataatgtaattgtataatgtggacttagaggtctaagaatgccccaggttgtatatatgtgaaacaatcacgtttgatatagtagctatagacacacgattcagtgatttaaagtgatttaattctgtaaccagataccacctacaatatcttagtacttcatatcttggttttataatatgttgagaacagacgaaatgcttttatttctgctctggagaccaatcttttctgatagtttagtgaggaaaacctgagctaaaatttttcacaggccactttatcatgttatgcctggcatggtttttatgtatatatgtatttaaaaaaattttttttagagacaaggtctcactctgttgctcaggttggagtgcagtggtgtgatcatggctcactgcagcctcagactcctgggctcaagtgatccatctgactgagccttctgagtagccagtactataggtgcgcaccactgtgcctggctaattattgtattttccatagagaaagggtctcgccatattgtccaggctggccttgaactcctggcctcaagccatcctcccaccttgtcctccaaagtgctgggattgcaggtgtgagccactgttcccagctgtatgtgtccttttttattttcctcttactctttgtgtgttcttgtgactattgttattgtagtatttttgtaactctttgttactgggtgcttttgtaataaaattctgtttatatttaataataatagctacatttgtccagtgcttaaaattaggtattgtgcatagtgttggaaataatgcatatgttgccttgttataaaaattgtaaaaggctgggcgtggtggctcgtgcctataatcttagcactttgggaggccaaggtgggtggatcacctgaggttgggagttcaagaccagactgaccaacatggagaaaccccgggtctactaaaaatacaaaattagctgggcgtggtgctgcatgcccgtaatcccagctactcgggaggctgaggcagagaatcgcttgaacccgggaggcagaggttgcggtgagctgagatcgtgccattgcactccagcctgggcaacaagagcgaaactccgttaaaaaaaaaattgcagaagacaagtgttattatctatacagatgagattactgaggcacaacacggttaagtaacttgcttcatgtcacttgatcagttattggcagagctagaatttgagcttaatatgtataattacaaagcctgaattatttctattatatcacaatacatttggggtttctttctttttcattttctttttcttttttttttttttttttttgagacagagtctcactctgtcacccaggctcgagtgcagtggtgtgatcctggctcactgcagcatcagcctcccaggttctcatccctcagcctcccgagtagctggaattacaggcgtgggcgaccttgcccggctacattttgtatttttagtagagatggggtttcaccattttggtcatatgacctcaagtgatctgcctgcctcggcatgccaaagtgctgggattacagcggtgagccaccgtgcccagcctactgctttttttcttatgtggatttaacacttatttatggcccgctttgtgcttgggtggtggtggaagaaagggagatacaaagaggagaactttctgtttcttgccttgagataatttttaatttaattggagagataaatagctgcaatgtaaaagacactgctcattgttggtaattttgttttttttttttctgtgtattgcttttttgtcttctatgattgccttcaaatgcttatcaatagtaatttccttctttttacttaaatcttttgcctcctggaaacttcattcacattgagcatcacttatatgcaaagcaccattctaggttctacagaaggtagcaaagagcaagatatgataattgcaaaggagcttagaaaccaggagggcagattgagcagttatacaaaaaatcagaattcaaattatagaagagggaggaggaggatatgatcatttgtgattatgggcatcaaggagtgcttagtggaagaagctaaatttcaccgtaatcttacaggatgtgtaggatttgggcaggaggaattgggatgggcaatcgcattttagctaagggatatattagtaaaaatattggagtaagacatttgagtaatgatgaatcaagtaatccggaatcttgttatatatgtgggtgaatagttgaagaaaaggctaaaagaaggtgagtcttaactgaagattcttgaatgacctattatgggagttttctgtttttagataggcagaggtaagctgagttggtttattcattcgttttaagcagaagatagtgacatggtaaactatacatttaaggaatcttttttggtcactgtgcttacttggtggaaaggaaagaaactataggtacggaaaccctttcttttaaaagctagtgagaatacactaggtggtgactctggaaagggaaaaaaagatggaaatattttaacgaagtataaactgaactggtcaagtgatttagtgttaggggaaaattgaagaaagaagtattattagtgttactgaaaattttttgtatttggatgttggatgaggatgtgccattaacatagagaattggaaggagaacttgaacttttttatattagaaagatgatattttggtgttaaatattatggagatgaagatgtggagtttggcagaggggttgggttgggagattaatttggagattagtttgccacagggttatagtttacatcatgtgagtgcatttttagaggcaatatagagaagagagaggaatgcctaggagagatcctaggtaaatgtgcaggtttggatggtgggattatgagaatgagggagtagtcaggtaggatagtacagtttcagtgaaacttagggagaaattttgagaaggaattgatactgttatgttgcagtgaggtccacggaaaaaagggctgagaagccactggattttttagctttgattagctgtgttagcgaggggctgtgataaatcacttctttcccatttactgtttgtgaagtcctttctcttctttttactgtatccttcatctccttcaatttttattttagtgtatgtaattgtaatcattttgtaatgtaactgcttttccttctgcttcaaattctttacatttctcttcttctgccgctgcttgttctctcatctatttctagccatacattattcctggaaggaataatgtaagagagggaaggtggggaatgtcattgttgtcgttcagttcagttgatttcatggactgcgttattatggtgtgaattatggctcatggctcatattcagggcaggcaaaactgtgatggtgtgaagcttgtttgatgtttgtgcagcaacaatatattgtgactgaaagctgtagtatgaaattctaacatttctttctctcttcttttttttttttttttttgagacagagtttcgctttgttacccaggctggagtacagtggtgcaatctcggctcaccacaacctccgcctcctggttcaatcggttcttgtgtctcagccttccgagtagctgggattacaggcgtgcgccacctcgcctggctaattttgtatttttagtagagatggggtttcactatgttggccaggctgggctcaaactcctgacctcaagtgatccacgtgccttggcctcccaaagtgctgggattacaggtgtgagccactgcgcccggccaacatttcttaagaacttccagtgtggatttttatgatgctgtaatttcttaaaaaaattaatgaacctatataaagaatttcctatacatcaaaatctgtggttgagtaaaagtatggcttctttttcttaaaaactgttaagcctaataaataatgtatgtgtgtatgcatattcagaatacatatataatttattttttaattctaattttaattttttgagatagggtctcactctttgcccagactggagtgcagtggcatgatcacagctcactgcagccgtgacctgctgggtttaagcgatcctcccacctcacccacccaagtagctgggactgcaggcatgtaccaccatgcccagttaatttaaaaagaatttttttggctgggcgtggtggctcacacctgtaatcctagcactttgggaggccgaggtgggaggatcacaaggttaggagttcaagaccagcctggccagcatggtgaaacccagtatctactaaaaatacaaaaattagctggacatggtggagcatgcctgtaatcccagctactcgggtggccgaggcaagagaactgctttaacctgggaggcggaggttgcagggagctgagatcacgccactgcactccagcctgggacacaagagtgaaactctgtctcaaaaaaaaaatttttttttttttaatagggacaggatctctctgtgttgcccaggctggtcttgaatttctgggctcaagctatcctcccaccttggcctcccaaagtgctaggattacaggcatgaatgagcctttgcaccagcttataattatttctaattttctcctttttttctcctcttgattaactatagcataacatcgagataatatatatcaagtgaggtagaacagcacttgaacagttttaatggagggagacctttggaaactttttttaatgtgtttatgtgagtacatattatgttatatattcagtgttttactttgaatttttttttcttgtatctccttctaatatactgagtgattctaaatctttaaaaaagtatgtatctgaacataattattaattctttcgggaaggagagttaggctaccaacttgattgtacaaataatacataatatatgaatccctttctttttcttttttctttttttttttttttgagagtctcactctgttgtccaggtgggagtacactggtgcgctcttggttcactgcaacctgtgcctcctgggttcaagtgattctcctgcctcagcctcctgagtagctgggattacagacgtgcatcaccatgcccagctaatttttgtatttttagtagagatggggtttcaccctgttggccaggctggtctcgaactcccgacttcaggtgatccacctgccttgccctcacaaagtgctgggattacagacatgggccactgcgcccggccatgaatccctttctattgtagaagtttcaaataatttaggaagtaaatgaaataaaaaccagaagttccttgtctttcttccctaggggtaagccccctattttttttctttttcttttttgttttttttttttgagacggagtttcgcttttgtggcccaagccggagtgcagtggtgcaatctcggttcactgcaacctccgcctcccgggtccagtcggttctcctgcctcagcctcccgagtagctgggattataggcacacaccaccatgcctggctaattttttgtatttttagtacaaacggggtttcaccatgttggccaggctggtcttgaactcctgacctccggtgatccacccgccttggctttccaaaatgctgggattacaggcatgagccactgcgcccggccacaaatccctttctcttgcagaagtttcaaataatttaggaagtaaatgaaataaaaaccagaagttctttttctttcttccctagggataagccccccactttttttttttttttttttttgagatggaattttgctcttgtggcccaagctggagtgcagtggtgcgatctctgctcactgcaacctctgcctcctgggtccaatcgattctcctgcctcagcctcccaggtagctggattacaggcatgcgccaccatgcccggcttattttgtatttttagtatgaacggggtttcaccatgtttgcgaggctggtctcgaactcctgacctcaggtgatccacctgcctcggcctcccatagtgctgggattacaggcatgagccatggcgcccggccaggggtaagcccttttaagtgttctgtgcatttacatatgtacatatgtaaacacacactcacagaagagattatatcgtttactattttattttattttattttttgagatggagtttcgcccttgttgctcaggctgggttcaagcagttctcctgcctcagcctcccaggtagctggattacaggcatgcgccaccatgcccggcttattttgtatttttagtagagacagggtttctccatgttggtcaggttggtctggaactcctgacctcaggtcatccgcctgcctcccaaagtgctgggattacaggcaagagccactgcgcctggctaagattatctagtttatttttaaaaacctaaatatactatatatatgcctttttctgtaacctgcttttttttttagttaacagtgtgtcttgtagcgcttctgttatatattgttaaatttatatacacatacatatacatgtgtatctgtctgtatttctaattaagttttgcctttataagttttttagtaagcatttcatttcagagtagttttagatttacagaaaagttgcaaaggtagtacagaattcccatacaccattattaacatcttacatttttctagcacgtttatcatagttaagaaacagtagtgatgcattattattaactaaagtccatactttattcagaatttccttagtattttgtcttatatcctttttctgttcaaggatcccatccaggatactgtattacatttaatcatcatgtctcgttagattccttttggctgagacagtatctcagacttccatcgcttttaatgaccttgattgtttgaggtgtaccagttaggtattttgtggaacgtctcccaactgggatttgtctgatgttgtcctcatgattagactggagtttagggttttggggaggaagacaataactgtaaattttaaaaacaaaatttaatttaaaaatatcgaaaaatttatagtaagaagtgtccctagctttccctactgatttcgtgttcctcagctcgtttagtatcccatctacttttttttgtttttgagacggaacgttgctgtgtcacccaggctggagtgcagtggcgcaatctaggttcaccgcaacttctgcctctcgggttcaagcgattctcttgtctcagcttccctagtagctgggactacaggcgcgtgccaccacacccagctaatttttttttttttttttttttgaggcagagtctcgctcttgttgcccaggctggagtgcagtggtgcgatctcggctcactgcaacctccacattcctgggttcaagtgattctcccgccttggcctcccaaaatgctggcattacaggtgtgagtcactgtgcccggcctaatttttgtatttgtaatagggatggggtttcaccatgttggccaggatggtctcaatctcttgacctcgtgatccacccgccttggcctcccaaagtgctgggattacaggtgtgagccactgtgcctggccatcatctgcttttttttttttttttgagatggagtttcgctcttgttgcccaggctggagtgcagtggcactctcttggctcactgcatcctccgcctcctaggttcaagcgattctcctgcctcagcctcctgagtagctgggattacacacatgtgccaccacgcccaactagttttatatttttagtacagacggggtttctccatgttggtgaggctggtctcgaactcccgacctccagtgatctgtctgtctcggcctcctgaagtgctgggattacaggcgtgagccaccacgcccagccccccatctgcttttaattccaagtttctgaataaaatgctcatactactttttttaagttagttttagacatatagtgcattcttgtttagataagaattgtcacttttattatttatttttatttttagtatttttttcaagacagactcgcttgtcacccaggttagaatgcagtggctcagttagtagcagggactacaggcctgtcccaccttactcagctaattaaaaaacaaattttttttttttttttcccctgtagagacaaggcctcactttcttccccaggctggtcttaccctcctggcatcaagtacacctcgtgcctgagcctcccagagtgtttggattacaggtgtaagccgctgagcctggccagaatgaccacttttataacctagcttctttcctttttaataattccacataccttagttaaaacaatagtcagtgcttataatgactctgcaaatgctgtttaatgcagatcagggagagatccttttatatggctttcttcatttttgtgtagttaaaaattgcctctctttttcatttacttatgtatccattgcttcattttctctctattctctgtgttctgtgataagagaaaatttgtcaggtccccctttgtttctggaggtcttgtttttaagagctccattcttgtacttcagcctgaactagttatccgctgagccatctgcacagtgtttattttaatacattctcatctgctcttttatgctgggtcctccgatctcacattgtcttcctttgtttactactccctagtttacttgagcacaccctcaaataacttcctgtgacagcatgcatgtgtggtaattttttaaaaatttttgcttgtctgaatatgccttcctgcatacttgattgatagtttggcagattataaaattgtatgttaaaaattattttcattcgcaattttgaaggcattgctgtattgctttttagcatctgtgtactgttactgttgaagagttcatttccatagttacctgatcttttatgtaatctgtttattttttactttcctctagagggttttagtacattttaaaaagtcacgagggctggctataggttcacgcccagaagacccgtggagcttgcctcctatggtgtggcgctgctcaacagccaccctgatttggcatcatttttggcagagataaacagcagtttcctgggctgtctctagctgccttcagggctttttctccctaaaggcacttgcagtgcttcttgcggattaaggcagaaattgttttcctgcaggagaacacaagatggtgaagaagctggctgtctgcctcattcttactttttctaatgtaaaacttttagtcttgggggatttttctatggggtgcctcgcatatttggggaggggaatcacagaagtcgatttctcttaccatctgtttggagttttaaatttccctgtgaccctggagattatctgtacctcaggtttgagttctgggatattgctaacgatagtcttgatcctggatatttgtttttggttttctgtggggaagagtgaagccagatggcttctgctctgccatttgatgatgccactgtccttatttatttattttttaacatattgaaaatattttgctggcttatggctgttgagaagtcagtagactcttggctgtagtctgttttttccttccgcttcttttatagtcttctctttgtctttagctgttttgcagcttccattgtggtgtttttatgtgtggaattctttttatttattccatgtaagagttattaactttcttgagtctgattttctgccctaattttgaggtctgtatggctgcagttggaaggaggtggtgaacaagaatttctccaaggtttctgggggccccatagctgcaaggtcagaacagaaatgaaggcagtgtccactactgactcaccttgggagccctcatgactttaataatagtggagactagtgaattttattgaaaccagatgagattattttgttactaagaacaggtgttccaaagtggtagttacaataagaatcaactggcatttgttgactgtaagattcttagtgcagtattcatctttatttcctaaatccatacatgcttaatagaagtatattgggtgaatgagatacatattacactgaagcatatgtggcttatactgctaaatcataagttcaccatatttctgaagatcccatttgtattttgtttaaaattattttaggctgggtgcagtggctcaccactgtaatcccagcactttgggaggctgagggtaggtggagtgtttgagcacaggagtttgagactagcctgggcaacatagtgagaccctgtctctacagaaaattaaaaaattagctgggtgtgatggtgtacacctgtggtcccagctacttgaggggcttaggtaggaggatcgcttgagcctgggaagtcaaggctgcagtgagctgtggtcatgccactgcactccagtccatgtgacagagcaaaaccctgtctcaaaaaaacaattattttaatgagtttcttttttatatcttaatctttatgtgtgggctaaacacatactttatatatgtttaaaaagtgtgtgtttagcccatgttcatttttccacatatatgatttcttttttgttctgggttgatagtaacttagtcatacattccttctttcttccgttcttagattcctttggctgtttgggtttaaactgtatcataggtctgtttgcatctgtttctcccactcccctttgtatttacttatttatgccttaaaaagttgacctcatgttttagagcagcttttggttcatagcaaaattgagcagaagctacagacttctcatatatcctctcccccgacacttgcatagccttccccattattaacatcccctatcagagtggtacatttgttccaactgatgaacctgcattaacacatcattaccacccaaagtctatcatttacattaggagtcactcttggtgttataaattttcatgggtttggacaaacgtataatgacatgtatccaccatacaccacagagtattttaattgtcttaaaaatcctttgtgctctgcctattcatccctcctccccactataccctggcaaccactgatctttttatttaaagtctccgtagttttgccttttccacagcgtcatatggttagaagcatacgttatgtagccttttcacactgcttttacttagtatgcatttacatttcctccatgtctttgcatggcttgatagctcacttctttttagtgctgaagaatattccattgtctgaatgtgctacctaaaggacatcatggttgttcccaagttttgccaattatgagtaaacctgctgtaaatgttgtggtacagatttttgtgtagacataagttttcagctcctttagataaataccatagactgtgattgctggaacatatgataagagtatatttagttttgtaataaactgctaaccagccttccagagtggctgtaccattttacattcgcaccagcagcagatgagagttccttttgctctgtatttttgtcagcatttggtgttgtcagtgttctggattttggtcattctaataggtgtgtagtggtatctcatttttgtttttatttgtgtttccttgatgacatcaggtgtggagtatcttgtcctatgcttatttgctatctgtatatcttctttggtgaggtgtctcttaaggtctttagtgttttttttggtttgtttgttttttttgaggcagggtctcactcgttcatccaggcttgagtgcagtggcacgatctctgctccctgcaacctctgtctcctggactcaagtgatccatctcaacctctcacctaaaactcccacctcaacctcccgagtagctgggactacaggcacgcaccaccgtgcccagctaatttttgtacttttagtagagacagggtttcatcatgttgcccaggctggtcttgaactcctgggctctagcagtccgcctgcctcagccttccaaaatgctggtattacaggcttgagctactgtgcccagcctggtccatttttaattgtttgttttcttattattgagtttaaagagttacctttttttggataataaccctttattggatacatctttaccaagtattttcttatagtctgtggcttctttttagtcccttgactgtgtcttctgcagaacagaaaattttaattttaatgaaatccagctttatcagttcttttttttaatctattgtgcctttggtgctgaatctaaaaagtcattgccaaaatccctggtcatctagattttcttctgtgttattttctagcacataccacttctcctagtttagacttttttttttttggtatgtggatatccagttgttccagtaccgtttgttggaaagacttctatctccatcaagataagttgattgtatttaagtggatctgtttctggactccctattttgttccattgatctgtttgtgtattcttttgcctataatacattgtcatgatttctctttttatttttaaataaaatgtgtaatccttatatttagtttgacttttcagagaatttcttgcttttatggtgttagaattcttacttttattctgagaattatgatgagaagatcagttacgaatttttcccaagcctgagattaaactgtgaaggataaaaccatacaaattcttggtcacagaaataaatgaataaaaactgaataagaattctagtcttgttaggagtaatgtattatagtaaacagtgatgccacggcactgttttccatcacttctgtatgtaaagatctagaagtggctttttctttttcattttttctttgagactgagtctcactctgttgcccaggctggagtgcagtggcgccatcttagttcactgcaacctctgcctcctgggttccagtgattctcctgcctcagcctaccaagtagtggggattaaaggcacccgccaccatgcccagctaattttttatatttttagtagagatggggtttcactgtgttggccaggttggtctcgaactcctgatatcagacaatccacctgccttgccctcccaaagtgctgggattacaggcgtgagccaccacacccagcctagaagtggctttttaaaaggaacatactacgatacattagtggcagatttgatttttatatacagtggtctgaattatggccaaaatttctttctttgggattatggataccaatattataggtaaatagatattattctacatttggaaggcttttatctttacaaactgcctcagtatgtattttctatttaatctttacacaaactccattttacagctgcaactggagatctgaaagtttgtcagttatctaggttgtagagcataatcttgaacctaggtctcctgagtttgtaggtatcccactttatcatagctctgccatgtaacatgactacaggaagtttaatggaggcatttaaggttggattttgggctgggcgtggtggcttaggcctgcaatctgagcattttgaggggctgaggcaggaggattgcttgagcccaggagttcgagaccaacctcagcaacatagcgagaccctgtctctattaaagaaaaaataaagaataaaagactggattttgaaaaaggataggctctaccaagaagtggaaaaattgtaagaagggtgaaaggtaggttgaaaggctgagaggtgagagcaagacagatgtgtgggttaaggacagaagtgatgtcacaaaaaaatgccctttgtttatgtatagatgggattatttgtgtttgctgaggatgttttgatatcaggaggggtaactgcaattacgttgtctataactctcctgtcttggctttgccattgtttttgtttctatagatgtttttcacataataacttcataccttcaactgtacttgaattatttaatatcatacccgagtgcatattctaagattccttttcctgtgttatgaaattaatatgtgcccattgcagaaacttagaaactttccaccttaaatagtggaattttaaatgttaaataaattaaatatattcaatatgttaaatatttaattaaataaataattttaaataatggcttttaataatttgggttatctttcagtttgtttttggaatgtatgtatatttctaaagtttaaaaataattgagtcatagtgtatgatagttttatttccctagaagctagtttaattttattctgaaaaatatttatgttttgtgattgtggtaggcttatatagtgaatatatgctattaaaagtttatagttgttggctgggtgtggtggctcacgcctgtaatcccagcactttgggatgccaaggcgtgcagatcacttgaggttaggagttcgagaccagcctggccaacatggcgaaaccccatctccactaaaaatacaaaaattagccgagtgcgatggcgtgtgcctgtaatcccatttacttggtggctgaggcaggagaattgcttcaacccgggaggtggaggttgcaggaagctgagatcgtgccactgcactccagcctgggccacagagcaagactttgtctcaaaaaaagaaaaaaaagtttatggttattttaacctgtatgattacaagtcagcatcctgagtacctttaggggtgctatacaaagactggaagggaacacagaaggattctgtggtgccgtttcacaagtatcttcattttattacattaatattatactttaataaaatttaatagttactaaaataatacgtttaagttgataagattaaattgaattattggaaaaagaaatgtggagacgttttaggtgactttttttcagttgtaattttaagtgatatataaatagttcattttgttagaagtttagttacttaggaaatattatataatgtgtctaagctccagctacttggagtaacattttttttttttccaagatgtaatctcactctgccacccagcctggagtgcagtggcatgatctcggctcactgcaacctccacctcccgggttcaagcgattcttctacctcagtctcccaagtagctgggattacaggcatgcaccaccacatccggctaatttttgtatttttagtatagatggggttttgtcacattgaccaggcttgtcttgaactcctgacctcgggtgatccgcccacttcggcttcccaaagtgctgggattatagacgtgagccaccgcgcccggcctggagtaacattttatagctagacagcagcctatgacaggatttcaaggactttaacatcagaaagtaagagtggcaaaccaatcagaagtgtgggaacactgtaatctaattcagaagttaagttatatgtgaacagataaggagttttatctcgtttattctcccctgtatccctaatctttttcttgtactcagactgtgtatttgttgagtcagtgaattcctgtttgctgtactttcgtatgcttggagtgttatcacttgaaaaaaaaaaacaaaaaacactttgtcagtgttataggtgaaagtaatgtcttttaatttgtatattattaatgattgaagtttaaaaatgtttattagcacatgaatttaattttttgaaaatttatttaagtagtctagacctgtgctattcagtatggtagacactagttttatgtgactattcaacacttaaagtgaaactagtttcaaattgagatgtgtcataaatgtaaaatatatgttagattttgaaatcttatgaaaaaatgtaaaatatctcatcatttaaaaatatcagttccatgttgaaattataatgtgttggatccattgggttaagcaaaatatatcattaaaattaataaaattgtttaccaattcagatttagattactgtctagatctggacagtgcttatatagacagtaatctaatcactacatgattaggacctgggttatggtagtgtttatagaaaggaaagtaaggagtgatttttaagagattatgcagtatgcatgtatactatataatctctactatattccaggacatttcacagttcttgtatacttccatcatggttttgtaatcagtcgtaagctttttgagggcaaaggtttatgtcactatttgtatatccttctctgtattttgtcttttgctgggtgcataggaagtcatttgaacaaagaagaatttaataggctatcaaatattttgtttgaagttttagaatgcaaatgaatgatccctagagttattatgccctttatttaaatatcacagtatcaccaagtagtcagattgagtcatactatttttaaaaggagccaagggtaagggaaccaacatctagtcttatgtatgccaggctctatgtagtcattttatatattttttcatttagtccttatagtaaccataatgaggaaggtatcaattaccatttacagattaggaaactgagatcaagtaatttttctgttatgctgctaatccatagatgctcaatttcaacactggcacttttccatcgtagcttttgcttcacctaaagttagttattttaagtgatttgaaataaatttaatattttggttgacacgaagtgaagaatacttagaataaaatgtataatgatacattttgacaatatgtatttcatattcaataaaaagggaaatttagaaatattccccaaaacctgagaggaaaaagaaaaggcattatttgttcctcattctgattttctttgtgtattgtaattccagaaatttacctatagtttgtgcagataaatgaagttgtaattttttcattttaaatatttcctttgttttgtcttccagataaaatcaaagacaaaattaaagagagagacaaagaaaaagagagagaaaaaaagaaacataaagtaatgaatgagatcaagaaagagaatggagaagtaaagattttgctgaaaagtaagttttattcagtgattttagttctactttattatactgttcagtatctttattggctaagtgaataaaataagaaatgttatttggtgctgaattttgcggagaatgaacaatgatgaggaaatgaaaagtaaatgtaacaacggagagttctaatctgtatggtaacatgtcttatagtatatttagtgagccattaaaaagttaaaaggttaagcttcgttaaacttaatttcttaaattattttaaaataagttaattctatgtttgcattactagtcttactcatatttagataatctaaaaggaagaaattaagaaaaattgccaaagcaagttttagtatgatagggatggtgaagtaagtgatcttcttaaaaatatttgactgtcatcaccataccatagtctagcatttagagggaacattttactctgagctaaatcagaagcggtatgtttcttgtatgtttaagaatatccttgttttattcttttttttctctgttacagttgcattcatttgctgtttatatatgagggtggggtggagagaagaatttggggggtaggtggttgggtaataagtatactgcaaatcctgtcaataagtctgaacttgtaaagagagaatttgtggtagaatagacgtaaggatagtcttaaattcactcagatgtcaaggtaagaagaatccgtggcattcggttgctagacaactagcgaattcactagctagcaaatttactagtgctatcatgttgatagttgatgatgagaatatgttgaccttgattaacttcatattgaatttaattgttgataaggctttatatttgcttgagggggaaagaccacgacactgcatatgtagcaaaataactggtagtttatattatctaagataaagagtattagattctgtattttcattgcattctttgtcatgttttcagatattcgttttctattatctacatgtcagaacttcattttctacgatattctttcaaccttgaagaaatacgtcagagcttaagttgatggctgcttattagttaatgctcatgatccttttgttctgtttcttttgcctgcatattctatctgtgttgtctaattagattgtaagcctttgaggcaggaattgaatataaccacactagttatttatagcagctagtgatgaatgcttgaaaagtctgcttaaggccaggttcggtcgctcatgcctgtaatcccagcaatttgggaggccgaggcgggtggatcacttgaggtcaggagtttgagaccagcctggccgatgtggtgaaacctcgtctctactaaaaatgaaaaattagtggggcatgatggtggacatctgtaatcccagctactggggaggctgaggcatgagaattgcctgaacccgggagacaagaggttgcagtgagctgagatcaccccactgtactccagcctgggcaatagagtgagattcagtctcaaaaaaaaaaaaagaaaagaaaaagtcaagtctacttaactttacccttggtttagcccaatagccatttttttttctgatttaatcaaatagttttcttattcatttgaaaatatcatgctgtaaattctattacttgagaaggaatctgttttagaaatactttataaaagcctcatatgttcttgattgaatactggattcctaacataatgtgaattatgtgaatccagagattacacatgaaaataaaatttaaaacagcctaaaaattgagatttttaaaaaatgaaatatacgatattaactttgaagtagacaaaaatttaggtgatattttgaaccgagttaaactgaaactagtgatgattaaggtaaaagaatgagatagatgtggaaattaatttgtgacttctgggatgtccatggaaaaatttagggaaaatgtattcacagtggaggtaagtaataatttaattactgccttacagtgttaccaagattaaatgagggaaagtatgaggaaagtgccaagtatagaatctggctcacaggtacttactactgagtagtaaatagttatgaaatctttcttgtaagtatgtatgagagattaactttgtgattaaaaagcaacaaaattggccaggcacagtggctgaagcctgtaatcccagcattttgggaggccgaggcaggtggatcacctgaggtcaagagttcaagaccagcctggccaagttggtgaaaccccatctctactaaaaaatacaaaaaattacggtgggtgcctgtaatcccagcaactcgggaggctgaggcatgtgaatcgcttgaacccaggaggcggaggttgcggtgagccaagatggtgccactgcactccagcctgggcaacagagagagactccatctcaaaaaaacaaaaaacaaaaaacaccaataaaaccaaactatctcctctcctcagtgtgtagtacatagataattaagtgaataaacacatgattcattgggaaaacagtgcttgtcgcattgaaagcactgagtgttatctgttgttactatctacgagaaagaatttgcttagtatgtggggccatttcccaagtgagcctgtggtggtggtagggaaaggcatcttttgttgttggtgacttggaacaacaaatcatttactttgctgagggaaaatatactttcatttactactgtgtgccacttttttccttgtggcctccaacttttattctatccttgtaatttttttcttctgttaatgataatgttgcaagctgtggtatacacaggtgttgatggatgatggcatttgaaaatctaaaatagatgtcaagtatgtcacaccaattcattttctccaggtttttcttaaaaattgtgtcaggtaggctgggcgcagtgtctcacgcctgtaatcccagcactttgggaggccaaggcgggtgggccacttgaagctaggagtttgagaccagcttggccaacctggtgaaaccccatctctactaaaaatagaaaaattagccgggcgtggtggcgctcgtctgtaatcccagctactcgtgaggctgaggcaggagaattgcttgaacccaggaggcaaaggctgcagccgagattgtgccactgcactccagcctgggtgacagagcaagacttggtctcaggaaaaaaaaaaaaaaaaaaaaaatgtgtctttttttttttttttttttttttttttttgagaggagtcttgctctgtcatccaggctggagtgcagtggcgcgatctcggctcactgcaaactctgcctcctgggttcaagcagttttcctgccccagcctcctgagtagctgggattacagccgcacgccgccatgcctagggctaattttttgtattttagtagagacagggtttcaccatgttgcccaggctgatggcgaactcctgaggtcaggcagcctgcctgacccggcctcccaaagtgctgggattataggcatgagccactgcgtccggcctgtcaagttttttctgactggaaatacacacaaaattatatatatgataaaaagtgttttattaatgcgaaaaccttataaaagtttatttggtaagaaagttggattatttgctcttttcaaaatagtttaaaggaacaaataagtttgaaacaaagcttatttagtgggtcttattttatactaaagttcaccaactgctttttctgattgtatgcattatgttccaggcatttttatgttgtttattaatgataaagtgtgagaacatgtgttatgattatagtattttttagagtaaatgtttgtcattatagcattttaaataagtttgctggtgagcagttagaatgagggttgaaagaagccagtgtccaaggtgactggtagtgtactaaaggtcacaggtaggtaaatcatggctggaagagtgacaacattgcagtgcaaaaaaagcagattcgaatcccagaggccaaaagttgagaataactaagctaattagtacttttttcctatatgtaataatgggatgggggagagagaaagatagatataaattttataaatttttctgaattttgtttttcactttattaatacagaaagtatacgaaaattagtggtagaattaactcaatgaatttgtgatcttaaaagtttttttttatttttcttttcataattagccattaacaacacatgctgtctttgtttctgtgtgcgcttctttctgcctctgtgagtgtctctctctggctctaagtatacctgcatctctgtttctgattccctcactcccagtctggcacactctctctggctctgactctatacacgtgtgtatctgtggtactttgtgtgtgtggtctgctttgtgcatttgtatgtggctttggggagggtctcccatcaacatttttcttttcttttctttttttttttttttttttgagacggagtttcactgtgatacccagtctggagtgcgatggcacagtctgggctcactgtaacctctgtttcccgggttcaagcgattctcctgcctcagcctaccgagtagctggaactacaggcgtgcgccaccacgcctggctaatttttgtgtttgtagtagagatggggttttaccatgttggccaggctggtctcgaactcctgacctcaagcagtccacccgcctcagcctcccaaagtgctgggattacaggcatgagccactgcacctggccaccattttacttctcatcttacacttttgaaggggcagattagttggatagcagttctattctttctgttataggtacctgtcaggatcctttattgggttctgttacagaattatagatttaggccagatgtggtggctcacgcctgtaatcccagcattttgggaggctgagatgggtggatcatgaggtcaggagatcaagaccatcctggttaatgtggtgaaaccctgtctctactaaaaatacaaaaaaattagctgggcgtggtggcaggcacctgtagtcccagctactcgggaggctgaggcaggagaatggtgtgaacccgggaggtggagcttgcagtgagccaagatcgtgccactgcactccaacctgagtgacagagcaagactcggtctcaaaaaaaaaaaaaaagaaaagaaaagaattatagatttaatgtggactttaaatactctttagtgtaggagaagcaaattggtatttaaaatggcctttttccttattttaaaattttctgcatacatatctactgcatttcatatgtagagataggaaatgagcgagagattacataaagctcttaatctatctggtgaatgctagtaccccagtttggtttcatgtaaagaatgcattttgcctgtgtccactgggattcctaaggctactcccagggcctgtgatttgctgaaaggattcacaggactcagcatatggttgtacttatggctatgatttgttatagtgaaggaggacaggcatggtggctcacagctcttatcccagcattttggggagctggggccggaggattgcttgagcctgggagtacgagaccagcctgggcaacgtggcaagaacccatctttaaaaaaaaaaaaaaaaatacacacacacacacacacacacacacacacacacacggcaagaatccatctttaaaaaaatatacagacacacagtgaaaggatacaaagtaaaatcaacaagaaaaatagcacttggtgcaatttctgaaagaaactaggcacaagtttctgagagtcctttcccaatgttgtcacatgtgatgtgcttaattcttgcagtggtgaattgtgacaacacatgtgaaatcttgtctgccagagaagctcattaaaaactcagtgcccagggtttttcttggacattggtcatataggcaccatttgcctaccacaaactaaaattccagactcccagaaggaaaacaagtgttcagcaaaaccatgttgtttaggcctggtgtggtggctcacacctgtaatcccagcactttgggaggccgaggcacgcagatcacttgaggtcaggagtttgagaccagcctggccaacgtggtgaaaccccgattccactaaaaatacaaaattagccaggcgtggtggtgcatgcctgtaattccagctactcagttggccgaggcaggagaatcgcttgaacccaggaggcggcggaagttgctgtgagccgattgcacgattgcactgcaccctgggcgacagagtgagaccctgtcttaaacaacaacaacaacaacgaactatattgtttgcacagttttggcacagtgaagactcttacttatggaatggggggaaccctccaaaaataagagttcctagatgctagccgagagtcagccttgcaaacaggactgagaataacagtctcaggcatattatctcttctgcatacagtgctcatttcagtatttaattacagaatagttttccatgggaattttttttttttcgagacaaggtcttactctgttgccagtatggagtacagtggtgtgatcacaggccactgcagcctttacctccccaggctcaggtgatccttctgcctcagcctcctgagtagctgggaatacaggtatttgccaccacactcagctaatttttgtattttttgtagagacagtgtcttgctttgtttcccaggctgctctgctgtgagaatttaactccttgatgctcagtctaagaatctcttggccaggtgcagtggctcatgcctgtaatcccagcactttgggaggccgagacgggtggataatctgaggtcaggagtttgagaccagcctgcgcaacatagtgagaccttgtctctattaaaaaaataaataaataagttggtttttttttttttttttctaaaggaatctcttaactgatttcttattggtttgcatttttcagttcctgttatagtaccttttggtttatcttcatgcctatgaaatagactaagtgttgtctctgttctatttcaaactaatgtgttctcctggtaatattttctgatttaaccttttttggtgttaggcataagtgtaggatattaaatatactttcactcaaatgaagttttattcattttggcaacaattgcgtaatttatgcagttctacatatattttcagttgtatttaggaatgtcattaatcacacctttgccctttaagctttgttaaattctattttttattgcattactgccttctttccctgattttttttgattgtttcatctttcattttggttagtcccctgtttcacttatttttatttcattttttttgtagagatgaggtctctctatgttccccaagctgatctcgaactcctggcctcaagtgatcctcctgccttggcctcccaaagtgttgggattacaggcatcagccaccatgtctggactgttttactttttacatttatttttattttatttttttctctgttgccttggctggggtgcagtggcatgatcatggctcacagcatcctcaacctactgtgctcaagccatcctcctgcctcagcctcctgagtagctgggactacgggcatgtaccaacatgcccagctaattaaaaaaaaaagattttgtagagacagggtctcaccatgttgcctacactggtctggaactgctgtgtgcaagtgatcctcctgccttgccctcccaacatgctgggattacaggtgtgagccaccatgcctggcctactgtttgacttttttttaaaaattaattttgtccttaagatactaattaacctaaatatgatattttgatagttcatacctaggtggcaagtctgaatttgataacgttattcaagtgtgtgtcttagctgcttagagatagactttttttttgagggggagacgtctcactctcgtcacccagtttggagtgcggtggtgcaatttcggctgggattacaggtgcctgccaccacgcccggctaatttttcatatttttagtagagacggggtttcaccatgttggccaggctggtctcgaactcctgacctcaggtgattcacctgcctcggcctcccaaagtgctgggattacaggtgtgagccactgcgcctggccacagatagactctttagagaattaacactttgccttttatgactttatacacctgtgtaatgaataatgttgacagattactgtttttgcttctcatactagttcttcattggatacttatgaattatcacgtctgtgaatttttacagagaatttcttaacattaaacttcacttttatggattgctatcaacttaaaatagtttttgttgttttcagggctagaatttagtggtattcatatgtgcaaaagcttgactgaggctgggcacagtggctcacgcctgtaatgccagcactttgggaggctgaggcgggtggatcactggaggtcaagagttcaagaccagcctgaacaacatggtgaaaccctgtctctactaaaaatacaaaattagctggtcatgttggcgcatgcctgtaatcccagctacttgggatgctgaggcaggagaatcacttgaacccgggaggcggaggttgcagtgagccgagattatgccattgcactccagcctgggaaacaaaaagcaaaactccgtctcaaaaaaaaaaaaaaaagttgactgaaaggaagataagggaaaaaactataagcctcaggtagtctgttagtgagacagattttttcattcatactttcattaaatattcttatgtagcaatatgccagatactatgagggatataatgatggaaaaggaggtatcatttcactctaaattaatataaaggttatttgtttcactcatagtgttgattgacatatagtatacaggtatcctatgagagaaacatgtaacttttgtaacatatgacttaggagtgaagtgatttcagttctaatttgagaaatgagggaaagcaacatgaaggaaaggatataagagttgtctttaatgcagtggtccccaaccttattggtaccagggactgatttcacggaagacagtgattccatggacagatgggatggtttcgggatgattcaaggacactacatttattgtgcactttatttctattattatacattataatatgtaatgaaataattatataactcaccataatgtagaatcagtgggaaccctgagcttgttaatctgtatttggagcagctcccagcactagtatcatctcagatcgttaggcattagagtctccataaggagcaggcaacctagattcctcacatgcatggttcataatagggttcaccctcctatgagaatctaatactgacaggaagtggagctcaggcagtaatgtgagcaatggggaatggctgtaatacagatgaagcttcgctggctcgcccactgctcacctcctgctgtgtggcctagttgtgacaggctatggaccagtaccggtctgttgccctgggattggggatgcctgcattaaaggatagtgtattagtccattttcgcacttctataaagaagtacccgagactgggtaatttataaagaaaagaggtttaattggctcatggttctgcaggctgtacaggaagcatggtgctggcatctgctcagctttcgggaggcctcaggaaactttcaattatggtggaaggtgaagggaaagcaggcacgccgtacatggccagagcaggagagaggtggtgatgggggaggtgctgcacacttgtaaacaaccagatgtcactcacaatggtgatgcagaaccaagggggaaattcacccccatgatttcagttacctcctaccaggccccaccttcaattgtaattggggattacagttcgacatgagatttgggaggggacacagatccaaaccatatcatttcacccctggcccctcccaaatatcatgtccttctcacattgcaaaattcagtcatgccttgccaacagtccccccaaatcttaactcattccagcattaacccaaaagttcaaagtccaaagtctcatttgagacaaggccaagtctctttcacctatgagcgtataaaatataaaacaagttagttacttccaacatagaggggggtgggtataggcattgagtaaatacttctgttccaaaagggagaaattggccaaaaaaaggagctacagacctcatgcaagtccgaaacccagcagggcagtcattaaaccttaaagctccaaaataatcccctttgactccatgacccacatccaggacactctcatgcaagaggtgggctcccagtgccttgggtagccccacccctgtggctgtgtagggttcagcccctgtggctgctctcaagggctggtattgagggcttgaggctttttcaagtgcgtggtgcaagcttttggtggatctaccattctggggtctggaggacagtggccctcttctcatagccccactctgcagtaccctggtggagactcagtgtgggggctccaaccccacatttccccacattaccttttccaaaccataaaggtttggaaaatttgcagtctggccatgtggtagaaaagaaaagcctattgtcagggaagagttcaagcaggctgcagaaatttgtgtaaataactgcagaaatttgtgtaaataaaacgaaagagccaactgctaatagactagacaatgggggaaagtcctagaaggcatttcagagaacgttgtggcagctcctcccatcacaggcctggaggcctagtaggactgagtggtttcctgggccaggcccagggccctgctgctctgcacagcctcaggatactgctccctgctccccagccatcccagctccagctgtggctcaaaggtgcccaggtatagcttgagccactacttcaagggtgccagccataagtcttggtggctctatgtggtattaagcctgccagtacacagaatgcaagattcgaggcttgggagcttccacctagttttcagaggctgtatggaaacacctggatgttcaggcagaagcctgctaaaggaatggagctctcatggagaacctctctactagggcagtcacttccacattgtcagatgtctttatagcaatgccccattcctcagtaccagttttctgtattagtccattcttatactgctataaagaaatacttcagactgggtaatttataaagaaaagaggtttaattggctcatggttctacaggctgtacaggaagcatgatgctggcatctgctcagcttctcgggggggggctcaggaaactttcagtcacatcaaatggatagaaaagagttcatttgtaaataatgagcaagtgaagtgtattttaaggagaggaaatacctttgccagtagagttatgttttataagaaattgtaaataaatagttcagtttgaccagagtatgaggtacttgagggcactgtctttggattccagactgaagagattataggtagacattgagagctcttgaaagcagtttagctaaggaatgaatatgatcaaaagaatacataaaaattatagaaaggttaatatggctgtagcattcaggatgagagacagttatgcagctgttagaccaaaaattaagacagtggcatcaaggaattcagaagtaatcaaggatgagctggataattctgtcaaatcacggagacaccagaaaaaatgacttgagtaaatatgactggatttgatatttcaacattctgggaaagcaaatttaaacagattgaaaacagaaccagaatttaagcagtaagaatgataaggtggtaaaggaaagacactaggcatagatgattctttttttctttatttttttctttttgggatagggtttcgctgtgtcacccaggctggagtgcagtggcacgatcttggctcactgcaatctgcctctcagttcaagcaattctcctgcctcagcctcccgggtagctgggattacaggtgctcaccaccatgcccagctaatttttgtgtttttagtagagatggggttttgctctcttgggcggggtggtctcgaactcctgacctcaagcaatccactcacctcggcctcccaaagtgctgggattacaggcatgagccactgcgcctggcctgaagattgttttctaaaatattcattcatctccttatttctgtaaactgtgagcatttgctatatgtcagaatggtagcacacactgtagatgtaactttgctctatgcccgtctgtctgtctgtctctctctttctctctctctctctgtctctctctcgctgtgtacatgaagagactggctggctgggtgtggtggctcacgcctgtaatcccagcacttcgggaggccgaagcgggcagatcacgaggtcaggagtttgagaccagcctggccaacatggtgaaaccttgtctcttctaaaaacacaagaattagctgggcatggtgacgcgctcctgtaatcccagctacttgggagactgaggcaggagaattgcttgaacccaggaggtggagtttgcagtgagacaggattgtggcactggattccagcctgggcgacagagcaagactctgtctcaaaaaaggctgactaaatattgattatcaattctgtaaaaaatgagtcctaaatatataattctgagtaaattttcagaagtaaacttcttacttagacaaaactgttcctaaagcatggtttttaaagtaattaaaatatggagtttcaaaaaacattttttccaacaggtgggaaggagaaaccaaaaacaaatatagaagacttacaaattaaaaaggtaaagaagaaaaagaaaaagaaacacaaagagaatgaaaaacggaagcgtccgaaaatgtatagcaaatctattcagaccatctgctcaggattgctaactgatgttgaagatcaagcagccaaaggcatcctaaatgataacataaaagattacgttgggaagaatttggataccaagaactatgattccaaaattccagagaacagtgagtttccatttgtctcattaaaggagccacgagttcagaataacctcaaaaggttggacactttggaatttaaacaactcattcatatagagcaccagcctaatggaggtgcatcggttatccatgcctacagtaacgaactctcccacctgtctcctatggagatggagaggtttgcagaagagtttgtgggtctagtgttcagtgaaaatgaaaactctgcagctttctacgtgatgggtattgttcatggggcagctacttatttacctgactttttagactatttttcatttaattttcccaattcaccagtgaaaatggagatattgggaaagaaagatatagagacaacgactatgtccaattttcatgctcaggtaagaggtttttagttttataaaataacttttaattatatatttttagatgagtttctgttttttgttcctaattatagggctgaaataaaaaggtaagaatataatgaaaccatttgggagtattaagagtaaattactttcttgatgtgagcatcagaatttaaaattcaattttcacttatgtatgtttttttttaaagacaattaatgaaataattaagattctgtgtttttttttttttttttttttttttgcaaggagtggtcttgaacctaaggaaatgaatttagccatgtattttccagtccttaaatagttttcttacctggaaatcacctaaaattgtcttctagctttaggatgctttaaggtacttagcaccaggcccatcacatggtaggtactgaagaaatgttggccattaaaaatattgtggtatgaaggaatcatcagttactgtgtaatgatgtgttaaaagtagcaatcagtatattgagctaattttcatttcctacccttctctatggtggagaatatatattattctggaaagcagacagaatagagtctgctgggtcttgaacatcagtgtgggcccatctgaaaggctggtgccattatcacccatcctcagattgggactgtttagtctggagattggccagttctcacatttattgatgctgtagtttttggttttctaggaacggtttttggtttctaggacaacattctagtttggaaggagggaaaaagtaaaggaagtctcaaatggatcttagtgattatttatcccaacacctctcaatttacaaataagtaaacagacgtagagagagaggagtaaggtattgtttaacattgtcagcagtgtcaggattagaacaaaatcttaatcttcatccagggctcctttccttattctgaatatgttcctttttggatgggtgctcaagttatagtttccactttaaatggtagtctggatgttcagtcacatccacatgtaccccgcccccaatagtatgagtatgtttggtgtatattctgtagtagattgtagtctggaaaataatgtggtgtttttttgttttttgttttttgagatggagtcagactggagtgcagtggtgcgaccttggctcactgcaacctctgccttccgggttcaagcgattctcctgattcagcctcccaagtagctggaattacagacatgcaccaccatgcctggctaatttttgtatttttggtagagacagggtttcgctatgttggccagggtggtctcgaactcctgacctcaagtgacctgcctgccttggcctcccaaagtgtggggattacaggcgtgagccacctcgcccggcctggaaaataatttttaatgtgcgtatgtgggaattattctctaacatgtttgagaattgaaaattaaatattttctaaactagatagggagctatagagcatccattactagccctgtcattttatagaaacccaaaatggtgagttacttgtctgaggttacacctgaatataatggcagaatcaggactggcatctaataatagtgtttactatttattgagtactgactgtgccaaggactagttgttctgagtattttatatgtagtaactcatttaatcctcattataatcttactttagcagtgaagaaacagatccagtgagagaagagataacatgttcaaagtgccttatcaccttatcattcatttgtcgtttattgcatgtctcctaaatgtccggttttctattgggcctcttggctcccattcccggttatttccacaataccacaaactttcttgctttgatactatgcaagtttgcttcagtaaccttttaaatgtgacagtacattgatgtgcatcacattacatgcttttcagatggtttttcaaataagtttaggaattattttatactaaatgataaaaattttcatctaaactatctaatatgtacaccatgaaaactgcttttgttactaaataaaatgagatgctggacttgttaatcatggcagtgtgtgcctgggatgtggatctcaagtccttgatgagccacctcctctggttgtcaccatgtcttcgggcttcttgggtaatatatattgcaaagaggaaactccaggcagatggatcctgttttttaccagttgtggttctggccccatatctgtgtgatctgctaccctggtgacctaagcatgtcagctgcagggactacttttgcttctttagctttagacttaaaggcaggaaagtacatgtgcaaggcccgtattccttttatcacaagattcttcagatcttattcctgtgagtggggaagttgttgtgtgcagattggggaggtagcctttgatttgtccttaggcactggctttatgaaactgaatgggatccagaagagagagcagtaggagaaaaatgagcatgcttcttcttgcacagttctatttctcatccctggagtcctcccagttaaagctctctcagcctacattgaagtgtccctccaggagttgattttatttagtaaactttttattgaagtgtaatgtatgacatagtatacatattataaatgtataacttgatgaatcttcacagggaacacacccatgattttaaaaagccaaatattgttaatagccagaaaccatccccgaacccttctttatcagtactgtgccaaccccccagtcccaccacatgaacaaatacccaggtgatcactgtcctgactttgaacatcactgatatattttgcttctttttgaacttaggtggaatcagatagtacgtacattgttgtgtctggtctcttttctgtagtataatgtttgtgagattcatccatcttgtatgtagtggtactgctgtatggtattccactgtgttagtataccagtgttaatataccacagtttgttgatcttgttaccatatggatggacatttgagttgtttccagtttgaggctggtagaacacggatgctatgaatatttttcacatgtcttgatgagcatatgtatgtgtttcttttgagtatatacctaagattaggatttcaggatcaaaacatatgcacctattcagttttgctaggtactgccagtgttccaaagttaaatgtgcctatttacattcccagtggcagtgtttcacatcctttgccacggttagtagtgtctttttcatttaagtcattctggtgactatgtagtggtagctccctgtggtttaatttgtatttccctgatgactaaggatgtcaagtacctttttatatgattattatccagttgaatatcctcttttgtaaagtacctgtccactctgtcaatttcttatttgctttttttctagttgatttgttggactattatatatgtagataagaatcttttgtcagctaactgtattgcaaatatttcctctcacttggtgtcttaccttttcactcatagatgtttttggtaactagaagttcctaagtttaatgtaatctaatttataatttataatccatttatgataactgtttcttacattctgttttagaaatctttgcctaccacaaagtcattaatatattctgtgaagttttcttctggaaacttttattgttttacctttcatggttaaatctatagttaataaaacagcagctaaaagtattggaaaaataatctgtagttcatctggaattgatctttgtatatggcatgaggtaaagatcagggtttatgtttttccatataaatatatccaaaagacccagcatcatttatggaaaagataccccttcctcattgtattgtagtgtcaccttaaaccagctaatcatatgtgtgtgggtctgtttctgggctccctttgattccattgttttgtttgtctaattgttacagctttataataactctttctattgattgattgatagatacagggtcttgttctatcagccaggctagagtgcaatggtacgatcatagtgctttgtagtctcagattcctggcctcaagtgatcctcccacctcagcttcctgggtagctgggactacaggtgtgagccactgtgcctagctttatcattaatctcaataatctagaatcggtttgccagctttgttcttcaagatttccttggctctttacatttccacataaactttcgaatcagcttttcaagtttcaaagagttatctgctagaatattgcttagtattacattaaggctatagataagttagggtagaatcgatgcctttacaacattgagtcttccgatctgtgatcatggtattccccttcatttgtctttttattttctgtcagtaatattttttggttttcagcatagaggtcttgcagatttttaagatttattcctgtatattcaagacctcatgttgttaatcaccctttttgagaacatggaagttttcagcacttcttagaatatgacattaacattcatcctgagaaactgaaacagtattttgtactccatttatcttccaacatccccctttcccttatctgtggtactgtcatgcatatgctagttatttggaatgtcagaagtttagtaattagccatggcactattcaggaggctgaggcaagaggatcactaggacccaggagtttgagcccagcctgagcaacatagcaaggcccatgtctctttgaaaatgaagaaaatcacagcactgcactccagcctgggcagcagagtgagatcctgtctcaaagaaaaccccaaaaaacaaaaacaaaagtttagtaattaggttttatgaaatttagaaaaaactagttttccattaatgaatgcttgttattagaatatagtgaatatctattcactatatatatattcacaaaatatagtgaaactgtatattttggtggtgtcaagtggatcagcctacatactgctgtgtgaaattgctttcaccaaaagaattggttgagacgacattaattgagctaatgtgagtcagtattctaggggaaggaagagcagaggtaccaatattggaatgtagttttacttaatataaaccacagcaaaaacaaattgtggataataaagccaaattaatgttaaagtgtttgctcaggaatcaaacttgttgatttggtcatgatgattcctcagtaacttcagctgctcctcaacttacgctagggctgcatcctaataaacctgtaagtcaaaaatatttttaagttgaaaatgcatttaaaactctgataagcagctgggcgtggtggctcacccctgtaatctcagcactgtgggaggccgaggcagtcggatcacctgaggtcaggagttaagagaccagcctggctaacatggtgaaactccgtctctactaaaaatacaaaaattagctgggcatggtggtgggcacctgtaatcccagcttctcgggaggctgaggcaggaagaatcacttgagccctggaggcggaggttgcagtgaaccgagatcgcgccattgcactctagcttgggtgacagagtgagacttgtctcaaaaacaaaacaaaaaacaaacaacctctgataagcccactgaaaaaaaaaattgtaagtaagctgaaccatcttaagtcctgatgccgcttgacctaactatgaagtttcaacctgataaacccgtaataaagtcaaaaaattatgagttgaaccttctgagttggggaccatcttgactaagttcactaggttcagttcagtagaacctgctcttgttatgagatgataatgctttctacagagcagaggaaagcagaactgtagagaaaagttctgtacctgacatctttgtaattcagtaactatccttcaattcccttttctgccttttatattctgaaaaatctttgatctagttaaaactagtccaaaagcagtattcaaaagatctagaaaaatgtgggaagacagagtagagtgaagatgatagagaaaaatggtgcaaatctgacttttatttttttattttttttttgagacagagtctagctctgtcatccaggctggagtgtagtggcatgatctcagttcactgaaacctctgtctcccgggttcaagcggttctcctgcctcaacttcctgagtagctgggactgcagacgcgtaccaccacacctggctaattttttgtgttttcagtagagatggggtttcaccatgttgcccaggctggtcttgaactcctgacttcaggtgatctacctgcctcggcctcccaaagtcttgggtttacaggcatgagccaccccggcctgacctttattttttagaatataatatagtttggaaaatacatttagcagcattaaagacatttatagctgggtgtggtggctcatgcctgtaatcccagcactttgggaggctgagctgggcggatcacaaggtcaggagttccagaccagcctggccaatatggtgaaactccgtttctaataaaaaaaatacaaaaattagctgggcatggtggtgggcgcctgtagtcccagctactcgggaggctgaggcaggagaatcgcttgaatccaggaggcggagggtgcagtgagccgagattgcgccactgtacttccagcctggacgacagagtgagactccgtctcaaaagaaaaggaagaaattcatggtaatgccatcctctaggtaattaagtagcaccatttttaatcgataaaagagtatatatagtaatgctatatgtgttttgtattttcttatataatgatagaagctgcgcactgcagccattcagtgatgtgaatggcagtccctaggttgtgcaacctgatggtactgaccaccaatagctgtggaacccaaaccaagttcatgatgaatttgtatcctcatgagcctagttttctgtttttgttattgttcttaaattacaatcagggcaaccaaaataatttgctttaaattctgtagaaactaaaagatgacaaattatgtagctgtttctatgatttttgtagtgatagtgtttatctctgtaatagtatcttgtagctttcacaaatactcatttttacatctgttcaactttattaaacacatatacacaacactgacaaaggattaaaacatccctgttcttttgtcttcggttttggaattctttttacttgtataattctgttttccatcttcatctgtatccttgcaggttgcctgaaaggtttgaagaccatgtggtattatatatattttaacaggtcatgtcatttctctaatgctgtggccctgaggttagtgatatattaggaaactgtatcatgaaagtccgtttgaggatagaaacatatgcatggacttttcccaaagtttgtaacctgtccatatctgttagcttttgctgtattaaatgtataaacaaaagcctcaaaacttagtgacttgaaaaaaggtttcatttatcacagttctttgggcttgctggacagttcttgtggtctctgctaacttagctggggctatatggcttcattcttatgtctgatgattggcagaccagttgggtcttgggacacctcacttatatggttggtggttgatgtatgttagctgggttgatggccacatttttctcatcatcccacaggttagcctgggctcatttgcatggtggtggttacagggttccattgagtagaaagagggtaagccccagtgtacaagcttctgcttgtgttgtgtttgctaatgtcccattgacaaagggaagtcacatggtgaaacccagattcgtgtggaaaaatagactccacttcttttaggttatttattcattttactttaattttttttcttgtgacagtctcactgtactccagcctggacgacagagtgagactccatctcaaaaaaaaagaaagaaattcatgataatgctatcctctaggtaattaagtagcactgtttttaatcgataaaagagtatatatagtaatgttatatgtgttttgtattttcttatatgatggtagaagttgtgaattatatatattttaacaggtcattgtccaggatggagtgcagtggtgcgatctcggctcactgcaacttcccaggttcaagtgattcttgtgcctcagtcacccaaatagctgggattaggcatgtgccaccttggcctcccaaagtgctcggcctatttaaaaaatcctttaaatttttaatatttgtgggtacatagtagatgtatatatttatggggtacataagatgtcttgatacaagcatgcaatatgaaataagtgcatcatggagaatgaggtgtccatctccacaagcatttatcctttgagttacaaacaatccagttaacaacactcttttagttaaaatgtgcaattattactgactatagtcaccctgttgtgcagtgaaatcgtaggctttattcattctttctttttttgtgtgtgcgcattaatagactccacttcttgatgacaggagtggcaaaatcacattgcacaggagtgagcatacaggcctgggaagaatttggggccatttgcagttgaccacgttcgttttaggttttctagcatctgtatttcattcaaatattcactcagacatttattgtgctcctgtgttctaccgtagggatagaaaaaggcaaataaaataggaattttctctgtcaagaaataaattagatttctgtcttgtcactatgtttaatcagtgtacatactctggaaccctgtactaagaactgtgagaatgtgaaaactggagtagttgttttctaaccacccttcctccacttccaaactctaaatcttatttttattgtattgtggttctaagttatttctcaggtaacttatgtcaaagtgttaactgatgattaaaagtctattattttaataatgaaacttattaaatctgatctgactgttagacctgcttcactgtagagttggggcagaacactagcatttgttgaatttgtgctggggccattcactgtgttaggctactaaaagcaatttgatgtttcatctttgaaacattgcttgcctttgtactaaattttcattttgaccaattgtgcctgccccatgctccccaaatacttaagaactgatctatacaaaatatcgtgtcagggaccagatgctctaataataatcaaaaagctttccccctttattttactaattttaaaatggataatactttcgttcttattttagttgccgttatatgggtatttttgaaataaaatgttggttaaatattgcctattttgattagaaaccatctgccagaagtgatggataatggctcccccttgtggcacagtcatttatgacatgtttagattgcctcagaatgtcctgagcaggccttgtttttaaaaataagggactctcctccccacccgctaaaaaaaacctcagcagaattgaatcaacagcttctgctcccacccccctcaattctttggctctaataatgatcctgtttttgtattttcttcacattggtgctgatacaagctaaaaatatctgtatctccatatttatggtggatcactatgaaggtattctgaggaacttttaatatcttggaatgttgataggtatactaaaacaagtacaaaaaaaacaggttttgaagtccaaaatagtgtaatgctggaccaaataagtaatatttgtttgcagtgagactcctcagaaactttaatagccagtgtgcgtggtgagcctcctaaacaagaagggttttccaaacttagtggactgtagagctctctcttcagggaacatgttttgggaaacagcaggttgtttcaagtgagtcgttctttggggttttttaaaaaattacttgttattactatatttgccttttcccccttgcagcagttttcgtaattacataagagaaaacagcaataagtaaaaaatcttatagatttgtttttggcaacatatttcctgttaagaataggctacttttttccctttgtagcaagcccacctcagaatcctaaagtgttttttttaaagattacattatataagtcgaatattagtttaaacaattatttcattttatgttaaccaaagcttctcagattttggtattgacacttactggcaatgggtacaataggtctcctacttctgctttcttttttcccttcataatatttatagagaatatacaaggggaaaagtgaaaatgtggccatgatggtcatggggttttgtggggagggggaggagatttagattaaatatgttatatttcttctgaaggccactatttaaatataagcttttccacaaatacataattatcatgcctgtcttttattgtgttctgacacatctatatacctaaatcaagaggaactatatgtataatctttgtaattcagtgcatttctttttttagaaagcaagtatattctattattattttttatttagttaacttattttttgagactgagtttcacttttatcacccaggctggagtgcagtggtgcgatctcgctggctgcaacctccgcctcctgggttcaagcattctcgtgcctcactcagcctcctgagtagctgggattacaggcacctgccaccatgcctggctaatttttgtatttttagtagagacggggttttgtcatgttggccaggctggtatcaaactcttgatctcaaatgatcctcccgccttggcctcccaaaatgctgggattacaggcgtgacgcctggcgtatattttaaagcagtgacatgttttgactttttttcaggttaattttttaactacaccagaaaactggtttgattaatgtttactggagtgaataaaagcaaatatagtaagctcacattgagcgtcatcaggatgtgaggttttccagataggctatttttttagttaatggaaacgtagttttaagtattaagattttataaaaatatcttcattgctgaacatatgcaacataatgtcactttattttcagtattggtttgtcattatgatacaatactgatgccttagggcagctgcagctgtgcttaccctttttccttccttccccttctaaatatgtggtttcttgtcctttatgattttagagagtagttacgattgtgcctaatataggaactgataggtaagaagaagaacttttatgagccatggtctttgtgacatttactgtgattatttagagattcttttaatccttatctgttacctcttccacctcaccgcccttgagttcttcgcagtctggcatagtctggataggtgatttttagagaaatgaggcttgatttttttgtaataggtgaattctgcatatttggtatatagttttgcaacaaaagaggtgtcaccaaaatcaagaagtatttacatttttgtgaaaagcgtgtggattttattcttacattttattttaacaacttaagtaccatcatgtattttatcaagcagtatatactttttaaattggaaacattgttgtgtgtaacttgccatgtttataacatttaagttaatggttacaactgatggatttgaaatattgtgttattaaactagaaatttgtatgaaatgatatatagttaaaggttatattacaatatattttaaaatttaatacttttacagattaagattttgatgacttcaatttaattttttaaatttggtctaagtttaaatatgtttattcaggtgggtgatcatcattttatctttactgttggagaataaaggttttggaagatcattgccgttttgttttaaacatgtgagagctaagcagtttttataaaggccaatttcctaataggatttatttttggttttattagtgggcaaatggcatctacctgtacattctggttacaagggagagacttatacttttgttataataagttatgtgtgaaagtgaattttacatatctatatgttttatatgtattttggcatgaggtgggaagaactaactaaaaattcaattaagatatttagcaatataatcggagtagagtctgtattactttactttaaaaattcagggtctctaaaaaatcctttgaaatagttatgaattttaataggaccatacttaaaaataatcagcaaaagataaagcctcttcttaggtagtgcccaaactagacagagaatgggggaaaaatcggtttttgatttattcagtctattatgttaaacattttaatgtttaggtctatactaatttagacgtgttttgttttattttgaaataaaaagcattatttgtaaacttggaaattaatgtaaatgtataatttgaaagaaatgagatggctaggtcagtaatacttcttcagtcaatgaaataattattctaacctgaaatagcaacatctggtcaaagcaaaattagtaaataaagttcttgagtcatgacacaacatatgatgtgtctgtaatattaccacccaagttttacccaattttttcctgttactcaatgatacatgtttttactcacatttaaatacataaattttactctacaaggactgtgttaacaattggttccggttttctgattattatattatctcctactctctataatttaataatgttatagttttttggttttatttcatgtataatatgactttttaaaactactagataaattgaaagtttagttgtgcttcgtattttagaagaattcacttaatgaaaattctttcctaacagtcatcccctccccacaagataaactgcccaaattatttaggtgatcattgttggtactgtgatgtcatagaatgaaccaactcagtggcaaggacttgattatggctttgttagaactaaatgttgtaggtatctaatttaaacaagataaggaaatttatgcacagaaaatgtacttatttgtatgaggtggaaatatatataatttgactttttttttttttttttttttggtctcgctgtgttgctcaggcagatcttgaactcctgggctcaagtgatcctcttgcctctgccttctgggtagctgggattacagtttcgtgtcaccacccctaactctaatttgactttttagatatatttcaaagcacttggaaaatttgtgttttacaatatcagttgtttgatttcactttctaaatggttatcgtctctcaaaaccccttatggtcatttgcagacacaaaactcagaatctcagaatcacttaacagacttgatgtgttctattctggtaaatgtgctagagttgagattgatacccttagcttctttgatagactgcattacagaggtgcatagactgaatttcttactgtgctgctattaatgcatctagagcctgaagactgttgtagagttaggctttaactgttagctctcttgatattggagatgataggaatttttaggcgacaggaaaaagatgagacaatgagcatacaatgggggcataagccccagctgttcttatatttgtttgtttttttgagacaggatctcgctctgttgcccaggctggagtgcagtggcctgatgacagctcactgcagcctggacctgccaggctggagatatcctcccacttctcaaagtgctgggcttacaggcccttaattttctaacttgtaggaatggtttgtggttctgagaagtcaatttgtaacagtttaggaaaatttaggcttagaaatctggtgaatttattaaagaattaatgtcattattaaactgctttgctgattataataacaaatgagattctcttccttaaatgattttgtatgaaaacatgtgggttggggtttactttgttacgttgtgatactcttaccagctatgattgtaaggattcaacttttgatgtgactatcttttataatctgtgtctgtgatgtgataaaagttgaccatccatgtttgcctgaaatacaagactttcagttttaagactgatagtcctgggcaaactgggacaaattggtctcctaaatttgttgtccacaaaggctaatccagagaaagagacaattacagttttgcttataatttggttatcaaaacgagttgtttcgcttgaagacagactcagcttgtttactagtgttagtatatgaaaacacataggtttctttgtcaggatttaaatatgctggcaagaaatgtagttaccaatcaatcttgaggtgcacatggctttgttttggctctttgaatgccacccatttgctagcattatggcaggtgagtttatatcattatcaaattttcttcagcaatctgctgtaaaacattccagttaaggaaaccacagctcaaggaacgcaaatgatttctgaaggtcatgtaactggtagatagcaaaggcagatttggattttaggattcctgattcttaatttctttctttctttttttttttttgagacatagtctcgctctgtcgcccaggctggagtgcagtggcacaatctcggctcattgcaagctccgccacccaggttcacgccattctcctgcctcagcctcccaagtagctgggactacaggcgcgcgccggccaccacactcggctgatttttttgtattattagtagagacggggtttcaccatgttggccaggatggtcttgatctcctgacctcatgatccgcctgccttggcctcccaaagtgctgggattacaggtgtgagccactgcgcccggctgtgattcttaatttctagtagtttctcatgagagttaataataggtatataaactggtttctagttaatatggtaagatcaaaaaagaagagcatccctggtggccttttagtcatataagccactgttgatggttaaatgttttcagagggtctaattttgaaaatgttgatgaaaagatatgaacttcatttcactttagaaaaatgcaggtacaccaacttttgaatactcagataatgagttcctctgttctaaggagatgttagttgtctagaattaatgcttatttgtcttaactctgttttcataagcagtgtgtaggaatagttagagaaagtaaaatagcttgatttagtgcaagttttatttttaaaatgccttatctgttactgttagtaaagttttgttttgcttgcctcattatgatataatattctgagataataatttattgctacaaaatgatagcaagcattatcttatgtgtaacttttaattaaatccatattcttcaggtaaaaagaacgtatttaacttttaattaaatccatgtttcttcaggtaaaaagaacgtattctcatggtacttacagagctggcccaatgagacaaataagcttggtgggagcagttgatgaagaagtaggagattatttccctgagttccttgacatgttggaagagtcaccatttttaaaagtaagagacaatctgtcatgggattagagttttttttttaaaaaagggaagaaaaaccaatatgagtaatctaaattgtgattgtttctttcatgctacatgcaatataaatgaatggctgtttcagaaatagaaacgttttggttttatttgaactggagggaaggagagcaagagatgggaaactgacataattcttgtgtagtgtgtacatgcgacatctcaggttctaattgtaatggcaaagctaagtggtgggccatgaaataacacctcttaacactttaggaaattaggttccatgtgtttatcagctctttgtaaactaagtactaaaggacttaagaagtacaggaaggattctactacaaatgtttaagacaaaggaatggcagtttagcattcctaaactaaattccaggaaaactcgcctgggaaattacacacccatattttagccatggctgtacttatctgggttgggcaagccctttaaactttctgggcttcagtttcatcatccataaaataacatgtttagacaatgtagccaaaggcccctctatttaatttatttttttgagacagcctcactctctgcccaggctggagtgtagtggtgtaatgtggagccctgacctccgtgggcttggatgatcctcccacgtcagcctcccaagtacctcggattacaggcacatgccatcatgcccagctaacttttgtattttttgtggaaatggggtttcaccatgttgctcaggctggtcttgaactcttggactcaagtgatcctcctgtcttggccttccaaagtgctgggattacaggtgtgagccactgtgcccaccaccacaggcccctttaaatagtttgtagccagattccttttttttttttttaaagcctcttgattttcaaaaagtatttcttattgtgaggtgctagggctatcccactgagagaggaatctctgagctgtgtggttaggttaattatttaatcagtaactcaaaggtcaatgctgcaaacctacactgaaattcagggtccaggtaagctgtggaatgtgacaagatttctgataccacataatctataggacatctcttcttttattacttctgtttgcttggtgtttttaccctatatgtacatatatctttttcttccctttctctttaaccttgttccattcctttttctcttttccttttaaactttttgttccttttctacttctctctagtagttacatcatggaattaggttgcatttattattgaactatatttaaaaattaccaaatattacttaaatggttgcttcaagtttaattttcaaagcacatgaactaaatgcattatttctcctttcctttccttccccttccccttccctttccccttcccttccccttccccttccctttccccttcccttccccttccccttccctttccctttcccttcctttctttcgatggggtcctgctatgttgcccaggctagctttgaagtcctgggctcaagcagtcctcctgcttcagcctcccaaagtgctgtgattacagacgtgagccacccacacccaacctaaatgcattgtttctaaagaaatttgacaagcctttttgaaaagggggtgtgtggtgaaatttttttttttttaattttgttctcaacattccatggacagtggccctcagtttccttcttccctctctctgtctttttttgtttgtttgtttttggtttcagatggagtctcgctgtgtcatccaggctggagggcagtggtgcgatctcggctcactgcaacctctgcctctcaggttcaagcaattctcatgcctcagcctttcgagtagctgggattacagacacacactaccatgctaggctaattttttgtatctttagtagagatgaggtttctccatgttgcccagtctggtctcaaactcctgagctcaggtgatctgcctgcctcagcctcctgaagtgttgggattacaggcctgagccaccgtgcccggccaccgtcttctcttttctcttccccttccccttcacctctgtctctcgcctcgcctcccctcccctcccctcccccctttttccctcccccttcccctcctctcccccctcccccttctccctcccccttcccttcctctgccccctccccccttctccctccccccttctccctcccccctccctctcctttcattctttggagtctcgttctgtcaccaggctggagtgcagtggcgtgatttcggctcactgcaacctccgcctccgaggttcaagcgattctcctgcctcaacctcctgagtagctgggactacaggtgcgcgccaccatgcccagctaatttttgtattttgtagagacggggtttcaccgtgctggccaggacggtctcgatatcttgatatcttgaccttgtgatccgcccgcctcggcctcccaaagtgctcggattacaggcgtgagccactgcgcgcccagccttgttctttcattttaaaatactttagtctctggtttaagccaacaacctcttcaagaaactgctgaacagaaatatgttttgattttgttttgttttgtttttaattatcattaatcaaagaggtatccagtttttaaacttaaatttaattgttcatttttatagattcttatgagagcacttgcttatttagtccgttaacatcatatgatctatatggtagaaggaagaataacaaatgatgaatatagtgaatcatacctctagcagggtatagggacagaaccatccaagcataattattttcttggtgtgtttgaaacagttttttgaagcaaagtatatcaatatatagggatatattcaatattatgtatttcagatgcttaagtataaagctgtgtatgaaagtgtgtttgtcaggggaacaatattattaacatacacttgaagatacattttgaaaataattgcaatctgcataattatttatctccagtgtacactgccatgggggacgctatctagtctaaaattacagagtcgaaaagatagtgatgatggtcccatcatgtgggttcgtccaggagaacaaatgatccctgtggctgatatgccaaagtcacctttcaaaaggaaaaggtatgttgtatacacatttttattggaggggatgagtgtttgtatgttggggtgtgtatgttagttgaaaattggaggaaggaggaatgcaaagtttagagcataattggaatataaatttaaaaatagcgatacatgctaatacaatttgttataaaacctaaaatgtaaataaagcatgagaaatgtaggcaaatgacaagaaattgtaatgatggatggaaaaaatgtcataagatataaactattttagaataaatgtaatattcagaacctatactaagaagactaaaatgttttgtggaggatataaagtaagatcagaacaaatggaaagccctgctgtgttctggattggataaaaatgatagttctttaaaattttctgcatttcaattggactaacacttccagtcctggataaaattattttaaaattcataaggaagtaaacttttcagtgaaagagaagattagtgagaggcagcttatgatacaggatattaaaaattactataaagttcaaatagatcattggaataagagtccagaaatagatctaagtatattgggaacttaatatatgagataggtgggaagaggaagatgtatttaatgaataatgctggcatatttggctctcataaaaacaaaggcagagcccctacctcatacaagaagtaaattagagaattaagcatcacagataaaacagttaaaatattagaataaaattgtttaagcctggaggagaccttcctaagcaagaccaaacaatgcagtggcaatagtatttgggggggaagcgacatcaacaatgaggttcaaaattatgatagactggactaagacatttggaactcatgacacaccaaagttaatgtacaaagagcattctcaagtgtaaacaacccagtagaaaaataacctcaggtagttaagtttattttaaaagaactatgagatatttttattcattatattggcaaaaattatgaatatagcattaatattataggctggtaggtatgtgaagaaacaattttttatatattgttgactggaggatgagctgctgtaattttgtgaaagtaatctggcagtagatcataaaatttaacataaaactctttgatctagcactcctacttttgggaatcccaaggaataaaaacacgaaaggtaaataaatttgtggtaagaaaaacattttaaaatggtctgaatgcctgtcagtaggggaatggttgaatagatttcatacattcttattgaagagtatagttaggccgggtgcagtggctcacgcctgtaatcccagcactttgggaggctgaggcgggtggattacctgaagtcaggagtttgaagatcagcctggccaacatgaggaaaccccgtctctactaaaaatagaacaaattagcccagcgtggtgggacatgactgtaatcccagctattcaggaggctgaggcaggagaattgcttgagcctgggagatagaggttgcagtgaacccagatcgcttcactgcactccagcctggccgatagagcgagactctgtttcaaaaaaaagagtatagtgaaatacgccaggtgcagtggctctttcatgtaatcctagcactttgggtggccgaggtgggaggataacttgaatcccaagagttcaggaccagcctgagcaacatagtgagatgccgcctctacaaaataaatttaaaaatttagccaatgtggtggtacatgcccgtagccctagctactcggaaggctgagtcaagggctgcttgagcccaggagtttgaggctgcagtaagctatgagtacatcactgcactccagcctgggtgacagaaccagaacctatctcttaaaaaaaaaatggtgaaatagttaaagttttaaaaaatgtcttgatctggatggatattcatgacatttgaaaacagccaaatgtagagtaatgtatctaatatgattttgtttttatccaaagaaataacaaaaccctactatgtgtgattgtgtacttatgtgagcacagagaaaagtgtggagaaaatgtacattaggttaacgtggattggaatggatggagatgatgctaggagagattatagccttttgttttgttttgtttgtttgtttttgagactgagtcttgctctgtcgccaggctggagtgcagtggtgcaatctcggctcactgcaacctccacctcccggtttcaagcgattctcctgcctcagcctcccgagtagctgggactacaggcgcacgccaccacacccggctaatttttgtattttcagtagagatggtgtttcaccatgttggccaggatggtcttgatctcttgatctcgtgatcctcctgcctcggccacccaaagtgcctaggcatgagccactgtgcccgtcctgattatagctttttagattacctaaagacggttttagctgttacagtgattattaagtttactggttacggtgattattaagttaaaaagaaaacagggaaaaagtcattgagtaaactctgggttgcatgatggcagggactttgttgggtttgttactaatgtttctctagcacctaaacacagtgtctggtgcttaatattggatgaataaaattttacaggttaatttgtaagttagtagtaaatggtaaaattgatgtgttcctcagcgactcttttttttttttttttttgagatagagtctagctctgtcacccaggctggagtgcagtggcacaatctcggctcactgcaacctctgcctcctgggttcaagtgattctcctgcctcagcctcctcagtagctgggattaaaggcgtgaaccaccattcccagctcatttttgtatttttaagagagacgggatttcgccgttttggccaggctggtctcaaactcctgacctcaggtgatccacctgccttggcctcccaaagtgctaggattacaagcgtgagccactgtgcccggcctcctcagtgattcttaattttttttttcttttttttagaatgtatggatcattttgagaatctgaaagtctcttctcagaacaatacagataaatacaaacttttagatgtactttaagggggttcaccactaccttgaggaacttccattcacttcagggtatacaacccatggtatatacgataataatagtctaacaaaaacagtgtcaggcattgtgtcaagtgctgtacagtcttaattcattagaatgtggtatttatgcagctaaatttgtgggtttgagaacctgttaggtttccagaggaagcaacaccatctggcattgtgacacatgtagaacattattcacaaagaaccaaaaaaaaattattatgtatatgtgtaataagactgtaatgcaggggtgcacaaagagtagttaaataatagagattaagggtgggaaagtagagaaccagtaaggaagagtgatccctgggaagatagacaaggatgagaggagacaattatgggggtaacacagagttgcatctggaagaaacaaaaaccgtagaggaagataaaatgatgactctctgccaaagaaattcttacccttttccttgcctacagcaaaactggagaggtttctgcaatgagtgaggctaagtaggcagcaacttctgcgtgtatatgcattctagaaggaaagtggtggaggagagggccagtgggaaatagctgtcttccaagacagagctaaggttttcctttctacctccaataaagcatgcatgttttgtggaagcacttactgctgggtgtttactgctaaatctgttttttgattcttccctcactagacagactataaactcccacgagagtggggtcctcttctgtcttatttgctattgtctcattcactggccccagttcttagatagtacctagcacatagtatgtgtcctatcaatattgaattaatgcatttttaaaagttacccatttgtttcagatatatatctatcttgtgttacccaagagatctgagtgggggcatggtacccaaaccccaggtaaagattctgtgtatagggaaacttgggtaaacaacaccatttgtaatttaattttttatccatgtgtttccttacaactgttcctgttgtgaaggtatattagaaaaatgagggtatcgtatttgtgtttttgtttgttcgtgttcattttaaagatagaatttgatttgagagcaaatttcatatatttttgtctgaattatgtgattattgaatgtttgatagcaattaagtgtcactatataaatgtaattttctttttttaaaaaacagaactaccaatgaaataaaaaatcttcagtacctacctcgaacaagtgagccccgtgagatgctctttgaagacaggacaagagctcatgcagatcatataggacaaggttttgaacgacagactacagctgctgttggagtgctgaaggctgtgcactgtggagagtggtatatataactaccgctattttaatgaaagaatttcttggcttctacaatttttcttggaaaatcttagtaattcctccttactgtgggaaaaaagtttcattttttacccgtgtttggatatcttaattgtataattgtactaaagattttaaattgctagaatctggctgggtggggtggctcacacctgtaatcgcagcactttgggaggccgaggtgggtggatcacaaggtcaggagatcaagaccagcctagccaatatggggaaaccccgtctgtactaaaaatacaaaagttagccgggcgtggtggcgcacgcctgtagtcctagctattcaggagcctgaggcaggagaattgcttgaacccgggaggctgagggtgcagtgagccgagatcgcgccactgcactccagcctgggtgacagagcaagactccatctcgaacaaaaacaaaaacaaataaattgctaaaatctaggtttcatcatttgggttaactgaaataattaatttcatgttttaagtgactagatgtaaaaaaaattaaaaggaaagctaaggcttacctggtgcatactgtatgcctgtttacaaatgtcatttaatttttctcaactgctttttgctccgtatttatcacataaggaaactgaggctcagggctgtcaaataattttttttacagtcatatagttaataaatggtagagctgagactgatttcaatctgattccatactcttctgttttctcttcctcctgctttgctgtaccctttctgaggtttggtttctctttgttatgtatttgcttttctgtattcttttttttccagctttgcttacaagtttcactttgaatattttgacagattaaaaaatagattattctttttaatatacttgaggtgtcatctcatacattaaatacctttccatttattaaattgataaaacatataaagcaaagttattgtaattttgcggccaggtgtgatggctcacgcctgtaattccagcactttgggaggccgaggtgggtgggatcacctgaggtcaggagttcgagaccagcctggacaacatggtgaaacctcatctctattaaaaatacaaaaattagctggggccaggtgcggtggctcacaactgtaatcccagcactttcggaggctgaggtgggcagatcatgaggtcaggagttcaacaccagcctgaccaacatggtaaaaccccatctctactaaaaatacacacatacacaaaaattagctggccgtggtggcacgtgcctgtaatcccagctactcaggaggctgaggcaggagaagtgcttgaacccaggaggcagaggttgcagtgagccaagatcgtgccactgcacttcagcctggggcgacaagagcaaaactccgtcccaccaccaacaacaacaaaaaaagataattttgcttgcttagatttttgttttccaaaattgagtattgtttgggtatgaaatgtgagttggaatatgctattttgcttattagagccattaaaaattttttttttctttaagagatagggcctcactctgttgcccaggctatagttcagtggtgctgtcatggctcacagcagccttgaccacccatcttcaagcaagcctcctgcctcagcctcctgagtagctaggactacagtcacacaccaccacatccagtgaatatttatttatttttacattctgtttatttgtattactgttccttgcagagcaggactaactcataggcagtatgtccagagttggcctattttaaaattttttgtagagacacggtcttgctctgttgcccaggctgggagctcaaagtgctaggattacaggtgcgaaacactgcacctggccttattagagcagtttaattttttaaaaaaaggagaaacaggccaggtgcagtggctcatgctagtaatcccagcacttttggaggccgaggtgggtagatcacttgaagttaggagttcaagaccagcctggccaacatggtgaaaccttgcctctcctaaaaatacaaaaattagctgggcatgcatgcctataacgccagctatttgggaggctgaggcacaagaattgcttgaacctgggaggtggaggttgcagtgagccgagatcgtgctgtgtttcacaaatttttctattgcattttcatttcagttcaggatatctctaattcctgtttgatttcttttttaacccatgggttatcaagaagtgttgtttagtttccaatatttgaggatttttttccagatttttgttttggtgtttttcatttctaatttaatttcttgtggtcagagaacatattctgtatgattttagtgcttctaaatttcttggggtttgttttatggaccatcttgatgaatttttatatgtccactttaaaaaatgtgtattttggctaggcgcggtggctcacaactgtaatctcagcattttgggaggccaaggcgggcggatcacctgaggtcaggagttccagaccagcctgggcaacatggtgaaaccccatatgtactaaaaatacaaaaattagctgggcgtggtggcacacacctgtaatcccagctcctcgctaggctgaggcacaagaatcgcttgaacctaggaggtgaaggttgcagtgagcttagatggcaccactgcactccagcctgggcgattgacgtgagactccgtctcaaaaaaaaaaagtgtattttgctgttgttagggatatagtgctctataaattaagagcaattaagtcaactttgttgatagtgaatgtggttcactttttttatattctcacttatttttgtctgcttgttaatttgcaactttaatattggatttgcctgtttttcctgtcagtttttctaggttttgctctattcttttgtgacagctttatcaagctatgatcacgtatcatacagttcacccatttaaagtgtacagttgaatagtttttagtatattcacagagttatgcaaccaccaccaaaacgatagaacattttcatcacctcagaaaggaactacaccttttagacatcacctccccaatcctccatcttccatcctgccagccctaggcaagcactaatttactttctgtctgtaggtatatgtctattcttaacatctaatataaatggaatcaaataacgtggtcttttgtgattagcttctttcacttagcgtagtgttttgaaggttattccatatagtttgaagctgtgttcttaggcaagtacacatttagaattgttattcttgatgaattggccccttttttcattataaagtgccctttttatccttggtaatattccttgtcctgaaactttgttaatatagccaattcagccttcttcttatttgtatttacatgctctatcttttcccattctttttcttttaacttatctgtatgtctatattattgttacatgtagatagatatcatatagttgggtcttaccttttttttaatccagtgacaatctctgtcttttaattggagtatttagattatttatatttaatagaaatattagtaaatttggttttaaatttaccattttgctttttccaatttgcttctttattctttattcttttgtttccccttttcttgtcatttttaagcattccattttacctccatgatttggttagtagcttgtagctctgtgggttttttttttatttcagtattgtcaacttaccacaatctaccttcaaataatatgagacttctttatgtaatgtgtaagaacctttcaatagtatacttccatttattccctcccccctcacatttctggcctttgtgctaattgtcatgtattttactttacatatgccataaaccccatgatgtatgttattttgctttaaagaatcatttctaaagagatttctttaaatttaaagagaataaaacctctttcatatttatcattaggtgtgctgtacattccttttcatagatctacattttcatttaagtatcattttccttcagcctgaagaaattcctttagcagtctttgttatgctgttttctcggtgacagattcagcttttgtttatttgaacatgtttttatttcacattttttggaggatattttttggtggatatagaattctagattgactttttcttctaatactttaaaagtagtccattctcttcaggcttgcattgtctttgataagtctatggtcagtcttatccttctttctctgtatataatgtattacatgattctcagattttctcttttatcactggtttttagaaatttagttatgatttgccttcatatgattttctttatgttgtttggaattttattccaaaatccattttttagcatctctttaaaaatgtatttatatattcctaattaattgaagaatttgagagttttttagaattatatttaaaggcatgagtaacctcagcaaataccaagtttattgtattagtacttttccaatgaagtctcttaatttataaagttatttaagagttttatgcatcagtatagttatatgtatcttctatggaaataaaatactcccttttcctcatatttacttctaatttttatgtagtgttttcaactttagcacttaaatttatgaagcattgatcttattcttcaaatagaacacttaattttcttggtttgtataatttaccaattcagatcatttcaattttccaaactcttgtgacaaatgtttatataaaaacgaagtcagtttttaatctgtgtctaggttgaaagtcatggtgttggccctttctttaaatatgtgaaatggctttccaattaacagtttaactttatttgtaagacagtactatggtattgaccataaagtatttttgctttgagtttaataaggactcaaaagagtgaagcatttatggcagattcttgttatctcgttttcttttttaggcctgatcaaccccgtataaccaaagatgtaatttgttttcatgctgaagatttcttagaagtagttcaacgaatgcagttagatttacatgaacctccactgtcccaggtatttttaatacacttactgtctttggtttagtttttattatgaagagagttatttgtatttcttgttttattattttttagtgtgtccaatgggttgatgatgcaaaactgaatcaactgaggagggaaggcattcgctatgccaggattcagctatatgataatgacatttattttattccaaggaatgttgttcatcagttcaagacagtttcagctgtatgcagtttagcatggcatattcggctcaaattatatcactcagaggaggacacttctcagaatacagctactcatgaaacaggcacatcatcagattccacatcatctgttcttggacctcacactgacaacatgatttgtgctgtaagcaaagcctccttggattctgttttttcagataaacttcattctaaatatgaattacagcagattaaacatgaacctattgcatctgtaagaatcaaggaagaacctgtgaatgttaatattcctgaaaagactacagcactgaataatatggatggcaagaatgttaaagcaaaattggatcatgttcaatttgcagaatttaagattgacatggattctaaatttgaaaatagcaacaaagatttaaaggaagaattgtgccctggaaatctaagtctagttgatacaaggcaacacagttcagcacattcaaatcaagataaaaaagacgatgacattttgtgctaaatttgcatataccatctaaaatccttttttaaaaaaatttaatgtaataaagattcatgaattctgaaagcaagccaaggacttgctcctatgtctgttacaaaacatagtttatgtagctttgtaacattcctcagtgcctgtccataactgtgaagtattaagcacttagggccagatgcactgtaaacattgcaggtttaaacataaaggagtctttaaaaaaaaatcatttacgttggaattttaggttttagaatagagctgacattaacatatatatatatatataaatatatatatatattttgtaatatgagccagaattctttttcaacaatttaaagcttttccatagagcttatttatatccttttttttcattttaaatgtgtcagcactgtagtgtaaatagcttttaaatatctttttagtgtgatttatactgaaatgtgagccacttaataaaggttcatatgttcatattaataaatatgttttctgttgagtctgtaaagacaaactgacaattcatttaagtcatttgataatgattctctgctggtatatctatttagtgtggtattgtagtgcaaatgtacgtaattcaaatctagtaaatatttaagttcctcacactgtgcaggcttttttttttttttctttttttcttttttttgatacggagtttcattctgtcaccaggctggagttcagtggtgcgatctcggctcactgcaacctctgcctctcgggttcaagtgattattctcctgcctcagcctcctgagtagctgggactacaggcacgcaccacaacacccagctaatttttgtatttttagtagagatggggtttcatcatgttggccaggatggtcttgatctcttgaccttgtgatccgcccaccttggcctcccaaagtgctgggattgcaggggtgagccacagcgcccagcctatgcaggcatttttaacaaccaagactcagttaagaaagtgtgcatctgcgtgtgtgtgaatgtgtatatatatgtatatatatatcatattttgcataattttcttaaattgctgaataagatcaatatgtgaaattccttagcccttctccccaaaatacattgaaaaaagttttatattaaactattaagaaagcagtttaggtaatagaaacagttttagaaagttgggagaaacaaggtatgttaatgataacaaaggcttctaactaatagttacgtggccagattacatagcctaccatagattttttttattgtgtatgggatgataagaagtttagagaattttcttactagtaagtacctttactaagtaatagctaagtataaaatctttagttacagaaagcttgtgagcaattaaaatccttttacatttttcttgcagaatgggagaaaaatatggcaaatacaaaactgtaaaataagggcaatgacaatgactcaactgccatatagagatataattaacaaaatactttgtggtacctcttatctctcaggatctcctccctaccctagcaaggcaaacaacttggagtacttccttttcgaaagaagttctagaaattaaattgaggtaggagacggattgacagtgcctaactaaagatgagtaaaacagacctctttaatgatagactcactatttgacactgcttctactattgtaattaaaaatcagaagtctttgatgtatgcgttgctgtaagaaactctgctcattgcaaatctattttgtttgtttttggtattattctgggcacatactttggttgatgactttcaattggggttctttgtgctgccttttgggttactgttggtatttccatttctggcttaatttatggtaaccatcaaaactgcttatatttctggttagggcgaagccatttaggaagaagcatttcaccagaacaagtaaaagttaattgcagcaatgatgtcagttttggcccctagtttaataaaaggataggcaaatatcataggaaatcttcatggtttgtaggaaatcagtgtttgcaacgtaggaagtttcatgggatagggaaggtataaatcaagatagtaagggttttgttttatatgtcattgtcttaccatgctccccacctatttaatcttctgttttaagctaaatttatggatttgcacctacctttttgagtggcagaagttcttaacaaaccagtattgagaaataagaagggatgtagttaaaatggttttctgtttctctttaaagttgaagaatgatatatttaacaagagttgtgttttatttccagttttccagtagcatatatgtagatgcattgaggtcatactgtgagaaaatgtctttagggtatccctccaaaataggagccttaaactttttaacttaaaggaaggcatatctaaaaaccatagtggttgcttttaggtatagtttcctatataacctatagtcagacttatctataatatgaaaatttaattgttttaaaaatgcatacatcggccgggtgcagtggctcacgcctgtaatcccagcacttagggaggccgaggcgggcggatcacgaggtcagaagtttgagaccagtctggccaacatggtgaaaccccgtctctactaaaaatacaaaaaaattagttgggcgtggtggcgtgcgcctgtaatcccagctacttgggaggctgaggcaggggaattgcttgaacccgggaggagaaggttgcagtgagccgagatcgccccactgccctccagcctgggcgacagtctcaaaaaaaaaaaaaaaaaaaagcatacatctctgaaggtaaagtataaatcagtgggctcaagatttgcaggtacagccttgttaatgccttcaataatgcttacgttccttgtcttatgggttataattttcacatcctcttcagatacaatctgagaacttgttgactacctttgttacatgcaaaaattttctattttaatattgcattatattaatggtttcatagtacattccagttctttatctgaatacaagcgttttgcttttatttccagtttcttggaccagaacaataaaatacataagacatcgtttctatatggtcatatactatatagaataaagaattgttatgtaaattattaaatgagtatacagacctttacataaaaactaaggtacctcagtggaatctgctacagtgcttccccctccctacccctccattttgtttataaccttttagctatctaaataatacgtattccatactcaggatagctggttagctagcaaaagaattaacatttgtgatatttacttgcaaactttactgaagccatattcattatcttccttgtcaccaaggctgttgaccttaaataaacattaagttgattttgcacaacactgtatttgtgtgtgtgcatgtgcctgtttttgtgtgtgtatgtttgtgggaaataattatgtttgtttccgcatatattcatttttaatgcattctgtaacttttctcgagtggtggtcattgagggtagggaagattttattttttaagttgtcgttaaggtatttcattagtgttcctgagtgtaaaacagttttttcccaaatacttatggcagataagagcatttttgtaaataataaactagcaccgtttgggtaaatttgcattattttttggacaggttcattgtcatgtaaaacaaatatctcaaaattcattttacatttagcaaaggtgcaacatttgtttttggagtttgagagatattttccttgtcttccatcattcaataaatactaaaattgataaccacagtctttttacttttgtaattattttcttaaaattgacattttaatcttgtcaactttaaaagttcttttctgtcttcagtagaaaccgtaaaatcttgaattgactccaatttgaattttttttttactctaaagctaattatcaaaagttgacttacgccaacagagacagatattgaggattatcttaaacaaggtcactaaactaggtatgggtgctgggaatggtatgataaatacctctcttgtcctactagacataatgatttctgtcccaggaagggaagacaaaagtgccattcttttcaaaatacttttaggctgctaaaacatgatgggttttaggtgtggtagaatagatctcactctttctcttacttgatgtaactacatttatatgtaaacaaaattttactggttttagaatgcattgcctgttttatcaaagagttatgtttgaggtttggcactgacagtacacttcagatatgataattaagaggacaactcaggagagcttgtaagtccttttgtcttctgtcctggcttttcttttctttctgtaacccagtacatactacagatggaaatgattgctttttagaacatcaagcacacacagcctaaaaacaaaaatgtcttttccttgtagctttataggcgttgtatagcagtcatatctctgttgagagagcagggaaaggaggggaaaacatcctgcatttcaggttatcttcacttccagctcttcttggacttcagacccaatcagagaatatgaatgagctgagaacaaaatatggtctgggcgagtagaatttatgttaactagaaattaaaatttataacttgtgtgttttattactatgatctgcctactaagaactgcactgtgaacatgtgagaactcgatccttctgtacattttgaaattcagaacttacgcatctatgttgttagaatgttaaatctacacttttctgtaaagttcattgctgttgtactacttaagactacttggccgggcgcagtggtcacgcctgtaatcccagcactttgggaggccgaggcgggtggatcacgaggtcaggagatcgagaccatcctggctaacatggtgaaaccccgtctctactaaaaaatacaaaaaattagccgggtgtggtggcgggtgcctgtagtcccagctactcgggagactgaggcaggagaacggcctgaacccaggaggcagagcttgcaatgagcagatatcgtgccactgcactccagcctgggtgacagagactctgtctcaaaaaaaaaaaaaaaaaaaaaaaaaaaggactactaagtgtgcagactcagaggcaaattaatattacagtcgcacaacctggccaacgtggcaaaaccccgtctctactaaaaataaaatcggacgggcgtggtgacacgcacctgtaatcgcagctactggagaggctgaggcaggagaatcgcttgaacccgggaggtggaggttgcagtgagccgagattgtgctattgcactccagcctgggtgacagagcaagactcagtctcaaacaaacaatattatagtcacaaatgttgtgtaatacagtgttgataaacttaacttggacagacagtttgatccttctgccccgccaacccaaagttttttcttgaaattttgtcaactaagccagatttttacctgaaacatctcaaatctgtcgtttttaaaaatacctttatcttaagtctggcatttgttaatgctcttgtgctgtgtttcttcctaagttcttggaaatttctgtctgccttcacttcctcatcttccatttattcctcatttcactacagtttcatgtaaatcctcacatgtatgctgaaatggttttctcaaaggttaccttttgactgccaaattcagtggctgtacttcttagtatttctgcttgacccttgcagcactatcattttactcctaaaactctttatgacctgtttttttcatgttgtttttcagtttctttggaaggattctttgcctgtctgccactatttaaggcagtctccacggtctttcctttaggcctctacagtctgtccctgagctaccttcaggatcccacaacttcagtcagcctggtttttcactttagttctaatgatccatatggtcaaatctaaattctttttcgccttgccctcaagcattagctgtttctttcctcccaatttggttattgtcatcactgtcttccttcataatcaccttatagtaatttgatttttctcttttcctgtgtccttttgttttgttttttgagacagagtctctgttgcccaggctagagtgcagtgacatgatcttggctcactgcaacccctgcctcctgggttaaagcgattcttgtgcctcagcctcctgagtagctgacattacaggtatgcaccaccacacctggctgatttttgtatttttagtagagatgcggtttgtcatattggccaggctggtttcgaactcctgacctcaagtgatctgcccgcctcagcctccccaagtgtcgagattacaggcataagccactgtgcctggttcctgtgtccaatttgttatgagattgagtcaatcccagaaatacttaaaattcatctattgctctcttgtcacatcacagttatagtagatgttcatctcacctggattcaaaataccctaaagtgttctagtcctgtgccctttccctctttattccattccattctttgtgttaccaacagatttaacctttctaaaatatagaattattattctttgtagaagtactccttggcttctcctttgctaaagaataaaggtcaaatgcttagcatagcactgaagagcctttattattggccctccttttccagcttcatgtaacacaatttcttctatttgatgtgaccagttttccactttaccagatggcagtcattgccatttcctttgtgaacttttaaaattcttttactttgctggggaagtaaatatgtggaatacaacacagtgaaatcttatttctcttttcaaaactcagacatcatctcctgtactgtctttacagcagtggtccccaacctttatggcaccagggaccagttttgtggaagacaatttttccacggacaggggttgggtgggggatggtttccacctcagatcatcaggcattagattttcaggagcatgcaacctagatctgaactgcatgtgcagttcacagtagggtttgcgctcctatgagaatctaatgatgccactgatctgacaggaggtggagctcaggtggtaatgcccacttgcaccccactcacctcctgctatgttgcttggttcctaataggccacgggctgggaccagtctatggcccagggggttggggacccctgctttacagtacagggttttataggctttacagggcacatctccaactgtcccctcacccagaagttggtatagacccaaatctgtctgctgccctctgctcagagcattaaatatacatattaagtacatgttggactgtagctaaactatgagctagaagttaggaattttatcactttgcatccccaacacctaatatgttgtatacttggtgttccataaatacttgaaggaacatattgtacactaggggtgggggaaagttaggtaggtttcctttctttttaaagacagtcttgctctgtcactcaggctggagtgcagtggcacaatcatggctcagtacagcctcaaactcttgggctcaggtgattctcctgcctcatcctcttgagtagttaggactacaggacccaccaccatgcttggctaaatttaaatttttattttgtagaaacagggtcttgctatgttgcccaggctgaactttaaactcctggcctcaagtgatcctcccacctctgtaggtttgtataatttaaagtcagtctgacttcaaatgtaattctaggattgcaacagaaagaaaaatggagacaagttagatgagaagatactataaagaaaccaagtttcttgttttgtactgcagtctaaccaaaactcttatggataaagtttaagaaggtaactattagatatccaggcctgttgggcagcttggagagagtcagtattgtagaaataaacctgtaaaacccgtgaaacttacccaacagttttccttcaactggtttttctggagatacactgaaaattattgcaaactaaagatacattttaactattcctaaaatgattaaaatggcaaatataagaagcactttttttttttaatttttgagacagattctccctctttggcttgagtcactttatttatctttttgggacagagcctcaggcaggagtgcagtggcacgatctcagctcactgcagcctcaacctcccaggttcaggtgatctgcccagctcagcctcctgagtagctggaactacaggtgcacgccactatgctcagctaatttttgtatgttttgtagagatggtgtttcaccatgttgcccagactgatcttgaactcctgggctcaagcattcctcccgcctcagcttcccagagtgctgggatgacaggcgtgagccaccatgcctggctacataagaagcactttgatatctcagagtctgaggcagaatttcacatttttaagtcttaattgatagataaagtctggttatcagacaggtattctgtttaagcttttgtggttttccctactcatgttaaaaaaattcaaaaattgaaaatactgaagatgacaacctgccctagtttttttcagtctatatccattccactgcaggaatggaaggaggacataaaggtcgcacattttcatacagttagtccttctgtaaaatctgtaaagccactttattatttaggaacagggtcccactttgttgcccaggctcactgcaaccttgacttccctgggctcatgtgaccctcccactcctcagtctcccgagtagctgggactacaggtgtgcaccaccatgccccgctaatttttaaattttttgtagagatggtgtttcaccatgtttcccagactggtcttgaactcctgggctcaagcattcctcaccttagcctcccaaagtgctgggattacaggcatgagccactgctcccagccacgatatttgactgcgggcatttgtagcaatatagctgaggttcactaaaagggaataagactgggcatggtggctcacacctgtaatcccagcacattgggaggcccaggtgggaggatcacttgagcccagaagtttgagaccaatgtgagccacacagcaagactcccatctctaaataataataataataaaaacagccagtcattgtggcacacacctgtagtcctagccactccagaggctgaggtggggagatggcttgagcccaggagctcgaggctgcagtgagctatgatcaggccactgcactccagcccaagtgaaagcgagaccctgtctcaaacaaaaacaaaaaccccaccaaaaccacacttgaataactttgagaaaattacttatgtgttctgttaatttgtggtgaaagataagtgacagaacatgccaaatgtttacttagcacattgcctggcttactctacctactttacatgttagcttctgcttctggaattaaaatagtcaaaagaatagttaaaagagttctgtgctgggtcactccagtcatttcacaccttcctcactaattatctcttctttgtattattctaatttggggcagaggataggcatgaggaggagtgaggaggagtttcatgagggggtcaaggcaaggtatggtgaaggcaggtgaacatcagaaacaatcttcctagttcactgtttttcccaagctggcatttcaaaatcatgtcttatcacagactgcctgttcttgatatacttgaattataaatttgtgacggtcatgtataggtgatagtggtggacaggcaaaaggatagacggatgacaattgccttatggtgtaatacagtatgacaggctgacttgaatacagggcaatgcaaaatgagaaacatgaagtgtaaggcagttccctcagaaaagcttgtaacccagtggtatcttcagggtttgataactggtatcttccattgatgttttttattttttcctttaacaggagacatatttgtggaaatagcatttggagtcccactcctccacttatctgtgaccatgggctaaaattatttatctgggctttagtttctccatcattacaatgaagagatgtgctatccttttccaccctgttctaaaattgtgtaacttttttttttcttttttgagacagagtcttactctgtcacccaggctggagtgcagtggcatgatctcagtttactgcaaccctaccacctcctgggttcaagcgagtctcctgcctcagccttccgagtagctgggattacaggtgtgtgccatgacaccggctaatttttgtatttttagtagagacagggtttcaccacgttggccaggctggtttcgaactcctgacctcaagttacatcatgttgctcaggttggtctggaactcctggtctgaagtgattctcccaccttggcctcccagagtgctgggactgtaagtgagagccaccaaacccaaccctcggcatcttttaatatttatgccactaagtataaggacaccaataatactttgtgctcatagtgatgtttactgggcaaacatgaccaatcaacattaaggaaaactcctttggtagtttgtggcttgtttatataacaccgaaaggactctgataattttcctctcaataaagagaaattaattgattttcctgatgactcaggtgcatagtgatatgcctgcccttgtataaagatgattctatggtttcctctcctttggctatcacttctattcattagtcaatagttccctcttatttgctacactgtgaaaaagcaaagtggaaaccagatgaccaaatttataaggttaataactttttttctttttctgagacggactcttgctctgctacccaggctggagtacagtggtgcgcgctctcctcactgcaatctccacctcccgggttcaagcaattctcctgcctcagcctcctgagtagctgggattataggtgccggccaccacaaccagctaatttttgtatttttagtagagacgaggtttcaccatgttggccaggctggtctcaaactcctgaccctcgtgatccacctggcttggcctcccaaagtgctgggattacaggcatgagccaccacgtcccgcaggttaatcacttttaaaattgcagtaagcttgaacccaaggatagatctctacttcttgaaggtttatacaagtatttttcttggtgcttgaaggctctttgttggcagatttgtgttcatgttttacatgtttggttgaggctaccatatctggtccctatgttcatgaaatgttactaagttttggatcatttgaatgttttttttaaattattattttattttttgagagggagtttcactcttgttgtccaggctggagtgccatggtgtgatctcggctcactgcaaccgctgcttcccaggttcaagtgattctcctgcctcagcctcctgagctggtactacaggtgcctgccaccacacccggctaattttttctatttttagtagagacagggttttaccttgttggccaggctagtctcgaactcctgatctcagatgatccacccgccttggcctcccaaagtgctgggattacaggtatgggtgtgggccaccgcactcagccatttttttttttttttttttgagacagagtctcactttgtcacccatgctggagtgcagtggcatgatcatagcttactgtaatcttgaattcctgggttcaagcgatcctcccacctcagccttccatgtagctgggaccacaggcgtgagccactgcactcggccccttgtcatagtttcaagtcttataaaaagttattttgtgcacaggttgcttttactcagattgttgatgacaaatcttttgcccaaaccagagtgagttacatccatgctaacctagaaaaaatcggctttggtaagaacctctgatgtttaagtttctttcatgaggcattgtgtgtttaatcttaaaaaacgtcattggtaaatatctctgtaatacaaaggaagaatcctataactaaaacctaggaaggtatttttgtacaatactaattgtttacatattagtccatttgttttgatttttctacctgtaagcatgatttctatctttaatgtctttcattacgtaatgttttaatgtaacacactgatgtgtgtattgcacatatccatgataatttattgtgctgcttcaagtgtttatttagtgcggcagttctactttctgggaatccttcagatgctgttaaaattcattgacgcttgtgtaaacaggtcggttattgtgttgcagtttacatacaattcttacttaatctctctcttccttcctcgtagaactgtttgggggagcaagagacctgttctacctttcctcttaacgtctcatacagaattccattatgcttttattgcctagcacaggggtcagcaaattacctcctgtaggccatatctaacctaccaccagtttttctattgtgtgtgaggcaagaatggtttttatgccattaaatggttgaaacaaaagtaaaaatattttgtgatgtgaaaatcatttgaaatttaaatttcatgtccataaataaggttttattgggatatagccatggtctgtggctgctttctctgccataaggactgagttcagtagttgcaaaagaaac

SEQ ID NO: 253 - DNA, 3677 bp, Homo sapiens
ggcttgcccaatggagcaatgccggctggtggcctggccgctccgccccttccctacccctcgcggagggcccgccccctgccccgcgccggctagcggaggagagtaaatacaacaggagcgcaaaatggcggaaccgccgagccccgtgcactgtgtcgctgccgcggcccccaccgccaccgtctcggagaaagaaccgtttggcaagctgcaactctcctcccgggaccctccgggttctctgtccgccaagaaggtccggactgaggagaagaaggcaccgcggagagtgaacggagaagggggcagcggcgggaacagcaggcagctgcagccgccggcagcaccttcgcctcagagctatggcagccccgcgtcttggagctttgcccctctgtctgctgctccctccccgtcctcttctcggagcagtttctctttctccgctggcacggccgttccctcctcagcctccgcttccttgtctcagccggtgccgcgcaaactgctggtccctcctacgctgctgcacgctcagcctcaccatctcctcctgcccgccgccgccgccgctgcctcggctaacgccaagtcgcgcagacctaaggagaagcgggagaaggagaggaggaggcacggtctcggtggggcccgagaggccggcggggcctcccgggaggagaacggggaggtgaagccgctgccccgaggtgggtgccgtgcggggagggggaggggagggcgccgtgggtccccgccgccccctggcgcccacggggcccgggaagggggagcgcggcggccgcgtgcgccggcctggaggggctgggaggcgtccggttttcagcagaggattttgcagttcccaaggggacaggaaatggagcctgtaatttcggttgcagagagggggatggccgacactcttattttctgtatcgtttcttcctcccagttagtgcgctgcaggatttgtgaaaatccatcttgaggactctcctagataaaatcaaagacaaaattaaagagagagacaaagaaaaagagagagaaaaaaagaaacataaagtaatgaatgagatcaagaaagagaatggagaagtaaagattttgctgaaaagtgggaaggagaaaccaaaaacaaatatagaagacttacaaattaaaaaggtaaagaagaaaaagaaaaagaaacacaaagagaatgaaaaacggaagcgtccgaaaatgtatagcaaatctattcagaccatctgctcaggattgctaactgatgttgaagatcaagcagccaaaggcatcctaaatgataacataaaagattacgttgggaagaatttggataccaagaactatgattccaaaattccagagaacagtgagtttccatttgtctcattaaaggagccacgagttcagaataacctcaaaaggttggacactttggaatttaaacaactcattcatatagagcaccagcctaatggaggtgcatcggttatccatgcctacagtaacgaactctcccacctgtctcctatggagatggagaggtttgcagaagagtttgtgggtctagtgttcagtgaaaatgaaaactctgcagctttctacgtgatgggtattgttcatggggcagctacttatttacctgactttttagactatttttcatttaattttcccaattcaccagtgaaaatggagatattgggaaagaaagatatagagacaacgactatgtccaattttcatgctcaggtaaaaagaacgtattctcatggtacttacagagctggcccaatgagacaaataagcttggtgggagcagttgatgaagaagtaggagattatttccctgagttccttgacatgttggaagagtcaccatttttaaaatgtacactgccatgggggacgctatctagtctaaaattacagagtcgaaaagatagtgatgatggtcccatcatgtgggttcgtccaggagaacaaatgatccctgtggctgatatgccaaagtcacctttcaaaaggaaaagaactaccaatgaaataaaaaatcttcagtacctacctcgaacaagtgagccccgtgagatgctctttgaagacaggacaagagctcatgcagatcatataggacaaggttttgaacgacagactacagctgctgttggagtgctgaaggctgtgcactgtggagagtggcctgatcaaccccgtataaccaaagatgtaatttgttttcatgctgaagatttcttagaagtagttcaacgaatgcagttagatttacatgaacctccactgtcccagtgtgtccaatgggttgatgatgcaaaactgaatcaactgaggagggaaggcattcgctatgccaggattcagctatatgataatgacatttattttattccaaggaatgttgttcatcagttcaagacagtttcagctgtatgcagtttagcatggcatattcggctcaaattatatcactcagaggaggacacttctcagaatacagctactcatgaaacaggcacatcatcagattccacatcatctgttcttggacctcacactgacaacatgatttgtgctgtaagcaaagcctccttggattctgttttttcagataaacttcattctaaatatgaattacagcagattaaacatgaacctattgcatctgtaagaatcaaggaagaacctgtgaatgttaatattcctgaaaagactacagcactgaataatatggatggcaagaatgttaaagcaaaattggatcatgttcaatttgcagaatttaagattgacatggattctaaatttgaaaatagcaacaaagatttaaaggaagaattgtgccctggaaatctaagtctagttgatacaaggcaacacagttcagcacattcaaatcaagataaaaaagacgatgacattttgtgctaaatttgcatataccatctaaaatccttttttaaaaaaatttaatgtaataaagattcatgaattctgaaagcaagccaaggacttgctcctatgtctgttacaaaacatagtttatgtagctttgtaacattcctcagtgcctgtccataactgtgaagtattaagcacttagggccagatgcactgtaaacattgcaggtttaaacataaaggagtctttaaaaaaaaatcatttacgttggaattttaggttttagaatagagctgacattaacatatatatatatatataaatatatatatatattttgtaatatgagccagaattctttttcaacaatttaaagcttttccatagagcttatttatatccttttttttcattttaaatgtgtcagcactgtagtgtaaatagcttttaaatatctttttagtgtgatttatactgaaatgtgagccacttaataaaggttcatatgttcatattaataaatatgttttctgttgagtctgtaaagacaaactgacaattcatttaagtcatttgataatgattctctgctggtatatctatttagtgtggtattgtagtgcaaatgtacgtaattcaaatctagtaaatatttaagttcctcacactgtgcaggcttttttttttttttctttttttcttttttttgatacggagtttcattctgtcaccaggctggagttca

SEQ ID NO: 254 - protein, 626 aa, Homo sapiens
MNEIKKENGEVKILLKSGKEKPKTNIEDLQIKKVKKKKKKKHKENEKRKRPKMYSKSIQTICSGLLTDVEDQAAKGILNDNIKDYVGKNLDTKNYDSKIPENSEFPFVSLKEPRVQNNLKRLDTLEFKQLIHIEHQPNGGASVIHAYSNELSHLSPMEMERFAEEFVGLVFSENENSAAFYVMGIVHGAATYLPDFLDYFSFNFPNSPVKMEILGKKDIETTTMSNFHAQVKRTYSHGYAGPMRQISLVGAVDEEVGDYFPEFLDMLEESPFLKCTLPWGTLSSLKLQSRKDSDDGPIMWVRPGEQMIPVADMPKSPFKRKRTTNEIKNLQYLPRTSEPREMLFEDRTRAHADHIGQGFERQTTAAVGVLKAVHCGEWPDQPRITKDVICFHAEDFLEVVQRMQLDLHEPPLSQCVQWVDDAKLNQLRREGIRYARIQLYDNDIYFIPRNVVHQFKTVSAVCSLAWHIRLKLYHSEEDTSQNTATHETGTSSDSTSSVLGPHTDNMICAVSKASLDSVFSDKLHSKYELQQIKHEPIASVRIKEEPVNVNIPEKTTALNNMDGKNVKAKLDHVQFAEFKIDMDSKFENSNKDLKEELCPGNLSLVDTRQHSSAHSNQDKKDDDILC

SEQ ID NO: 255 - DNA, 3724 bp, Homo sapiens
ggcttgcccaatggagcaatgccggctggtggcctggccgctccgccccttccctacccctcgcggagggcccgccccctgccccgcgccggctagcggaggagagtaaatacaacaggagcgcaaaatggcggaaccgccgagccccgtgcactgtgtcgctgccgcggcccccaccgccaccgtctcggagaaagaaccgtttggcaagctgcaactctcctcccgggaccctccgggttctctgtccgccaagaaggtccggactgaggagaagaaggcaccgcggagagtgaacggagaagggggcagcggcgggaacagcaggcagctgcagccgccggcagcaccttcgcctcagagctatggcagccccgcgtcttggagctttgcccctctgtctgctgctccctccccgtcctcttctcggagcagtttctctttctccgctggcacggccgttccctcctcagcctccgcttccttgtctcagccggtgccgcgcaaactgctggtccctcctacgctgctgcacgctcagcctcaccatctcctcctgcccgccgccgccgccgctgcctcggctaacgccaagtcgcgcagacctaaggagaagcgggagaaggagaggaggaggcacggtctcggtggggcccgagaggccggcggggcctcccgggaggagaacggggaggtgaagccgctgccccgaggtgggtgccgtgcggggagggggaggggagggcgccgtgggtccccgccgccccctggcgcccacggggcccgggaagggggagcgcggcggccgcgtgcgccggcctggaggggctgggaggcgtccggttttcagcagaggattttgcagttcccaaggggacaggaaatggagcctgtaatttcggttgcagagagggggatggccgacactcttattttctgtatcgtttcttcctcccagttagtgcgctgcaggatttgtgaaaatccatcttgaggactctcctagataaaatcaaagacaaaattaaagagagagacaaagaaaaagagagagaaaaaaagaaacataaagtaatgaatgagatcaagaaagagaatggagaagtaaagattttgctgaaaagtgggaaggagaaaccaaaaacaaatatagaagacttacaaattaaaaaggtaaagaagaaaaagaaaaagaaacacaaagagaatgaaaaacggaagcgtccgaaaatgtatagcaaatctattcagaccatctgctcaggattgctaactgatgttgaagatcaagcagccaaaggcatcctaaatgataacataaaagattacgttgggaagaatttggataccaagaactatgattccaaaattccagagaacagtgagtttccatttgtctcattaaaggagccacgagttcagaataacctcaaaaggttggacactttggaatttaaacaactcattcatatagagcaccagcctaatggaggtgcatcggttatccatgcctacagtaacgaactctcccacctgtctcctatggagatggagaggtttgcagaagagtttgtgggtctagtgttcagtgaaaatgaaaactctgcagctttctacgtgatgggtattgttcatggggcagctacttatttacctgactttttagactatttttcatttaattttcccaattcaccagtgaaaatggagatattgggaaagaaagatatagagacaacgactatgtccaattttcatgctcaggtaaaaagaacgtattctcatggtacttacagagctggcccaatgagacaaataagcttggtgggagcagttgatgaagaagtaggagattatttccctgagttccttgacatgttggaagagtcaccatttttaaaatgtacactgccatgggggacgctatctagtctaaaattacagagtcgaaaagatagtgatgatggtcccatcatgtgggttcgtccaggagaacaaatgatccctgtggctgatatgccaaagtcacctttcaaaaggaaaagaactaccaatgaaataaaaaatcttcagtacctacctcgaacaagtgagccccgtgagatgctctttgaagacaggacaagagctcatgcagatcatataggacaaggttttgaacgacagactacagctgctgttggagtgctgaaggctgtgcactgtggagagtggcctgatcaaccccgtataaccaaagatgtaatttgttttcatgctgaagatttcttagaagtagttcaacgaatgcagttagatttacatgaacctccactgtcccagtgtgtccaatgggttgatgatgcaaaactgaatcaactgaggagggaaggcattcgctatgccaggattcagctatatgataatgacatttattttattccaaggaatgttgttcatcagttcaagacagtttcagctgtatgcagtttagcatggcatattcggctcaaattatatcactcagaggaggacacttctcagaatacagctactcatgaaacaggcacatcatcagattccacatcatctgttcttggacctcacactgacaacatgatttgtgctgtaagcaaagcctccttggattctgttttttcagataaacttcattctaaatatgaattacagcagattaaacatgaacctattgcatctgtaagaatcaaggaagaacctgtgaatgttaatattcctgaaaagactacagcactgaataatatggatggcaagaatgttaaagcaaaattggatcatgttcaatttgcagaatttaagattgacatggattctaaatttgaaaatagcaacaaagatttaaaggaagaattgtgccctggaaatctaagtctagttgatacaaggcaacacagttcagcacattcaaatcaagataaaaaagacgatgacattttgtgctaaatttgcatataccatctaaaatccttttttaaaaaaatttaatgtaataaagattcatgaattctgaaagcaagccaaggacttgctcctatgtctgttacaaaacatagtttatgtagctttgtaacattcctcagtgcctgtccataactgtgaagtattaagcacttagggccagatgcactgtaaacattgcaggtttaaacataaaggagtctttaaaaaaaaatcatttacgttggaattttaggttttagaatagagctgacattaacatatatatatatatataaatatatatatatattttgtaatatgagccagaattctttttcaacaatttaaagcttttccatagagcttatttatatccttttttttcattttaaatgtgtcagcactgtagtgtaaatagcttttaaatatctttttagtgtgatttatactgaaatgtgagccacttaataaaggttcatatgttcatattaataaatatgttttctgttgagtctgtaaagacaaactgacaattcatttaagtcatttgataatgattctctgctggtatatctatttagtgtggtattgtagtgcaaatgtacgtaattcaaatctagtaaatatttaagttcctcacactgtgcaggcttttttttttttttctttttttcttttttttgatacggagtttcattctgtcaccaggctggagttcatgagccgagatcgccccactgccctccagcctgggcgacagtctcaa

SEQ ID NO: 256 - protein, 626 aa, Homo sapiens; identical to SEQ ID NO: 254

SEQ ID NO: 257 - DNA, 72352 bp, Mus musculus
  misc_feature (1)...(72352): n = A, C, G or T/U
acctcaaggcctcgggtccagcgctctctcacggtctctctgaggcgtcaccaaagggacctggtggaccccagtggctggctgtctcttgatgactccctcatctatgacaatgaaggagaccaagtcaagaatggcaccaacatgaagtccctgaacctggagatgcaggagcccgttatagctgcttccctgtcgcaaaccggagcctctatcggcagcgcgttggcagctatcatgcttctcctattgctgtttctggtggcctgttttgtcaccaggaaatgccagaagcaaaagaagaaacagcctccggaggacactctggaggaataccctctgaataccaaggtggatgtagccaagagaaatgcagacaaggtggagaagaatgccaacagacagtactgtaccgtgcgcaatgtcaacatactgagtgacaatgaagggtattatacgttcaaaggtgctaaagtcaaaaaactgaatctggaggtcagagtccacaacaatttacaagatgggacggaagtttaatgagaaaccctgagatgtattttcttttttttctaaaatcctttttataaaatggggagaaatactggtatttttataatctttcaaattaaacaaaaaaaagggaaaactagctttgagtggcggacagcacacatcgcatgcatcaactcacaactgagctacctcatgaaacagaaccactgagacaccccccttgccctagagtgtcagagtaaggttatgcctacaggtccctgtaacagtctcagtggccacacagagcgactctgtaaggctggccccagaagtgttttaggattaggacagacactggacaattagcttcactgattggatcgagaaagctgggctctgtgggcagcagatatctgcaagtacaaacaaagcctttggtttcttcctctgccccagctctcttctgtgtgggcctttctggacttctggacacagaatacagaatgctgacacacagattccattgacaattctaatcagcacaacttagacatctgtgcactgtccccacttactatcctgtgcggccaggcctctaagtatacttggcttttctagagccctttttgaatggggatctcaatatgctttagactgaggaggactccagccagggccatgaagagcactgcgaagtaccacagcctctgcatgccagagatacttttaaaactcagccccgcttccccaggcgttctgtggttcatcagtgcatagggagctcatgtgtttgggtttttttgtttttttttttaattttgttagtgatttttagaaagtaagcgaatcatttgagtgagtgaatttcctagaggttggaatgaaaccagagttaacagatacacatgggacctgtttgctgtgtgtcatacagcagatagagccactgtccctggtgccatagtccggggaattctctctgggggttcttttctggtagctcaggctcttagtttctcccacatcagcacatgacaacccacatatatgtatgtggcttttacatagcatagtgttcaaatatcgacttgaatattctgtgtgtagtatgcacacaacttgcctttgttttcttttctgtttctaccttatgggtacaatctgaaccgtgcacattgtgtttttaatcagagtcacaattccattagccagaagcaaatgctgttcttgtgcatggcacatccgatcagtgagtaaatcacagagcgtccgcgttgtgtcgtatccgtatggaaatgacacaaactctttgagaacattccagactcctactaaaatctagaaggaatgaaccatgaaagtttcacaggcaactctgcagacccccgagctcaagagcagagcctgtgtgagccacggctggctcttcatccttcagcggtgccttgcacactacaagcgtgcagaaatgtttgttgagtgaatgaatggacggcgtgccgagtgaatgataggcagtaaacagaggaagaggaggtgagacgttatgctggcagtattacagggtgtgtagggatgatctctgttgtatttggtttgtgaaatagtccttcaactgagaggggaaaaaaagcacacttttaggtgggtgtggccggtggtgtatctggggagtcgggaacagaaatactgcggtaatgcatgagccgcatgttggcttccagagcaggagatctggaggaaagccgatttcacatttcgaaggtaataatagtgtgttcgttcagggcaggaaaggttggctgagcccagaaattcctggctggtcaggtgctccttcagaccagcttgcataattcataatttcataattcagggcagaaattctgaaattgcttcaagaatctggaatcgctacccatctcttgcagcaaaactgatgagccacaccctggatctccaggacaacagacagggctagagcgcagacagggagccaatcatctgtagagcagcttcccattggcccattactggtcacacctcccgctgtccagatgtttgcacattagagctttcagtgggctccacacccacacacataccttcctttacacctagtgggacacatacatgtgaagagatggcagagcctggcgcgggaagagaggctgaatctgaaggcctttgtgtacaggtgggcagtgaaagacaggagcctgtgtggacctggtcgttgtgaactctggatgagagaacagcccctgaaatagccctgcctcccagcctcgcccctaagacgctttattagaagccagccttctctggtggatgcctacttctgacgcaggaagcgttaagaggtatagagccgaggtttgccttttgaggagtgttgagtcattcatttcatttacgttttgtacttcatctttgggactggataatttggtgactaatgtggattctatttcagtgaaagctttgctttcagcgtttcttacttcttcactaatgccttgtgtgtgtttttactaaccttttagattgtaccttcaggtgagaagaacagaaaaaaataaaaataaaaaccctcagcagggttgctcttgctgccaggtgctggctgtggaggtcaaaagaagtaattgtctgcaccatttttctgccttgtcagcccctttactgtaccaaggtctttgggaaacccctgcaggttcctattgcagggtgggaaattgtgaagaaaagtgtttgcacaatcttaacaataagtgttcctggtctcttgtaggtttttgttattcctagttctcccctgctcagactgagaaaaacatttgtggtgctgtcaacctgtgttcttgaccctcaaatgattttgattttttttttttgtatttccaatatgaatttgtgtgttacgaatttctgatttcttcaatagcatatgctactatataaatttgtatcaataataaatgatggcccagttgtcctttgtttgcttgactctgttcttcttccattattcatctcattagcatagacactgcactgagctggtacatcattcgaaacctgaggcttttatttaaaaaaaaaaaaaagagcaaaaatgaatctgaatctgaaacataccaattctgctaagagccaggttctgaataaattcatactctcggatctagctttgcttttatggtcagaacaaagagaaataatgtacttccaatgcgagcacaatagggtgaaggttgccatccaccctctccaagatccctgatacagtgtgagcagggctatggccttctttgttgcacaagagaaggatagctgagtgtctcaaacaccacccaggagatgatctgatctccacatgagtttttttggcttgtgaaggacacggtggcagagacagaataggactgagctttgagcagttgtggcattctgcaagcctgtgcatttgtgtgcctttaccctctgacaatacgacacactgccaaggacagtgcccagcatggctctgttggcacacttgcaaactcagcaagatctgaaaactcagtacacttccataaaagctggggaagggatgccatccatagccaggcccctgaattccctgctgcgatcttcaaatcctcttcgtgtccaactgcccaattgttaccctgcacctgccagcgctcagccttggaatgcatttctctagagcacctgaagggaccattccaaaaaccagtttctaaacttttaagattggccacaaatttaaaaaaaaaaaaaatgcttctgagacttgaaatttcatgtgcataaaatttaggaactttgagtgtaaagtcccatttagaatttacaatgtctcatgggggattttaaaattgaaaaccgagggaggaagtgatatctagactatgctactacattcagccatgtgaaactgagggtctaatagatcatgagacgtccacgatatagatttgtatgtctctccttaatatcaggataccagagtgagtgtctgttataggtttcccaaatgggctggagagagctctgacaaaagcccatcagaatagtgtgttgggctaacagccttgtcacagtctaaggacaatgtcaaatgatgggctgagtatgtctggtcaaacaaccacatacctaccatgaccccattgctacttctacctcatcctataacaattctgaggcaagtgccttaattttcttttaaattttcaaacaaatacccgattttcaaagccttagcaagcagacggtgagtagcttatcattgccctcaggctcctattaccctgattggatgcttgtgctgaaggagtcccatcactcagttaccataagacggcagaaccatgctgcaagcctttctttaaaggctggcagaagtttcatccttaggtctgttctggtttaaagccatcaggttctaggactagtcaacacatgataaaagtttattagggtccagcctctgggacagtttccaagagttgttcaaaaccagatcaaacctcccactgagaaatatttaaaaaaaaaaaaagcgatgcttggtaccaatagatcctggaacctgacaggccccctgtgtgctggcttcttcagctgtgattggccatgtggagccactgaattgagaggagcttcaggttgtcagccactgctactccctcctgccctgttgtggtttccttcttggccacaggccctgttggacagtctctctttcaaagtttctgtttgtctcggtgctgagtgttgcctttcctcccttggctgtgtggggacagcaatgactccatgctttccctagtcctcggggacttgatgatgcctgggatccacggcaaccgtgcccatacatctgcatgcactctatgttgctcgtatgtctgtacccactctctgttgcccgtacgtctgtctgtacgcactctgtgttaagcccttacattaagatgctctgaatgtactgtctctcgagtgctgaattcatatagtctttaaacttggtgacactttgtttttattttaacatcaagcacaaacacaggagctgtaaacaagtgtctgtcttaaatttgccatcttggttaatacttaacacctggctctcagagccaatggaagtcttacacatagcattcacaggcttttgttagtaaatactccatcctaccaccatggtttctctaaatgataaaagcacagttttatactatattttcaccacattcatacaataggtacaagcaaccccaagagcacagtaacattagcaagtgatcatttttttaaaagatttatctatttattttatatatgtgagtacactgccgctgtcttaagacacaccagaagagggcaccatatcccattacagatggttgtgagccaccatgtggttgatgggacttgaactcaggtcctctagaaaagcagtcagtgctcttaacgactgagccatctctccagctcagcaagtgatttctttagagtatcttcttatttctagtgctaggatcgacccagagcctcccctacacacgggcaactgtcacaaccacagcactactttgaacatgtgtttcctttgtctttaactgactgcatccagttgttacctgtttaggccccgcttacagtttgcaatagcttgtattaattctttcgagaatttcatacatggtaatttgatcatatttacctccccttccccaacagatccagcccacccccattccatacccacccaactttgtgatgattttggtttttgtatccatcaaatccatttttgttctatatgttctcaaggcagtatggagctgaccccctctttctgagaagctatcagcaaccacaagctcctaagctagaagggaaacctgcttacttttcctttctatgctggaattctgccttgtgtgcgctaacacaggtttcgtgcatgctgtcataactactgtggatgcatatgtgcagctgccttgtattcagagagcactctctcagtgttctcacgcaccacctctagttttgcattctcctactcccttttctgcaatgatccccaagccttgggaggagaggctatgatagagatacccaacatggggctgagcactccacaacctctgcttctctgtatctttaccaggtgggtcttcgtgttgatcaggattccactgcacaaagaagtttttctaatgaggttgggaaaggcactaacttgtgagtatgggatgctttgggaatggcccacctaggctcatgcgtttgaatacctggtccccatctgctggaacagtttgggaaggattaagtggtatgaccttgttggaggaggtgtgtcactgggaaaaggctttgaggtttcaaaagacccatttccagtgtctctctgcctcatggttgtagctcaagatgtgagcttttggttacttctccagcaccatgcctgcctgcctgttgccatgcttcccaccatgataagcctggactctaaccctatgaagctataagttccaaattaactcttcctataagttgctttagccacggtgtcttatcatagcaatagaaaactaagacaataaataacaataaatcattagtaattggtttaacagacagagtactacactaggttcccttctaaggcctatgactttttagccacatagttgtggcccataggttctatcctgtgaacaggactctgtcgctaccgtctccgaccagcagaaaagaagtgacgaaaccgacgtccttctcaaggcagtttattcaggaactttacaaatgtgtcggaaaaagaatgccccaacctctccagtccactctccctcaccccagtccacgtaggcacagttcattggctcaggactacattcttcacatcatcagatcttatgtcgtggtgcatctgcgcaacgcagctcaaggtacgtggctatcttgagggatatgaggaatcaggtgccagtcataagacttggcagcagtcccgggcaccatcttggggccgcggccacacccgctcctcacaggactcaaattcaattaaaaaaaaaagtagttggttgctctcatgacattcataccacggttacactagtgggtgtgtcgggccagtttttattgtagctcatagggttcacagattgatatgagggaggatagccaacactgaaaaccttatttaaaaaccatcatgaaaagctactaccaatcgtgtttgtaactaccactacactgccagtacagaaaggaagaaggaaagaaagaaagaaagaaagaaagaaagaaagaaagaaagaaaggaaggaaggaaggaaggaaggaaggaagaaagaaagaaagaaagaaagaaagaaagaaagaaagaaagaaagaaagaaacaaagaaagacaacagcagaagcttcctagaatataaatatatacgtatgtaaagtgcttaaatgaagtcaatcaataagaagacaatgtgcctgttcgataatacagaccaacaaatataaaggtcagtgccagaaatacgttaccacttttggaattgttggacaatgagatctcaaacattacaagttatttgccattgctcttggcttccctccagcacttaattaataaaaccctatggctgaacacaccacaggtgtgaaccacagatcatagaagagtcacactggtactgacctggaagccttgtctctattggctggctttcatggtaccgagaggtatcatgcatgctcccagaggaggaaggcagtcatcaatcttagacttttgaaatgagaattcacctgtagctcagactagtcccgaactttaggctcacaccatcctccctccttggtctccctagtataggagactacaaacacataccattttgccaggcctcaacttcatttattttttaatagtgctgtgcttaacaagtaactatgacattcctgaatcgtagccattgattttatatacttccaacatataattgcacagaataaatactctcaatacaaaaagagagggagttggttgtagcaaaacaagatcagaccaaagcaagagagaaatccaacatggcaaatgtcaaatgaaccctccaactccgtatctgatgtttggaaatcatgatggagtcatctcgtcttgagctagagagtggtccagtaaattctcacagcacgctaggacgtttgcagcccctagctgcaaactcttttacagcaaaacagttccaaaagtctaaggaccacatggtcaggcttctctcagcagcgacaccactctaggcatcactgtttatattagtcacttctctaattgtgataaaaatgcctgacaggaggcaacttaaggggggcggggtttattttggctctgttacatcttcagtcctgcagcagaagggagctcacactcaggctcagcttgcttgctcctcaatcttgtgcctgggcacacaggttagtgttgatctacatttgaggagcattgccacccttcagttaacctaatctgaatatcattccgaagatatgcctagagctttgtttcttaggtgactaatctagctctcccgtcaaattgacaatcaatattaatcatcatagttgtgttttagattcctcgcctggcagacacaagcagaaggcatgcagatttcacatgtatcccttgttgctacatgtatgacatctcccatccaacataccccaccaagctagcttacttcacattaagattaacttattttacccagaatccatagttttcttaaggtttaagcctaagttttcttggcaccatacagtccatgttttgacaagtatataatgtcagttacccatcgttagagtcatactgcatgattttactgctctaaaaattctctgttccacctgctaataccctcccccaccacagctcttgacaaccactaaccagccttctcaaggtctccgtagttttgtcttttccagaatgtcacagagtaggaaccacaccctttacaagctggcttcttcacttaaccagatacatttcaggtacctttatagcttgattgctcacctgctttgggccctgaataaaattacaatatacgatgtaccacagtttactgcctatccacctactgaaggacatcttggtactttcacatttccgcaattacgaataaagctggtacaaatacgtatgtgtagttgttagcgagcacagagcttccgtgatacttggacaaacaccagtaagcacaattcctggattgaataataagactatatttagttttgtaagaagcaactaaattatnnnnnnnnnnnnnnnnnnnncgggaggaggatgtgagggagacaggggaaggggagggcttgcgaggggggcgtggtgggtaggtcacgactggagcagagaggatcctggatccaagagccacttgcaagccggtcctgggcagtccgtgagtagaaacaggaggaggggctgaggaagggtgcggtctgggttgccacccaggctagccgggagctacggccgaggctgatcgttcaccttcgctgagcttctgcctgggcttcgcctccgcggccccaagggtaagtttcccatgcccgcccctctacaaccacggaacatcaggttcccgcggagtcccaggtcgtgagcgcagcttgctcctggggctgttccctcccctcccttcccccaagccctcttcccttctatggaaatagaagagacttgacctggggggcacaagggccgagctgagtaagttatcaaacttagggttttgcagcccaagctcacatccaggggactgctcattcctaaatgtcttggaaacatttaaaagaagaagggatagaggaaggtctcctgcccctgctcagagttctgtgctgagaacttttttctacggctcccatgagagctctttctcccctccaagtgtcttttagctttactttgtataggtaggagaaagatgtattggactttgagagttggggaacttcggttttctcttttaaaagacaccgttttctttgattgcaacagaattctattcactagacatgaatcacctcccctgcttcttgagtcagcaggtgaggtatcgaggtagaggtatgtggtttgtgattgcaaatagccatatatagaagttctgggtcctgtgccaatagaaagttgagcagccggggcaaaattcttccccaggaggtgcgttaaagagaagaggttcctgcccccgagagaacttcagtttctactcctcacaacatcataaaaagcagactaaaaggttattctatgaagaatcattactggttttcctgaaggtggaagtttcaaactgcctagaaaggtacttttaaactcgaacgaagatcagaccactgtccgcagatcagttggtgttgagaaatcggtagaaatgccagcaggaggaagtacaagaaaatgtagctgctgtaatccccttcaggaaggatgtgtttaaagctctattgttaggtcacttggcttgcactatggagtaattctctactttttacaagcttaaaggatggcttgataatacttcttagaaatttccacattatattggatcaacaaatgtcaagcatcagtttgggtcccgggccacagggcatggggattaacggttcattcctttgcaatctagatgcctgggttcagtcgggtcgacccaatagctgtatggtggggatttcactattgcttcctgtgcctccagcatcttcctgtgctgttaatgatgtctctctcactaactaggttattctgaggcttatgtttaaatcattgaatacagtttttttttcatatacaccagtgaataaacattgcacaaatccccagctttgagagctcactttctaacactttgcctgtcacctgacacctagtaaaaacacaagatgctggctgacagcataatctatcttatttcctcccagcaatagaaacagccatctccctattttacacatgaggaaatcctgactcaaattaggtctcgaattaagagatgtgttagcattttgtctgtgtgacagaacatctgagaggaagaatttaaaaggaagaaagatgtctttttagctcatggttttagagattttagcccaggtcaggtcagctggctccgttgctaatcattcaacgtgaggcaggacatgctcataacagagtccctggcagaggagaataccccacctcatggccgccaagacgcagagaccaagtgtgggcagtgccagggagaatacagggagctctgaggccgctcctaagggatctgctctctttagggagtcttaccccttaagcttccactgtttcccattaaattaggacaccatcaatggattgatctattgttgaggttaaagtgaccattcctgatccagttgcttatgaaactcctcagctctgaacacagctgcattcgggaccaaaatgggaaggcctgttgtacgtgacaagaagcaaccttatcctgtatccactgtatagtctggagagagatagagggtcagaccctttaattagagaggacaggccaggggagcagtggtggcgcacacctttaatcccagcacttgggaggcagaggcaggtggatttctgagtttgaggccagcctggtctacagaatgagttccaggacagccagggatacacagagaaaccctgtctcacctctgccccccccaaaacaaaacaaaacaaaacaaaacaaaaaagaaaaagaagaaaaaaaaaagagaacacagaagtttcagagaatgagcaaacattagggctaaatacttccagtgactattaatgtggtttcaggtccatctttggccctgaactgccactgaagttttagaatattttgttgccaggatgggtgggaacagtttgtatttctgaatccacactggagacaagccagcacatctgagtaatgtttacttatggaaggtgtgcctgggttcaaggaagtggcccttttcctgtctgcacctacttggaattagcctgacctcctcaaagagtagaaatgggtatttataacaagctgcgtaggcttggatcttgtaaaatgtacaggcaaggaatcagttcaaacccagctagaatttgtcttggtttgggggtgagaaacaaattctttcttcttcttctccttcttcttcttcttcttcttcttcttcttcttcttcttcttcttcttcttcttcttcttcttcttcttcttcttccccttctccttctcctccttctccttctccttctcctcnnnnnnnnnnnnnnnnnnnnnnnnnnnnnnnnnnnnnnnnnnnnnnnnnnnnnnnnnnnnnnnnnnnnnnnnnnnnnnnnnnnnnnnnnnnnnnnnnnnnnnnnnnnnnnnnnnnnnnnnnnnnnnnnnnnnnnnnnnnnnnnnnnnnnnnnnnnnnnnnnnnnnnnnnnnnnnnnnnnnnnnnnnnnnnnnnnnnnnnnnnnnnnnnnnnnnnnnnnnnnnnnnnnnnnnnnnnnnnnnnnnnnnnnnnnnnnnnnnnnnnnnnnnnnnnnnnnnatgtggtgtccttgtgcagaccaggtgatccttctgccccaacctctcacaggctgggactgcagacagcaacactattggttttaaaaaagaagtgaaaagaggcttcccagaaactattcttctaaggcccagagtacagagctgaatttttcctgccctgcggccctcaaaagtccagggccaacatgacctctttgtcgctgttctaaggcagggggagggggggaaggacacctgggtcccttcctttggctaccacactatagagatggagtatttaaagattgaaagtttccagggagctgggctgtgggggcgcatgcctttaatcccagcacttgggaggcagaggcaggtggatttctgagttcgaggccagccagggctatacagagaaaccctttctcgaaaaaccaaaaagaaagagagagaagaaagaaagaaagttagtttccagggaagtcttctcaggcagtactgctaactgtctcctccgggtcagtaccctgaaggcagacatggggttttctgtacctccttgtttgttcctcttcccaatgggccactttgagtaaatctcctttctctacttttgattcttacttatctctgtctaactggtgtactgaggacagttggccagaccagaatgactctgctagcagttgaaattgctaaatgcttagttaatccttgctcagggaacaggtttcttgatgtcagatacacaccctcctccagagaagtttctcattgactgctgactgttgctttctggattaagcattaagagttggactgaaaatgttgtgtgctgaatcacaacatggctttgtccctttaatactttgtttcttttctagattgctgtgatctcggcttgagagaaaggtggactgtcatggcctctatctgggtgagtaaaagccaaagcaccgtggcttacgtgagtcaaacagaaggacaaactgatatatatatatatatatatatatatatatatatatatatatatatatgaaagttgattaactatttaaaaaatagccaaaagctagagcacatttaagaatagtaaagtatatgtgtcataagcaggtgtggtggcatgtatctgtaactccagaactctgaaagttaaggcagaagaatgtcaagtgtggggagagaccgagtatgtagggagagcttatctaagaaggactagtagtaaaaatgtatcagaggggctggtgtcatgcttcaaaactacacttaaatgtagagactgggtttcagttctcagaatccacatcaggctgcgtacaaccgcctgtggctccagcctcacaggaaggacacccgtatttatgtgcatgtaacactccccacacacacatacacacatacagtaaacatttttaagggtataatagcagtccatacttggcaaagaggccttaatggagaaaaaaaatgtattgtataactcagcctacacaactataaagatgacatttattatcagcaaggaaagatagtttcttctgttagcaaaattagagagacttctagctcattgggggaaagtaaatctatattccacgtcccctcttacattaaaataaaatttaaatgtgtaaagcatagaagtgagggaatggttagtaacgtgcttacagtggcaaggcccaggtccctatgggagcccctgtctcaaaaactacagggaacagctccccaggaatgaaacacagtgctgttctgtgacctccacatacctgcacgcacatactgccacatgactatgagcatatgtacatgcatgtacatacatgcatgcatataaaataaataaataaatacacaattatacaaaaaataaagctcaagtggatcttttagaattaatttggaatgggtaaggccattacaaccataggcctaaagcaaaagacaaaaggttttctttaatttgtttatgtgtaaatttgtaactgtggcagcaacatcgtaaatagaatgagaagataaccttcagggcaacacatttgtagaacatcaggcagatttatttctgtaacacacaaatgacttgactaaagcaatttcaaaactgcgctcaatgggaaactgtagacacaaagtagcaagtgaaaggaattgcaagtatccaattcatctgtagacagaacctctcagaactgaggaaataccagaattcatgggaaaaggaaccattttctactgaagaggcaggtagctggaaaaaatagcaagacaaagttatgcactcaataggaaccttcaaattgttcataggagctggttatacttttggacagcattcgggtcagcatccgtcatcgttaaatattcttgtcctttattccagcaactctacttctcatgtatcatgaatgtgaatgaaggttgaaaaacaaaggtcaaagcatatttgcttgtatgattggaaatatacaggcaatgtaatgattactcagtaggtacgaattacttgttttttttaacttgcagccattttaatgtaattattttttaaaatgtagggataatattcagctctatgaaataacattagaaactgtaccagaatgagttatcagtgataagctcaagttacaggaggggtagatgcagaggctctgtataaaaaaaggacatggaagagatacaggcacaaagcatctctgacaacttcctaggcaggtggcacctcgggtaggttgactctttctcatgtctccctatcgactcttgtgcctttaagccatgagtacattttatgagttagagaacttgaaggaaaagcatgcagaggtgtggaccatgcaggggagctgtgccgagcactggtcaagagccatctttagtgctctccatacccgaaagccctctgactgtgtacgtctccaaaagagtcgtgaagaggcttctcaaaacgctagccggggtgcgctagaaaattagcatgaagtctactgacacacttaacaggctcagagacactggggttgagggtgagacacaagatatgagtttcctgttgcagtcaagccatagcaagtgactatacgttgaaggtaaagcagttagctggcagtgttcctccatggtggagtgcacacctaacatgtgctaaggcactgggtcccaccctcagcactgcatgaacaggtcagaggtattttttgctgcacgtggccatacaaaacccataatcccagcacttggcaggtggatctggagtttacggatagtctcgactacataaagagttctcgacagttgggctactttagtgccactcccaccaaacacacactcacacacacacacacacaccataacacacatactctctctcacacacacaatacacatattcacacacacacacatacacacacctgccaaatctctttcattatctcacagccctatctgcaatatgaactgattctcatagcagtatattttccgatgtaaacataagatttcgatagctagaaaccgactctgaatgaacagtgtgttccatgtgcacaatgtggaataccatccagccttagaatggaaggtgtcttaaaaacgggtgaaccatgagcatgtccagctagtaaaataagacagtcatggaaagataaacattgcacaactcctcctatgaaatacgcagaggactgtggcttcctggagcacaggagggccagagcgtgttatggttaagaccgcatagaacttgtgttccgcagtatgaaaaggttctggtaattgcttcagaacaacgggaatagtctcactactactgaacgatgcattttagatgggttgagatttaccaaaaaataatttttcaggcttaatattcttgtatgcgtccatgtaagtgcttgtgaacatgtaaggatgtatgtgagggctgtaagcaagagtgcagtaaagactgtaggagagagagagagagagagagagagagagagaacagccagaggcatctggtaaagagcagagagaaaggaggagactggtcatggccagggctatctgggagggagggagtatagaaaggagccggggaaaccatgccaggaactggtatctagaaggaggggggcctgtgaagtttggggagcccagagcttgggagctagtatggtggcgggggagtcagggactaagaagggtcaggaggctagcaataaagatggcagacttccggcttatctctcacttgagacttgagacaaaagcctgccatgcttttccagctagcagggtccctcccctctggctgactgattcaggctggtcaaatatgttcagtgcagatcctgagtcctgactgtatttacctgaagctgtgggcctattagtttccttttctttgtttaacctggtcagtccaaaattaaagaaagggtatctcaagccaccaaaactacttaaaacctccagccctctagaggaaaaacgaatctgctctgtagggcctctctctctctctctctctcctctctttctctctctctcctctctctcctctctctctctctctctctctctctctctctctctctttctctctctctccaccaccaccgcccgtattatataagtacttctacttgtttgatgaagttcattatctgttgctgcccactgtgtctagtgtgtcccctgccttttaaattttatcatctgtggagaacgtgatcgagatttctcagtatgctttttggtagtttggaatttaaagtttcactttctttgagtatttaagttgtgtcataatttgtaataacatcataattcaataatactattgttctagaaaatttaataacagttagaccaaaatgataaaaaataaactttagtgtgtcttaaaaaaaaaaaaaaagactcctaaacagtaagactcctgtgtctgacttccagctctgggatcacagtcacactctgctgctaacggcttttcacactggtgcacaggatctgaattcagcccttcatgctcaccaagcaagcacttccctaaccaagctacctccccagccctctggctttaatcatttaatcagaaagttctgctgtgacacaaagatttgctgacactagtgtgcccaattctggggagaccagaggtattagatcatgtggatctgatgctacatcagaagtttgtaagctgcctgatgtgggtgctaggaaagtcatgaactccagcaccaagccatctctccagctccaggagtgtaggtttctattaagacacaatatcagggacactagctgttcttcccaaggatctaggttcaattcccagcactcatgtagtgaactcaaggtgcagggatccagtggtcttttgtagcctctgcaggctccaggcaagcacatggtacatagccatacagaccagtactgcagcactgtgttgctatgaggggaaaaaaatgtttattgcatagttgactgacagggactccatgagctaagctgcccagagctacctctgtaagatagcagcagagggctttttagaaagtggaaggggaccaactgctttctaaatggatggtgcaaagggggagtcttagtgttgtgtggcacaagcagaaacgggcatcacacagcttcctggaccacaattctctagaagaaggtgtcatgggctgcattgggggcttggggattgagctcatgacatcaacaggtcatgactggacagactgacttcagcactgacccatttgtgtgaagctggctccagcctacccccgagaggattctggaggcagtccctgaaagacaacctaagaacttggttatttaaggaatttatgtccgaggccccgctgagctcattcttgtttttttcttcctccttgcacaaaaagcaaatacacacccaggcacaaatatgtgatctaggccgcccatccctacacggctctggggcagtgggaggttgccagcatgtggttagtttattgtaattaactcggggctgaaagagaaaattaaggagacacgagaaaggcaaagagcctctcattctggggtctggttagagtcaccagccagctgaaagtcatgaactccagcacaagtaataacactggctgtgacaattgcctatatagagacattccttttacctggagctaatttcaaataagaatgttaaaatagcagggagccacgtttgacagctgagtgcatgtgacctttaagtctttctcttttcctagatgagaactcaaagtttcctgggaatctcaaaactttgtttactataaaaagccgtaccttacgtatggcccatggtacggcttatggttttaccatattaactgcaatcctatttaatggctcacttaccaaacaactcttgaaatgtaaagtagaaaccaccaaatggggggagggggagtggagagggagagggnnnnnnnnnnnnnnnnnnnnnnnnnnnnnnnnnnnnnnnnnnnnntttaagcaggactatctttttataaggacataaattccttaaataacgaagttcttaagttgtatttcagggactgcctccagaatcctctcgggagtaggctggagccagcttcatacaaatgggtttgtgctgaagtcagtctgtccagtcatgacctgttgatgtcatgagctcagaatccccaagctcccagtgcagcccatgacaacttcccctagagaatctggcccagaaagctgtgtggtgcccgtttctgtgaacatgggctgtccttttccatcactttcttcctctacaatgctcatgtgtaaaccaggcttgtcccaagattcttttctgtggtgcagtcaggaatctgacttcacattaggtgtctcgaaggaactctgtgtctctggccctgcccacattgctgctgatagaacagggtcaaggaagaaattctcagatactgtctcagtacattcctgctgaagagcaggaggcgatgcctggtttcttcatgttctaaccgaagatgttgaatctctgccactgtttttgatatgtaatctctggtgcaccagtatgtcttttgttctgacattttccaagtctttgtttatgtttcatctgaccctggtgtctagcctggaactcacagtttcttgttggatgttgcctcgcaatatagaattgcttataacacttttaaaacattttatttttatttatatgtgggttcctgcatgtatgaatgtatgtacaggtgtctgggggccagaggttttagatcatgtggatctgatgttacaggacattgtaaactgcctgatgcggatgttaaaaaccactgagctatctctccagctctaggatgtaactttctattaagacacaatagcagggactggggaaatggctaagtggctaagttcactagctatttttctagaagacctgggttcaattcccagtacttacatggtggatgacaactgtctgtaactcaagatacagggatccagtgatcttttgtagcctcctcaggctccaggcatgcacatggtgcatagacaagtgcaggaaaaactcctgagcacaaaaaataattaaaaaaattttaaagtgtgtgtgtgtgtgtgtgtgtgtgtgtgtgtatgtgtctctgtgtgtgtgtgtgtctgtgtgtgtgtctgtatgtgtgtgtgtgtattgccatgtccctccactgtgatatcagagcacattgactttcctgcacattagcatcttcaccaacagggaagttccctgagccagtggtcaaagttttaattggacatgactgattaaactattaacttgttattgtagcattgaatttaatatccagactcctttccttcccaagaggtgaagctggctccaatctcagccctctaaatcatgtggtctttctggtgaccagctctcttcctgaaactgtcaaaggaccatgatgagtcacctcagactcagaacaaaggcactccaaccactcaggaaattccaagggtttttgaaactctttgccaagaaccaggacagagccgaatatattctcatcaaaccaccttgcgactcgcattgaagagctgggtttctgaaaccttacctgcctttatttctttaatgaaattgtaacgacacaaactgcagtctcttaaagccaaaacttagaagctttgactgtaagttatatctatagtcactaggaaactaggaaactaggtgaatataatgaagactggagaaacgagacattctgaacatgccagtcatgtagcagacatgaagaacctgcctttgctgtgggcgatgtagctcagtgatcaagtgcttgcctgcagtgcagaaggccctggctctgccccctaaaaccataagaacggggtatgggggagaggggggatccttaatggtggaaatgttgtggaatgctgcaagcagcaatctgcagatggatcaaattcaccagtgatcatgtgttcctggggacagtcagagcgtggctgcccttccctgcctgaccactcccttctttttggggactttgctgtttgacagatggggacacttgatctcatttctgtagctcctccagttgagagacagttgtgtgtgggattacaaggaaggtgcagagtgccaggatgagagaatctgtgatggtacttttataagtaatgaaagatatcgtaagtggtttaagccctgtaaaaaggaggtgagacccttcagaagagacccatcagcagccatgatgaggtcctgaaaacagagagaaagacttaccacctaaaggagagctccattaggacaagtactcaaagagaacatgacaggagtcctgaggagaggcttggtgtgggagagaagctcagagctccatccacgtcttatttcaaggttgtcttgggcctgggtcataactgtaaggagaagggagaatgccaggtcacagcaggtggagtttgaggagtcctgggggccctaactgcccatttcttacttggttggagacatcccagtcctctctccttcctggtgtgttcactcttcctgaccttgcaggttgccacatgggcgggagtcacagctgtattcaggagtgtggagaagctggactctgcctccgccttccctctcgtctcccacatctcaatgatagatctggctttgaaaatcactttgtaccccaagtcaaatgaggagcctgttgtagttaaggttcctcttgctgtggtcaggggccttgactgaggtcaacttgagaagggagggatttacttcactgtacacctcaggtaatagcacattgtgaagggcctggaggcaggagctgaagcagaagccatgaaggagtactatttacttgtttgcctgccttcttatggcacataggaccaccaagctaggggtggttctgcctgcagggagctggaccctctcacataaccaccaatcatgaaaatgccctcacaggcttacccacaggctagtctgtctttgcagagccatcttcttactggatactagtcatactggatcagaggcccatgcctgtgcagcatgacttcatcccaaccattgacatagggagtgagctagatccaatcacagttacattctttgggctgctggttaggtctttggcataggagaggcatgatctcatgccacctgcctcatgtgactctattttagttcagggcctctagtaggacacttcctttggttttaaaaggccacttctttcttgaagaattgaacaaaaagtcttaacacttcaagtttgggctgctttggtttttgcagcctgctccatttccctttgtatcataaagcttcctgacccaggacagcaacttgacattgagcacagagagtaatcatttctcccaggctctctgaaagcccttgagtcctcgagttttctctggggcttaatttttttggatctggcttttatggggctttatgaagtgatgcgtgatatggcttcacctcaccttcggaatgtgctcacggcggcggccattttttctctggagcatttggctctaaatatgctttgtgtcaacagagctggcacccgatgtttctcttttattcaccctttgaacaaagagcttcaatttattgcaggtctggtgcacagtccatgaaggaatagatgcagccgtgtttagagagaccaagggaacagcagacagttaccctgagggtaacgtggccgtgtcagtggcttcagggcacccaccatgctctgtggctacccaaaggatggctttaggaagtgagaaaaattctactggcataaggtagatttaaaggccatattagtctagactagtaagttgaacagcaggagggactatctggttgtatcaacttaggcaagcttcttttttattatttttatttttgtttgtttatttatttatttattttttatttttcaagacaggggtttctctgtgtagccctggctgtcctggaactcactctgtagaccaggctggcctcgaactcagaaatttgcctgcctctgcctcccgagtgctgggattaaaggcgtgcgccaccaccgcccggtttaggcaaggttcttaagcatctctctggctatccaggctcagggtttacaagcctgctttttgtgtttatcatggagattgaaagtgttcctagcaaagctctagacacacaacaactaaccacccttattacaaagaattcctgtttgttttcttacttcttctcattactttacttcccggtgggtttcaccatcctttttcttttgggagcatttaaaggtcaagtttgagaaaagggaagaaactaaatatacacaagacagtaggtggaatgctgaccaagcatgattttgaaagtggttttagccaaatgtccatggaggttccccattggcactgactgcggtactagggaaaggacctcaactaagaatcaataaatgggccaggcagtggtggtgtatacctttaatcccagcacttggaaggcagaggcaggcaaatttctgagttcgaggccagcctggtctacaaagtgagttccaggacagccagggctacacagagaaaccctgtcttgaaaaaccaaaagaataaaaaccaaccaaacaaacaaacaaaaagaatcaataaatggatcttgtctgacaaaaccggaaggctgcaatgaaacaggcaatccaaagagctttggctgtaactatcaacattcctaaaacaacacctcataactgagttccttagcttccacccgtgcagtagtcaggtcttgcttgctggctttattctagttttctaggggaccaagaatgaagtgcagtgttggttatgccacttggtgatccattcaaaccactgagggtctcatgaagccagacgctgagtcccaccccatcattgtggactctatgaaagagggctatggcttgaggatttacgcctctggaaattccaggggattcctatggagtgatccaggaagccattttgagaaccattgaggtagagttccctaacctccagccctggcaaggtgatgaggtgtagaacatgggcctcttgttcacatggaggtggccttaagtctaggcaccttcctgaccaacaaagttctgttagacaaaccatctctctgggactgaacacacccttgttctgttatttttaaatatgtgtaggtaggcatgtgtcagcatgcaggcatagagatttgagtgtgggtacctctggaagccaatgacactggatcctgtgcaactatagagtttcagatggttgtgagactcctgattatgcactgggaactgaacttgagtcctctggaacagcaagtgctcttaacagctgagctgtgtctccaactcctttgaatctacctcattaagatcactgaagaaatctaagatgtttgtatgatcttttgttcattatctagtatgcattaaacaatatgagtctggttatttattttaaaatcacttttgataaattatatagatatggcctggatagccaagtcttaccaagtatatcctgtaatattgttcatattaagtggctaaaacatgtttcagtatttcactagaattcaacttcagaattcccttgttctgggccgggctttggctcagtggtagaacactcagttgtcatgtatggggccctggggtttgaatcctgcacagcaaaataaacaactaaataaaaaccaggttcccacggcttctttcaagttgataggtatgtgtgcattttggagaaggagagagggaaggaaaggaagatgaacccttttattatgtaagttgtttctcccatctaacccttcacctgaaaaaaagagttgcatgatgagttaggaattttatcttcatctagttttgtaagttggaattttaatagattttgatttgtaggtggtagagagcaggccagaggtcacagagagtgtaaaccctgaatctttataagacatgaacattaaggacccaccgtattgtcttcttgtattcagaagaagccatgttaagtaacctcgtggtatagaatcacacaaattgaacttcataagaatgtagaacctagttcctggttcctaaaaataaaattcagtatatctgaaatagatccaggacatggtcacatgcattctaaagtgtcgcttcaggagatactaaggcatgattccagaaatgcaggggtgatttagagcagcacagactgcattcaaaggcagatctgtggctcagctagctgagtggatgaaagtttacacagagtcaatctgcagactgcagtaggttgtagttaacatatgcaaggtgcctagcatgggggcacctaatgggtccttccagagcatcaaatggcgggggtaggtggataagggaagggtgagaactcagaggtgggagtggatagtaatgaagtcagttgtctctgccagtttataaagcttattaagccttgaactccaaagaattatgttaaagcgactgattaagtcacttccattgtctttagacctggcacattctagcttgttagttttcattttttcctttggagtgctttaaacaatgtttgacaacattgaaacaaattgttccatctcatctattgagtcagcagactctcgtctctaccgtgccagtacattaattttccattcactttaatgtgacaagataatgtcctttcatgaaaatagacacttcagaagagcgtagatgtgaccatattaattcacaacaacaccatcaataccattcaataacagggtagaaagtccccgtttaaaaagagaatgtcagatgttactgggatttggtgcagatttttatttgaaaggtcagaatatactatatgaggacatggtgactttgaagatcttcaacatccttttggctgtcatgtagttcttcagcaatttcagaatattttattcttttgcaatatggtctttcttagctcactgtcgtgtttctaatttaagtgcttaaaattagtaatgtagctatttaaaaaaatatatactctatgctattcttgaagctccaagatgtcagcagagttctcagacaagaatcttggggcaaccatcacatgtccatcaagcagaacataaaagacaacagtcttgatagcatttttgtttattaattctttagagtagggttccccaagcacagtggtcaacatcagtttacacatcccagcatctccagtccacagctgctcacatcctcaatgtgagatgtgattggcagcttactcagaagcctcactggggaatacggtggatgaagagaatttaagtttcttatattttatatctatatgtaggaactttaaatcctgcagtcttcagagtctctgatgttgaaacagctcattgccctagaggaacaatgttttatatgtgcagtttgtcccaccttgggggcctctttctacgtgtagtacaagtatgtctagggatgggagatcttgcactatgccaggaacagcaagaacccgggctgccacaggtctcgcccatgcttatgccctactggactgggaagatggctcagcagttaagagcacttgctgcttttccagagggcttggaagttctgctctgtgctcctaacaacttaaaaagcttttgctccaggtatttagtatgcaaattcagagcctcagggatcctttctggaactgtgccagtgcactgagctcagacaggatcctctgagcatgctgcctgtgggctgtatgcaagcctggttcagtgagccctcatttagtcacacacagagtcgacagaaggcagtggaattaaaaaaaaaaaaaaaacataaacacctttatacaatttcatcaatgaccatgtgagatacacatttagtctatacgtaactctagtataaataaaaatgtggctttgaactagcagaactttccttctaggttggacctcgaggaaccataaaagattatccaggctttagcccgtcggtggatgccgaagctatccggaaagcgatcagaggacttggtgagtggagcttttcagctcctcctgtatggctggtaagaccagccaggaaagttcccgtctaaaaagccggttggcccaatttggatcctgaattagagaagttgtcaggagatattttaaagtgtgaagcaatgaagaagagcatgagagctgagtctctcagtacataaagcatttgtaatgtttgctcgattaaatcctaccagcaccacaacagctccttcaactgcttatcaccatcatgatcacaaaccatgatggattcggtccagaacagtcttcccaggttctatttcaccccattacctagagaaaatcatctttctaaattagactttacacttccagtaccacagctacatgcctaagtacgtactagtttctatagtttcaaccggtaaaaccagagaagtgcaccatccgttctttgaccgactgtttttacctctttttttttttttttaagatttatttatttatttatttatttatttattatatgtaagtacactgtagctgtcttcagacgcaccagaagagggcatcagatctctgttacaggtggttgtgagccatcatgtggttgctgggatttgaacttcggacctttggaagagcagtcgggtgctcttaccccctgagccatctcaccagcccctgtttttacctcttaacgtaatgtttttgagatttattcatgttgataagtttggctctgggtcattaattttaacttcacagtagtctattgtatattatatcataaactggaaatgttgatgaaacattcaaattgcctataactcttttctattacagtgcaaaagtccttggtgaatgctcccgcttagacttcactgtgcacagttgctagtatttctctaggacaggacaggagttgtgagttctgggtggagatggccagaattcttatttttaaactagaaattttgccaaatcgctctctggcgtgattatcaaaattagtagtactcttgggcctggagataaacttttctaagtaaaatctcaagccacagaaacatcctcctccgcttagtccatctcctggacaatgtttgcatctcccctcccccaccctacccctgccacaggaaagtatcatgctaacattttaacactatcacccagttttaacattaacaaaaacaagcttagtaatattttccctaggattcacatctactgtaccattttaatcgtaaagtcataaagcccttctgcatttccctcccaggtttagaagtcctgcttttttcctgtttacttgatcatcagtctacaaggggttgacatatgggaggagcacttagagatatccacctatttgatctctaatgaacatttaattgtctcagcacagttcttcatgttcctttccgtctgcataggaaagagtagacatggattgacttgactgggttttatttttccagccctcaaatcacctaaataaacttccttttcaaaaaacaaacaaacaaacaaacaaaccaatcaaacaaacaaacaaactgcaaacactcagattctaacccagcaagaagctggaaacttaaaacttaaaaagctttcctgactgagcttgttttggccccctgaatctgttgtttgaaacagataaggagaatccttggctcataaaataactttgttctcatttagggactgatgagaaaaccctcatcaacattctgacggagcggtcgaacgcgcagcgacagctgattgccaagcagtaccaagcagcgtatgaacaggtaccatccatgaacacagcgggccacagagacagtcacgctgtgctccggttccacccctgagcaccactcacagatctttggctttaccccgagtgtggtagagttgccctgtgcatctgctcaagagccaggactcttagttcaggttttggctttcaccacctcaatggtttggggcttctgcttcttcactgtggaatgaagaatggtgacttagagcagtagtttagagcagggtcaccaccctgttgaggttaaatgacccatccataggggctgcatatcagatatttacattatgattcataacagtagtaaaattgcaggtataaagtagcagtgaaataattttatagttggggtcaccacgacatgaggaactgtcttaaaggatcgcagcattaggaaggttgagaaccactgcgctagagcaatggctctagagtccagagcacacttgacacaaagggagactaaccttttctttttctgagacagggtctcatgtagcacagactggcctagaactcacaaagtggctgaaggtgattttgaacttccccctacccccatccccgtgttcaacctctaagtgtggggattatagccaggagtcactaggcctgcattatatggtactgaggaacaaactcaggtctttgtgaatgctagacaggtactctaccaactgagacatgcccctagtctcaagagagacactttgatgacctcaagtcagactgtgggtagagggtgatcctgacttccagtgtgtagaggttgaagatactgttaagtatcatgtgatatgaaggacagtcctcccaacaaagaatgatctgccagctatctgagaaaagcagcctttagcttcccttttaatgctaaaatagttatgtaaatataggctcagaaaacccaacataagaaaacccattaagtgtcagaaaatagctacatacatatccaaaaatagctacacacgaacaagactgtcattgacacacaatgtttgtcatctctttgttgaatagtgttctctgctggagactggagattcgctggtaagagaggcagttcctcccatcacctgtggggctagcctagcctcctatcagaaacataataagttcagtcactgcaagtggagcatgaaagtggggtgatgtggtggaaggtaaccagtgatggggactctctgaccgtggtgagggggtgatatcagcagggtgctgctgcctgacgggctgctagaagagtcaatgttgtgtctgacctgctccatctgcagatgcacagggcaagcagtggggagaacaaatgtaagggtcctgggagcaggcagctggaagtctgggggagacagaaccccgatatagccggagtgtggcattgatgtgacagagcatgtgtgtggctgtgtaatgctagagctttttagaaaatatttcaggtgccaccatgtttctcagcctagctcaaatgattgtcccaccctaggctcccaagcagctagaaataatatacaagggtgcatcacagtgcctgactactaacatttttatctgtgggttttggcatgggattttgccatactgccaatctgcttttgagctcccctattcaaatgatcctactaactcagcatctctcccagtgctgggactacagatgcatgcacgttacagggctgagcttgagcgctgtgttagcagttctcaacctgtgggtcgtgaccccctaggcaaacctccaactccaaaatatttacatcacaattcataactgtagtaacattacagttatgacgtagcggtgaagcaattctatggttggaggtcaccacaggatgaggacctgtgttcaagagtctcagccttagcaagggtgaggaccactgctttatgcctcgtgcacgggctggattttattctacagtagggactcattggaagtgtgtaagcaggggaaataatagcatccagttttgaacactgaaagatcatttgggagcctggagatttagcttaatggcagagtacttagctaccatttctagggctctgtgctccatctccagcacaacaaagaagatagaaagattattttggatgctgtgggtcacgaaggaaggagggagggccagcaggtaacagcagagtcagttcagacatcacccctgagagtgttctcagtacctcaggcactcaaactcctgtatcacacactcaacatactgtacaataaaatcgtactttatctattaatgccttaattttcttattaggctgaacatcgtaggcataagcattgtatcacagctacctttaaatgtctagcattgattaggcaccctgaagcatgtactgaaatgaatgaattgccaagcatctgggccagaacccctcccatacatgtaggtgacatggacggtccgttggctttttagagcactgtaaagtgtggaggaagaactagtagaggcaaagggcaaacagccatttctcactgtgtgacagaatgagagcatgtaaaataagatttctttgccattgtgttgagaacaggtggcagcagaatgttgcatttaaacatgaaaaaaaaaaaaaaaaacccacccgctgcagttcaagcccagaaagtgatacatggctccatctcatgacgcactgtgtccctggtgggtggtgatggtgatcgtctgtatcatcagaactgccagaaaggtgccagcctctctaccaggcctgaaaataaaacagttccatagaacttctttgattattggaaatagaaaccacgtccctgccattaggtgagagaggtagacttcctatgtaatgcgtgggaaacagtcccaaaggacatggtcctgcctgggatgtctaggatccactgaaagagactgaccagctgttgtcctcccttctctctggaggccagtggagtctctgagatgcaaggcactttaacaacaagaccctgtcccttcctcccctacccaacccaagcatcgagagcaccaattacattcgttctgtttgtctgtttatcagttgttattttaattgtgcatatttgtaggtatggtgtgacaatttggtatgtgtgtacaatgtgtaatgagcagggtcctcggaggaatggcattctggtccacttctaaagcttcctttgggctttgcagaggtctctgtaaggcggggcattgtggaaatttcataaaatgaagatcaatatccactgagatattctcagcattcccgctattccctgtgggtgaacgccctttcatctcatctttatccttgcgtttctctttccctgggcagctgctgagaaagagaagagagacacgaagtttcatgatttcctccttgcggttttttattttaggagctgaaagatgacttgaagggtgatctctctggccacttcgagcacgtcatggtggctcttgttactgcaccagccctgtttgatgcgaagcaactgaagaaatccatgaaggtaagctcttcatgtccccagattccactgtcaattaggggcctctcgggacactcccttcagatttgctggggtcggatgccatttttattgtcctcttaaaaggatggggcgatcctgaggagctctgtgtaactggtagcccagatgtccctgggctgcacggatggtcacgtttttctgtttttggactaccctgtctctctttcctttctttgattaaatgaaaatgccatcatccatccattacttaggccctataccttgtattaatttcaaccccttgttttcttttacccttcagaacccccaaacctttcaccaaatctgtacactctgctctatagtctattggatcaagcacatctcagagaactgcagaatgcaagctgatatctctacccattggcttccgctctatggcagccacccgcatcttttggttgcactgaatcagtaccctaagcaggtcccttcatctccatttctgcccattctggaactattctctctgggatgtccaaaattacttttataaagatgttttctttttctcttcttcttcttcttctttttttttttattaggtattttcctcgtttacattttcaatgctatccccaaaggtccccaatacccaccccccaatccaatacccacccactccccctttttggccctggcgttcccctgtactggggcatataaagtttgcaagtccaatgggcctctatttgcagtgatggccgactaggccatcttttgatacatatgcagctaaagacaagagctctcgggtactggttagttcatattgttgttccacctatagggttgcagttccctttagctccttgggtaatttctctagctcctccattgggggccgtgtgacccatccaatagctgactgtgatcatccacttctgtgtttgctaggccccggcatagtctcacaagagaaagctatatctgggtcctttcagcaaaatcttgctagtgtatgcaatggtgtcagcatttggaagctgattatgggatggatccctggatatggcaatcactagatggtccatcatttcgtcacagctccaaattttgtctctgcaactccttccatgggtgttttgttcccatttctaagaaagggtaaagtgtccacactttggtcttcgttctttataaagatgttttcaaggaaggtgatgtgattcacctccctaaatctccagtgaacacttaaacccccgaatcctcatcaccttcatcacccaatagagtgtggtccatgactgtctatgctttttttctttaaaattttccagccataattccccagagaaatggggctattaggcagaacatatatattaagaaatttactgtaaggagctgggtatgccttgtgggtctgggtgataagcacacaacggcaggacaggtggtcagggaagacaggagccaccagcagtctctgaagctgctgcccacaggcacatactcttcattagagaagcctggcctttgctcttatggcctttcaagagaatgaaacaggcacaaattgagtgcagagtatcaaaagagttaacttaaagtcagttggtaatggacctattcataatggaccttcacacacaggtcagcatcggacaggatgaccggggactgtagcctgaccaagctgacacacagagctgagcatcacacccctcccttcccatccccattcactggactttgcttcgctggcctcttctctgtctcctgagcattctgagcgaccttgttttggaatcctcatccatgatgttccatctcgacccctcctctgcagacattacacattcatatgctcaactttactgttattgtctttttgtgccgttttaacaattttgtgtttatgatgagtttaccctgtgacaggaggtttttttggatttttttttctgggatgtccttttcttctgtgcagcttcctcttcttgcataggagcaggttgctcattttcagtgagggtcatctcaatgcaaggtggctcacatatacgctaacctgaccctgtgaactctgggagcatggggactctggtgcttcgttcagctggatatgctgaatgatcggaggagtgacacttagaatttgaatctcagcatacactctgtatcttttgggccaccgagcttgtatctcaattctcttcttcctggacacacctgtctcagttcgaataatgtagcaatgggatagctcccttaaaaaacaaaacacacacacacacacacacacacaaacaaacaaacaaacaaacaagacaaagcaaagcaaggtctcactttgtaggccaggtggccttgaattcatactcctcctgcctccaactgttggaatcgcaagcatccagctagagcacacctgtcacttcttcaaagcagcatctcccacacacttagaaggcagatgtgcacctggtggcccaggtagtgacaggtagcctttaagatttgaacctctttctcaactttgattctgtgggagttttctgaagtgagtgaacaatgagtcaggcacgcctgcctgttgccaggtaactgtggggcggagcctagacaaatgctgacatcccagagtattagaaaatgttctctttggttaagaagaaatccacagtaaggataccagactgagaatggtgatagcctcattaacagggaccctttggtcttaggctctcccatcttagctaaagttgtcagcactggtacagtgagtttgtctctacactgatttggctcctggcagatcacacatatatacttgctcaggagcgatctttggatcaaagaatgaaagacacacatgttagcttatttttaaaaatgccatggctacctcacagtctggtcactcctaaactttctcctgctacctcaggcccaaatcaggaagtggccaatggcccctcacctgaaatctcacatggttcagtggctctctctcctcttctacccccctttccattctggctaccccaccgtgtccactcaactctaaggggtctgtcccatcttttttgtttagccattagccactggcatctttattgatcggtcagaaaaccagttgggggcaaggacctttagcatttggacacacagattcctgattgaatcaaagcattagaaccaatccccaatacaatgcgagtcatctaaaaagcacaaaggataaagagggttttacagcctctctataagggcatgcctagaatgtgtctgcctatgattattctgcacatatccattggttagaatttagttggatggatgagttcagtggcaggcatcccagccacaattgaatctgtttataagtttcattggccttatttgatcaagttctactgcaaatagcttcacaaggtgagttagtgaccttgatataaatgaggtttagaggtagctgggctccaagccagcaagtcccacgacaacatttactgaagagttgaaaacctctgtgtatgagaaggctgctgaccaaccctgcccaggggtacaaggatgaacgcatccaaaattgctgcagagccctttctaaacagagtgctacatcagtttcctgggctaatcctcttagaccatcacttccgatctttaatgacataggcaattttcccttatactcttcctccctagaattatttttgactactttcacagtagaatggagtagtttctttaaaaacctgatgtcagtttactccagatgactttttattttaacactaaaatgcacggaaaatcagaaacctagtgtcgagcaatatgaggtcctacactgatttacttagagctgttctttcatctgtacaaaatgagatattaagcctgaaaagcatgaaattaattttttaagtgccctaaagataagatttctttttcctttgttagggaactggcacagatgaagatgccctgattgaaatcctaacaaccaggtcaagcaggcagatgaaggaaatctcgcaggcctattatacaggtaaccttgttttcttctatcctttaccactgatcacgtgtgtgagccaagttgtttctcctagcatcttgcctatcatgagcatcttatgagggcaggaagtagggaaagaaagatgcatcctacaatgaactgtgcatgttcagggcaagttagaatgtgatctgccacataacaatggtgttgctatcttgcctttatagcacccttgattcagagggctctgccctcaacattcacttaattgaatcagccattctcatcaatatcagagtttcaaatcattgtgcacttctatcataagttaaaaaccactcagattcatgattttgggtgtgggaagtttggtaagccattttagagctgatgtctgttagctgtgtaaaaaattagaacgtcctcactatgtaattcagaccatgctcaggggtggtatgaactcataggtgaccctcagccactacacttcaggctcagacatgagcacagatattcccaggcctcctatacctctaaccaattgcctgtaactcaggatcctcactgcacactcaggctcagtagctcagtagatggctaacagaagtcacgaaagtacagtactcccaatgacagttttgttataaaggaagtgactcgtggacagccaaatgacaacacacagaggtggggggtgcagggatcagggcgtctgagagctccaacctgaagcttctaccccaatggtacattaatgagcgatcgcatgtcaccatgttcacttgaatgtcagtagcctctgtttctaatcaggttttgtcactgagatacgattgattgattgattgagtcactattcgtgtgattgagctcatctcatagcctgtcctcggaggttggtatgactatgtcacaggactcaaagcttaactctctaacctcagggctggtctgtctaatcttactgctttctattcttggtcatcttgttagaaaaactcagaagaatactgtgaataagggactcaaatatcagacagagagagattggagtccaagggtttgtcccaagaaccaaggactaagtatcaactcaattctgaattacacaacacccaaaaagttctctaaggacctcgacagtgccatgttttctaaatttgcatttccaggaggtctacttgtgctgtgaaaacccacggaaatgggaatcctgggccccagatgggtataagaaaggttatttttagaaattctcattaaatgatagatacctaaataataggtgactaatttgttactgatgtatgaattagggaccagtcagaaaaaccacaaacaatacaaaacgatactaggcattttaacagagagagtttaatagagataactgcatcaataattttggaaaatagaaaaagaacagaaatggaagatagatgataatacaccaactatttccaaaattaagaactcaatggcacagaagttagggttatttggaactgtaagctcaggaggcggaaactacctgcccagtgttggttcaccagggactctaaggaagcacttgggattctaaggagaaggagtttgcttatctggagctggcacctctatcgttttggtaaggagcttgctgcagaggccacggctgcctctcagggtggaatatacagcaaagacaggaggtcacatgcacttcttttctagtacgttcctagctggcagtgagtggagaacactgggccgggagaggaaagaagtagatgtgaaaactggttaataaaaggcacaggtaaagccgggcaatggtggcgcatgcctttaacccctagcactcgggaggcagaggcaggcggatttctgcgttcaaggccagcctggtctacagagtgagttccaggaacagtcagggctacacagagaaaccctgtctcgaaaaaacaacaataacaaaaaacaacaacaacaacaaaaacaaaaacaaaaaaggcacaggtggatagagaatgagtgtttagaatatttgattcaagtcttctgggacttgcaagatgacttcagtgggtaaaggcacattccttcaagcctagaaatatggtttacattctagggacccacgtggtagcaaaagaggactgactccaaaagttgtccttagaccccaacacaggggctataacatgcacaaacagatgtccactgtaatgtgaaattgtgacctatacataagagtctatcaaaggaggccatcaatttggccttcataaaagccgtcccatttatgcagtgacacaatagtctaaataaacaactgggaactaagcttttcccaggattctaaggttactgctgtgtgtgaaagaatgccaaatcagggatcatgaactcctaagtcctggttcaggctccttcctattgcaacaccaacctcattcctttaccctgatatgcttcaaaatgcacaaggcacttgtcaatcatttggaatcatttctgcctatttcctctttgctataattattggtacatattggttgcacatcttaatgagtttcattgacatgattgcatacatgcatgtgttggcatgtttgcatatatgtgtgtgttaggcaggaatcctgtccttctactatatgcattttcaatttttaatagtccagcttcctgcaaaatatgtggtgaagaaggaagccagagaagactgcgtggcatgaatatttagtcttatctagataattctaaaattaccaaacacttttgacttgtttttagattaaaattccttctctaaatagagtgtagggtgggacaacaatattaagactggtaggcataaattatcaccattgagataaataatttatatctctgatgtcttttatttgtcttaatttcttgaagaatgatcgatttcattaaagagagtcattaaattgtgctgaggatatttttgctgtgctgtgatctatcgctttctgtaattgtcttctattgatttaaagatggttatccacgtggacagatgacgttattgaaagggcatagatgggattactattaacacctggtgttgcctccatccagatgtgtattaccagcaagggaattaccactccaaaggaacagaacagaaaagttaaattgtgggcaggacaggaactgtgctcaggacccggcctcaatccccaacactacaaactagtaagaataaatatcaaagccggagaaatgcctcagagtttgagagaatttgcagctcttacaggggacccaggctcagtcctcagcacccacatggtggatcagaaaaatgtaacttcacttccatagaggcctgatccctcttctgactgctgtcagccccaggcatgtacaaagtatatttacatgcatgcaggcaaaacactcacacacatgaaagaaaataaataaatctttacaaataaaaatacaagtaaaaagtgaccacagtttgcaccccacttgtcatgcaaaagggactacaactagtatatactagtgtatactagtgtatttgtatactagtatagcatataatatattagtgtgtactatagtatatagtattctagtatagtgtatactagcatatgtgaacacaaagctggtattggttacttttttatttctttcttatttttgagcaatattaatataatctagaagtatttcttaagatgatttcttaagatgaaagttagattcaataaaactgaacaatagcgtgcttacacattatcaatctttagttctcttatatgcagaggttgacagattgacgattctatgtctatagtatctcaaaactttcagtgactcaggccccatccttcacagtgatggacagggtcaaagcattgggcctcaaaccacagagaggcaaaggataggacaacgatggctatggcttgtccctttaaatagacttcccagaaaatcactcacacctgcctacaggtgatccagaacttaataactgggctgcacctagcttacaggacaccaagaagccagcttctggctgtttgatttacctctgctgaaggttaggactctccatgtgaaggaagagtaaatgtggaaacctaaagccaactggtagattcctgacctgggtattcctagccattgtcacataaagtgaaccacaattctatccagaaccacggttcttcctgttgtttgcctctcaccacacccagagcaacgcctccatcccacacctccatcccacacctccatcccacacctccatcccacacctccatcccacactagcagagcatcaggaagttaagcagaagggacactcggtcgctgccctctgctctgcggtggtctgttttagttcctcactacttaatcccgttcttatttggtttcagtgtataagaagagcctcggggatgacattagctctgagacgtctggagacttccggaaagctctgctgactctggcagatgtaaggtttgactgtttattctctgcttcccctcgcattcagggagttcacagaacctaggaccatgagatttttcactttctgtgaaacgattcatgcacatgacatttgctttgccatgatctataaaacatttatccaagatcacagaagcatatgtggcgatctaaccacaacaaaatgccttggttggctcagatcggtctacagattacaagtgtttccattgagattcacagtgtgcagttctgatgcaccgcccacctaagctcaaagttgctcattttccgccatgtttgcatctttagaacatacagaattcttctgggttgcaaagaatatccatttgtttaagttaagtgagaagaagacataagacttccataagaactaggtagtaaagccaggaaaataaatgatctgtttcaggactttgtccccaatacctcggaagtgatcctatgtgagcacatgaggccactgctcaccttacttggaaggcttatgatttaggtaacctcaggagaccaggcagggagctgcatcaggtaaagacacttgccattatctctggcaaacagggtccaattcctcgaacccacagaaaagtggagagagagagagagagagagagagaggagagagagagagagtgattcgcctccatagggtactcctctgaccttcacacttgcactgtggtgctcccaccaagcatatacatattaatgtgtaataaataatacgtattttttttaagatgctaactttggggctggagaagtggcttagcagttaagtggctgctcttcagagagcaaaggtcggagtgtcaccctcacgtgttggctcacaatctctcttcagccatgtgtgtatgggtatcaggcacacatacacacatgcacacaaagtacccacacacattaaaaaaaaaaaaaaccaaggtggtaaagtcaaggataagatttattcgcaggcttgagtaagagaggacatgattaaagccccatctcgttgacttcttgcagctgatttacacagctcctgatgtgtggggaaatcccaaggggcacagcatgtcagctgaggcagctcttgaaaagtgaggctttaggcttcaggtgctttaactgctgaaaacctcaggaaggttgaagctacaaacccaaggcagcggcagacgtggcctcctcgatgtgtgtcctggtgcgcatcctcatgtgtttgacgtgggctcacccactgtacgcaggaagaataacgccccagggctggttttggatcaagcagaactggaccctcctgctgcctcatggtttcctgtatctgaacaactaactttaagctttcaggaatccgtgctcatacctgtgacgctgcactttagatagatattaaccccttgaggtgttgtgaagagtaggagagaatgagaggtgctggttgcatggaaatcagtactttggggttcactcgagtcttctatggattttaacagatctatgaatggaccttccattacagtttcatgcagaatagttccacttctctaggaagtctgtcttctgcctatatatatcactctttttctctccctcagaaaccatccttatcaatctacttctagtttgcctcttgtgtagtgttcagtagttgaagtcactcaccatgcagccctttcagacccgctttcagtatttacccatctgctgttctgtgtggtcaggatactatcttttgatagtgacactttagggtttttgtctgtttgtctccctgtttgtttgtttgaatgagtgagtttcttagagtgaacaaaagtaaaaagcagttgcagaaggataaaacagctctatcaaatggggccactggcaggatccagcacaaaccactgcagtatcccagttgaaagagtaacaaaaggtagcaacatcaaatcggtgattgcaaagatccagtagtggttccatggggaaagacagttgaacagaacttgcccagtggagctctggaatgagaggcataggtgagtagagtgtgcctgccggctaagctaagcatagcgtgcctgctggtgaggtttccaagtaaaagaaccatcagtgagtagcaaagataagagaacatcctcaaaccaacacttacaaccatctatcagaaatgactggatgccctgctcagttcagggcagggcagtattctttctacagtgagcttctgccttctctttccctccataggcattgtgatattatgatattataatattataatatgattaacaattgtcactgcagatggtgataagtttacttcttagctgttttcaaggacagcatgtcttatcacacttagctgcttgctgtttttctctcagttaccaagtcagggggtcagcctgacccaggacaggggcatttggaggacacgtgacataaacatgcctgagcctgaacttggagggtcagtcctgtttccagagtcaactgcttagtgatatcaaaaacatatgtcattttaccaacataatggatattgtgtatgcctgtgatgtttctctatattctttttcacaactaactggtcagctggtgccttttttttttttactgaataatattttgttatataaactgttttataagttgaagggcatcttggttgcttcaaagctttgtcagttataaataaaattcagttaaatatttatgtgcaaggctgtgtatggacatgtgcccatcttgcttaggtaagtgtcaaagagcagaattgctggattacactgtaagaatagacctagcaatataaggaactcctggaaggtccctgtaagtccatgtgccatgttacatccccatgagcaaagaaagcagagttcccgctgtttccactctttcccagcatttagagtcgtcagtggtttggagtttaatcctgttaacagatcctgccttgatttatagtccccagggacatgatgaaaaccatctttccatgttttctctatgtctaaacatcttctctggtgagatgtctccttagatcattttcttaaaactgggttgtttattatcttcttcctgggtcgcaaaatttctttatattttttgcttatttgtcttttatcaagcatgttttgtaaatactccttgtcttctcattgtaacacctttgagtttccagaggacctggagactgcagattgtgtaccctgctacactgactgactatcgatggcagagacagactcagaaccaagagagcctgatttttctctgctacatagtctgtatggaaaaccttccaagatgagctggtgggtggagaactgtgtccttgcagggctgaccttgattttctcattcctgctgctttagggtagaagagatgaaagcctcaaagtggatgaacatctggccaaaaaggatgctcaggtcagtaacagtcaggagaacagctcttttacacctaccaccaccaatggctctgccctggccctgtcctctcctgtcctgtctgaggcaaagcctggagacaagtgtcatccagctactgtagtgtcaagcatccaccattccctcctccaggtcctgtatttgaccttcagatttgaatggcctctaaaatcgaatgaaactcccacctcttctcattccatcccttcaaatagagaaagaattgcatttctgatgacacacagggatttttccatttgtcaacagatcctctataatgctggtgagaacaaatggggcacagacgaagacaaattcaccgaggtcttgtgtctacggagcttcccgcagctgaaactaagtatgtgtgacacaagtcttcttggctctgtgttgttttggcaaaggtctttgtagtttatgtagcaacatcttaggagaccaaatggagaagttggattttaactaggtagcactgacattctcttctgttttgccctaaagacttagcaggctacctaccctgtgcggcactctagatgagaacgaggaagacaggggcaatcctgtagagagcaggagctggttgccctgcttcaacccaagctctccttggctcaccaccttctgaaaaagtcaggcactgccttacctttccctggcattggtttgattgattgatctttgttgattgattaatgctgtgaacagtggcttctgtctgatatgaagggtaatgagggtgggggaagaaccagctcttctctgagacccctgactgagtcccacccagccgctcagtcaggagtctccctgagctcttctacaagtacccagagctccatgtcagtattctgacagtggctgccaggtgccagtttagacagcagctgcagtgcaggaccaaccttatgctgagctgagaaagcagaagggtgttgctgtgacttttcattttgaaatctgcctctttcacttggacagtgatttttatgtgtaatgtattagtgcttttctctaagtctttgcttgaaaacagagaggtagggtgatcccctgtataactttgccaattttccatgtttaaaaatgtgttggatggttcatgtctttactcctagcagaggcaggaggatatctgcaagttctatgccagctagggctacatgtgtgagaccgccatctcaaaacaaaagagcagcactaaaacctcattgaaagaaatgtacttggcttatgaaatcttgtacacgtgatgacataagtatactgatcaagacatattgatggcttctgtgaaatagtaggtgtgaagtgggccaccctgccttagagaatgacaccctctgcacaagaaaatccaaaccctcctagacagggttagtaacatcaggttggctcatcaggtcaaggcatttgccaccaagtctgaccgtctgagtttggtcctagaaacccacatggtggaaggagaaaactacctcctataagttgtcttctgacctttgtagatgcacacacatgcacacacacacacacacacacacacacacacacacatacaactatatatatataattaatattaaaaatgttttaagaaagctttccagttaccattctgcagcttctgaccagctagtaccgcattgcttcctagaactgctatacttttgcaatagatgagttatttgtcacagaacattataagctcttttaactgcttcagactggagagaggggaagggagatcactgaagaaatggcctaaggagttcagtcttcattgtgttcaacttttgatggctgctgaggttttgagcttgcccgttgatctgctacatcttacattttaaactgtgaaatatattctagtgtggccctctgggatgctttaaatatttttatggtgctattttttagcatttgatgagtacagaaatattagccagaaggacattgaggacagcattaaaggagaattatctggacattttgaagacctgctgctggccataggtaagcccttgagtgttaataagtggaactgtttgtacttctttgaagtccatgtcaaggtgagctaattataagaatctggactaatccatctctgctcctacagcctcctgcatggcacaaacagctgtctacacaaatactgttaaataatacacggagaagttatctacttttaagtttgtatttggcttgtcattgtgtttagattataccctctttgagagcagaaatattacagtctactggtattttttattgaaccttgttgaaactgagttttaatcaatttggtattccactgtactttgttatctctggaagatgtcaatggcctcccaaattggagccaatcagaactatagatcgcttcctctttagttgagtgattgatcaggtgggattcaggctgaatccatccccatatagacacataaattagttactggtcagcaatgctgttgtacaggcaatgaaggcttcacagtttgctcttccaggcactaagacagggcttcaaaaggaagatgagatcaaagcatgaggcacaactcaaagtcgggattcttgacctctttagtgaagagtcaaaaaatgcaagcatgtgtctctgtctttgcctgtctctctgtctctctcatacacattcacagagaggtggggatccagtctagttctttggagggacactggagaattgacttcagaattccattggggaatgcctagacagtgaacaccttgtcacctcaccagtgggaagtcctttccaatacccactgtcgtaattcatgccacctgcactaagatcacctcgggttgcctgtacaacagcattgctgaccagtaactaatttatgtgtctatatggggatggattcagcccgaatcccacctgatcaatcactcaactaaagaggatgcgatctatagttctgattggctccaatttgggaggccattgacatcttccagagataacaaagtacagtggaataccaaattaccctcagggtaatttcctcttcctaccagagattcattccccagatgctaattgccatctctgaagagtgactcctaattatggtgcctttacttttatgtttaagcaaattctttatgttgggcactgtgttcaacccttcacacacgtcaactcatctaaacctttgacaatccttcaaagcaggtgtagtagtaattttggctaaaccactctgtgctcctggcagatcacactcccagtcaccctccagattcctctgtgtaactgagccgtggttgtcctggacttgatttgcaaatgaaagatacacacacacacacacacacacacacttccatcctgtaatcctgacctaacaccctctaattttatattttatctttgttgccctatgtagtcaggtttctatttctgcacaaacatcatgaccaagaagcaagttggggaggaaagggtttattcagcttatacttccacattgttgttcatcaccaaaggaagtcaggactggaactcaaacaagttaggaagcaggacctgatgcagaggccatggagggatgttacttactggcttgcttcccctggcttgttctgcttgctttcttatagaactcaggactacctgcctagagatggcactacccacaatgggctaggccctcccaccccttgatcactaattgagaaaatgtcttacagctgtatctcatggaggcatttcctcaagggaggctcctttctctgttgtaactcctgcttgtgtcaagttgacacacaaaaccagccagttcattctattaccttctgagcagccacctagtctttgatgcccaagacacttctgggcagcccttctgggagctgcattccttcttacctacattttggatgattttccttttgtggctttaaatctgacctgtctgcctcagaatcctggtgattctccttgccctccttctagttcctagccagcacaaattcaaaggtaatgccttagtccacctacccagccattggccatttactctttattgatcaatcaaaaaccaattggggacaagggccttcagcgtttaaacacccagactcccaattttggttcaaagcattagaaccaatccccaacaagcaggttcatccccctggtgacacggtaaacctggggctcaggtggattaagtgacttccttggaccaagggcatctgagtttgtgagataagttgataaaggcatttggtcttaattttaatgcttgctcaagatcaggagcaaatcagagattaggaatctatagcaatttacaatttgatcaagacaataaagatggtaggaaataggcaattgtgaactgttggtaatggttataattgaggtggttcctcctccagtttcccttcctatgatgttgtatgcaaaagtaagttccttactactgagttactctactgcttcccttattttcagatacaaagaacaaaccttatacttgggaacataaagaaaaggtagggtaaaggaaaggaaggtgctgggcagtggtggcgcatgcctttaatccaagcacttgggaggcagaggcaggcagatttctgagtttgaggtcagcctggtctacagagtgacttccaggacagccagggctacacagagaaaccctgtctcaaataactaactaaataactaactaaggaaggaccctgattagaaggagtgtgtacgtctagttgtgggaaggaccatgattaggaggagtgtgtatgtctagttgtgggaaggaccatgattaggaggagtgtgtgtgtctagttgtgggaaggaccatgattaggaggagtgtgtgtgtctagttgtgggaagacagaggagaagcttaagaagatttaaaaagagaaaggaaaagactcatgatggttttgtccaaatcttaagagttaatgtttgttgaagaaagtttagtagtagcagtgggagtggttggtttcttgtcagaaagcttcatttcttaagttttccttaagtcattatagttactttcctgttgctgtgagaaaaaataataccatcaccaggcaacttagagatgggcttatgcttccaccgtccacattggaaagaacatcatggcagcaggcttgcaggtgtggcagcaggaacaggaaggtgacagcttacatcttgaactacagccgcgaagcagagagactgaattagacgtagctcagggatttcaactctccaagctcgcccacagtaacatactttctgtaccaaagccacaccccctacacctccccaaacagtgccaccagctgggaaccaagtgttcaaatgtcagagtctgtgcaggacatttctcacttaaacaccacatacatatggcaagtctttgccttgctgtatgtaagtgtgtaagccactagaggggaaatcaaggctttttccaagaccccaaatccattattacattcatctgctcacctatggccagacttctgcctgaatcagatgtaagaacactaaaacaactgtgctgcatgaataggtgtgtcctctatacactttacttttcctgtctatttcactttgcctcaaagaaaactnnnnnnnnnnnnnnnnnnnnnnnnnnnnnnnnnnnnnnnnnnnnnnnnnnnnnnnnnnnnnnnnnnnnnnnnnnnnnnnnnnnnnnnnnnnnnnnnnnnnnnnnnnnnnnnnnnnnnnnnnnnnnnnnnnnnnnnnnnnnnnnnnnnnnnnnnnnnnnnnnnnnnnnnnnnnnnnnnnnnnnnnnnnnnnnnnnnnnnnnnnnnnnnnnnnnnnnnnnnnnnnnnnnnnnnnnnnnnnnnnnnnnnnnnnnnnnnnnnnnnnnnnnnnnnnnnnnnnnnnnnnnnnnnnnnnnnnnnnnnnnnnnnnnnnnnnnnnnnnnnnnnnnnnnnnnnnnnnnnnnnnnnnnnnnnnnnnnnnnnnnnnnnnnnnnnnnnnnnnnnnnnnnnnnnnnnnnnnnnnnnnnnnnnnnnnnnnnnnnnnnnnnnnnnnnnnnnnnnnnnnnnnnnnnnnnnnnnnnnnnnnnnnnnnnnnnnnnnnnnnnnnnnnnnnnnnnnnnnnnnnnnnnnnnnnnnnnnnnnnnnnnnnnnnnnnnnnnnnnnnnnnnnnnnnnnnnnnnnnnnnnnnnnnnnnnnnnnnnnnnnnnnnnnnnnnnnnnnnnnnnnnnnnnnnnnnnnnnnnnnnnnnnnnnnnnnnnnnnnnnnnnnnnnnnnnnnnnnnnnnnnnnnnnnnnnnnnnnnnnnnnnnnnnnnnnnnnnnnnnnnnnnnnnnnnnnnnnnnnnnnnnnnnnnnnnnnnnnnnnnnnnnnnnnnnnnnnnnnnnnnnnnnnnnnnnnnnnnnnnnnnnnnnnnnnnnnnnnnnnnnnnnnnnnnnnnnnnnnnnnnnnnnnnnnnnnnnnnnnnnnnnnnnnnnnnnnnnnnnnnnnnnnnnnnnnnnnnnnnnnnnnnnnnnnnnnnnnnnnnnnnnnnnnnnnnnnnnnnnnnnnnnnnnnnnnnnnnnnnnnnnnnnnnnnnnnnnnnnnnnnnnnnnnnnnnnnnnnnnnnnnnnnnnnnnnnnnnnnnnnnnnnnnnnnnnnnnnnnnnnnnnnnnnnnnnnnnnnnnnnnnnnnnnnnnnnnnnnnnnnnnnnnnnnnnnnnnnnnnnnnnnnnnnnnnnnnnnnnnnnnnnnnnnnnnnnnnnnnnnnnnnnnnnnnnnnnnnnnnnnnnnnnnnnnnnnnnnnnnnnnnnnnnnnnnnnnnnnnnnnnnnnnnnnnnnnnnnnnnnnnnnnnnnncagggtactggttagttcataatgttgttccacctatagggttgcagatcccattagctccttgggtactttctctagctcctccattgggggtcgtgtgacccatccaatagctgactgtgatcatccacttctgtgtttgctaggccccggcatagtctcacaagagacagctatatctgggttctttcagcaaaatcttgctagtgtatgcaatgatgtcagcatttggaagctgattatgggatggatccctggatatggcaatcactatatggtccatcatttcgtcacagctccaaattttgtctctgtaactccttccatgggtgttttgttcccatttctaagaaggggcaaagtgtccactcctcaattctttaatgggtgtttcctgtggctccaaacgttatgtccaactgaataccttattttcctcacctcaggccaccaccagtcctggctcctgtgttcagggacctcacaggttgtgctgaccaggactggccttgctcagctttggacactgaactctgcctccttggccttgttccttgggtctcagccacctccactttcttgctgttcccaggttatcactgctgtccccacctggcaactttgtgtttgttttcctatctgtagtgttcctctaccatagctgtggctggctttttctcatcttttcaggtctcagctcaaatgtctcctcttgaagtaacccctaagtatccatgtttactaactggatcaaggtcacttggtaaggccatgaggaattgaatctggcctgatggatgatccacagcaagactggggctgtggcaattgtagtgagagcaactggactttttatacctttatcagaaacagaatataatgaaaagtttcaggatcaatatagttgtccttgccaggatacaatgatgtatgcaaggtgcatggggtacacaaggttgatgtctaagaccaattgtcatgtcttccatgcttccttgactttaagggagcatacagaggtgcacacagcagcctgaatgtttcactgcctgaggaagtgcatggatctctcaagaactgggaggcacattgtgccccaggagccatgaactcttccctgaaaagcttatgaaacaggcctctcaatcagctaggccagaacaactccgtggttctttatgtaacactccctcatttacccagtcaactggctttctctccatcactctgcattcttctgccttgtgttttctcctcactcttattaatattcactaaaataatcagataatttgctatctctgtctaatagaaaataaacttcacggagacagaatctattcactgctgtgtgcatggcacagaaaataatgtcaggtacacagtacacgttcaactggcatttgttggaaacatcacttaacagacccagcattcacttaacagctaccttgaaagtttcactctctttccccattgttccaatggtacatcatcactttgaccatctactcacaaacacctcgcacatgctctctccatatgtgaacattacttccgctgaggccacgaccatcctctattgctgcagacatgtccgcgtgggtcgcagagactttcctcttacccctttgtcttcgttctgtttctcccctggaatctgtgcttcctgttgcaaacggacagtctcagaagccaaccacaaataagatgtgatcccagctttcttagtttaaaatgttgtgacagcgctcaactttgggatacagttggagtttcatttcatggtcagcgaagtctagattttccagatgcatcatttgctgttgtttattatttatacatcctaaactttcacatacttcacgcacagacacacatacacacacatacacacagagagagaggttgagagagagagagaatcctttactagagaattctttgctttctatgcaagcccatccccttccctagtgcatctgttacctgggtcttgatgcctctgcctcagtttccccagtgcctcaccatcccagcatacccctagctgatgatttaggcttcgctgcagatgtcactttcttaagcaggccttcctaatttttagtctttcccaggttctgttaaaactcacctctatagaacccggtatctcctatctgtcagactaattttaaataactttttatttaatgattttatcctttcattgagaacttggtacatgttttgatcatattcacccacacatccagctcctcccagatccactcccctactccccttccctttccaccccccaactctctctctctctctctctctctctctctctctctctctctctctctctctctctctctctctctttctctctctccaaggtcaatttaagctgcccaaatatttttgtacctgtggcctttcaacggcatatgggtgacttatcagttgctggacttctagaggaaactgactctttctgtcccagcagctaacaaatgccagtagcttcaaagttcctccatgctaggatttggtgtcagactcattttcaatgtcctgttttgtaacctgtatctgctatagaactacacgctcattagggatacttcctcttcatagcatggtgaaggctcattacaggggctcaacacatatttcattaataaatgaatggtagagtttggtgctaaatgaatgaagaggagttgctgtggttggatatcctgtttacgatcctcttatctcttacaactgaatgtctgcatatcattgagtaactggtgaggtctcacggtcctttcttcccagggtgctggaacagatgaattcactctgaacagaataatggtttccagatcagagattgatcttttggacatcagacatgagttcaagaagcactatggctactctctatactcggccatccaagtgagtctcctgtaggaacagcagggcatggttctccttctctgctcacaagctttctgtcatgatcctttaaaacacagataggctgactcacatttctctctccctgttattgtgctttctgagtttaaaatagttctaccaaaacatcccttaaaggtgggagcttgggaactgaagagatgactccgtggtgcctaaggacctggatttgatccctagcatccacatagcagctcacaaccatctctaactccaattccagagaatccgacagctttttctggcatctgtgggtaccgcgtggacatggtgcacaaacatgtataggcagaacatgcattcacatgaaattagaaagaaatacatcttttaaaaaattgttaaaaatggtaactgttttccagttcttaaatactaagaatgtaatagtaagccatcttttaaaaggtttattggacatacaattttattttgggaaaaaaaaaacctgaacatgtaagttgattgtctattgtttgtgctgcagtgtttttaaacaattatttcagcatggtggcaaagtaagaagtaagtaaggaaaaaataaggaaagaaaattacatgtttcacattttcctttagtgacgccggcatgtagatcagtagtaaacatttacctggtatgtgcaaggctatgagattaatccccaccacagcaacgataaattaataatgataataataataataataataaaaggaggaagccctgtgttgtatactatagatgatgggttctgtatcttcagttcttatctttacagtatgaaaaaggcttctcatttttcgtgactgtattattattccatttttatttcaataacactaacagatatttagagtccctagctattcaaaacagtgctacagtgtgcatacccggattcatgaggtgcaactgttgggggtgatgggtaaatggctgagatagataaaacttatttttgattttggtaaaaatgagcacttggttctccttcctgtgttttcctcagagcctcagagttatctctactcatagacaacccttttgcatttttatagtccaacaggtgcatgttaggatgaacgtatttcacatttttaagtgccatttttatttcctttttctctgtgctttctgtttctgtgttttgggcccattcttcgtttggatttctattgctttctgttaacgtctaaggtctccttgtacattaggcagattagctatttttttttaaatctcattataaatattttttgttactttttgcctccgctttcccaagtagaacttttatttgctatgtaactgaatttattaatccttgtagtttcttggattttatttttatgttccattgtttctgccattctgctaagaatatttctaaaatgtctgatactccttcctttctgcttaacagcaaacccatggtcactgttcccaagtctcaggaaaaaaaaatgtatatatataattacacctttaatcccagcacttgggaggcagaggcaggtggatttctgagtttcaaggccagactggtctacaaagtgagtttcgggacagccagggctacacagagaaaccttgtctccaaaaaacaaaaaacaaaacaacaacaaaaacaaaaagtaaaactgatcaaattgatagaattgttcagaaaaagtctcctataccataaaaattctggttcaatgtcctagctgaaagagaactattccagctagctaataaatgctaaggaactagcccaggtttccctcgtagtattctgtgggttctgctttattgttttgttttgccttagcccctagatgtcacacaaaggcccctgttaatttagagaattcatccagcctggttccctggatcagtctgggcactgaggttgagtgaactacccgccatcctagtcacccagtgtagagtctggctccacaagggccccacgggctgcatgacttatttacctctgagttcttacatgctttacaagctttctcaggaaaatcagctttgaggcccaggctggtgccttctgagaacctgtgcccagaagaattaggacaaagaggatagcagcccggagggaagcattgagagtctcaagctgaaagcacacaccccaggccagctgtgggaccactgtatactgtacagatccggattcttggcagctcctagccctggttcttgaggaattgatgcttagccttggcaactgggaatgtctggcctaggccatgttcctgtgccacactgagtagctggggtctttccttctacccacagtgtagacctacccacactagacacccttaatcagcacacacattggcctgggggatcgctaactgtcttagaagcattccagcctcagggaccacagatgatttattttttgttttaaaggaatgaataaatgtattcacttcagtcagtcagctagattggctcaccaaattcctttgggcttttaaaaaaccagagtctttgttttctgctaaactttgactgagaaagatgcatgggtaagtcaaaatcataactgatccaaaagagcaacaggctctacctagggcttagcacggattttgtcagcagcctaccctcagttctatgtgaattgatcctgacacattacaatagtttcaatcatcataggaagattcaataacattaaccacattgtacttgccgaggcagaaaagcagactcattcattttataacaattgtcagtaacaaggttgacacaccaggagggcttctggttcaccttcagcaaaccagaaaattagattaagttgtggtgctctgtccccaccccccaaccccccatgatggagacttactgtagtaggagacacttaaactatttgtagtttgataaagagaaaaatccaccactgaagagtctggtttgagatgtgaaataacacagactctgtccgttctcctgcctccacgtgttgtcaggtagtctcattcatgatttcctggctggccagtgggatcttttcaagatggttgttcttgaaactcgggagtcggaacatggaaacgctgcatacattccgctcttggtctctgtcatcctctgctttcccctattatccagacatctaactgctgttcagtcctctcatggatgataactggtgaggtgaaggaaagggagagtgtaagtaaaaaaaaaaaaaaaaaaaaaaaaaaaagaagaaggagaagaagaagtcctccttcctcacaagacgattccggtgtagtgacacgtgcttataacatccataatccgggagtggctgaggcaggaggatctttagtttgaggccagcctgtattatatagttgagactctgtctaaaaaagtacattaatggaaatttcaaggagacctaatgttttgttaacttccctagtcagtaataaaaagcgtgctataagggcaatagagtgactactccgagaatctgagtaatcttatagtctagaacacagaatctagaacactagaatctagaacactagaatccgagtaatcttatagtctagaacacagaagactccagatgaaggcttaaagaaaggcattgacatagatggcaattggaacagcatcatctagccaagtgctaaatgtgagtatgggagtcaggaatacaggaactgacaaaaaagacatttgagagttagaaaagaacattttttagagcaatgggtcctgagtctgcctatcaggtcaacaacaggaactaggcacctcctctggaattctgctggtcagcagggtcctaagatgcatcttagaaagagaatcatagtaagaggctggaggaaaaggaaccttaagtcaatggcttaactagaaaatctacttcagggaatactcgagcataacatagtgaaatgaattcacccagagtcccacagttgggagttagtgctgtattcatctaagcacaaatatttactaagggaatgctgtgtcagactcagggctaaagatgtgaggaggaataaggtttttgctcctatgacattacaaatatgcattaaaaatcactactttcatgtgagggaaggagacatggtactaaaatataatataacatgaggacttgactgacaagaaaggcttctatggggaaagataattttaatctggaaagttcagtaggcattagcaaggagatggttgtgcctgtatgtatggagctagccaagcattctaaaggaagaatgtgggatagatgaatttgtaaagatcttgggacagaagaaactgtgaatacagggtaaagaggccaggtcatgcaggacttctctggtaccattgaaatagtcctgtctttagcacaggaattgtggagtcaatagaatggtagacaaaaggatgtctcagtcatttaaaataattctggtgactgtgaagagtgacttaagtagggaccaagagagacatggggtgatgagtgtgtgtgtgtgtgtgggggggggtgacacagacacaccggagtaggtctgacttggatgggagaccacgacacagccgatctgcaagctcaatagagagggacttaggatttggtaagagaagcgagaaaaaagtgtgaaggatgacacccaggagtctatcttaggaaagagcaagaagtgctgttttctacaagaaggtcagggaagagggtgttgtccttggggacgtgtgaggaagttcctggtctttcgtgtcttgagtttgggacatgctaggaggcagtacttgaagaggtcagcacaatggctgctagtgtgggtccattgtgagagtcagtgtcccaggtgccttctattgctggatgacaaaagcaacgtcaggaatcaggcatggtggcacatgcctttaattccagcatcagaagcagaggcaagcagatctctatgagtatgaagcaagccttgtctacatagtaagttctaggccaccgagagctacacagtgagactcttgctttctaaaataagtaagcaaatgaataaacagctcactaactaactcacttaagggataaagagttcacctttggcttacagttcaagagggaaagaatccataatagcatagaaggacctggctacaggtagttggagtatgggacccaggtgcaagaaactggctgaacagagtcttctatactcagaaaacacagagagaacaagtgggcccatggcgagaaaaaaaacttaactaaaccaatagcctaccaccctgttgtgtattgccctagtgctgtttgtattttgatgctaattctagttcccaaagaggggctgcccccaacaatcaccacactcaggtgatttcatgtgaaccttctccccattttaactggtcaaataaagtctagagcctgcgattgggcagtggaagggaaaggggaaagtggaagtgttagagaaggagagagaggagtgaggaaaagagagacgatggagggaaggagagagcagaagatggaagaagaggaggtggaaaatggagcagaagcacgtgggcttgaggagccacaagtagcaagggatctcatagctggggaatagggtagtgtagtgatagatctgcccaatctagatgtgcagcttataaatattataactgagttgtgtgttctttgcacaggcatattggggttggagatttaccgatacaaatatggctggtattaaatgttaaggctgtctggtgtttccgatttgtgaggatttaggtgggcaagagggagggcaaaaccgtggagtggtcattggcagtagtggttgtagcagaccactggggccgtctgtctgtggaaccagaactgtagctccaggcgttctcaggaaggacatgttgcaggacttagcaagccagcctcaggaaccagggtaagatgtggaacagacaggatggaagtggagcccgcctgggcggagctaagtatgccacccaaacttgagaaatgcaagaccaggaatttcctcacacttccctatggacaacaccctcttctctgaccctcttgtagaaaatggcacttcttgctctttcccaagatagaatcctgggggatagaatctcggagctaagtcataaggggctgtggcactgggcaaggagaccaggcaaagggaagcttgcagaaagagtgccacaggtatgcactaatccctcagctgacatgattgtttctcaaaccacctttctctgctggctgggggaggtgggtgggtcactacagctcctctaagaactggaaatgactcagtctttgtagcttggcttgtctgagaggcactgttggtttttattgcttcctctggcaaggaagggtctagtgaatttggtcagtttcagggacttcctggaactataataagttgtttacctccctgcttagggaacttcctgcaggatggaatgtttgaatctcccaggaaactgacacagtaggagtgaggggtgaaatcacctgagtgtggctctctgatttgagggttcctttcttagcttctgtaattgttacacgaagattagcagagttcatactctgctgcatagatgttttataagggttacaatagttaaacttttcatttaagcattttatattgaaaattcaggttttcacacatgctaaacacactacatgccattgagtgacacctccagttgcacatgatgtttacattgtaaatagaagtgtcagttaacgttatttcttattaagcaacagatattagagtttctgttagcagctaatatggaatatcatgtcattgatgaaatctttccagttgcactactccagcaggatttgaacattatgaactgcagagaacatgctaggctggggcacagctgtcctcaagaatgaaagaaaaatggcacggcaggtgtgctgtactgaaggatacagctcaaacgtcatctcatacccaagtgactcccctagccctgtaggtctgattctcctgtaatcccctccttatttatgctgtgtttaatcttccctgtcggtcctgtcctttgcagtcagatacttctggagactacagaaccgtgctcttgaagatctgtggagaagatgattgaagaagatggctcccaatggctgcctgccctgatggtggaccgcctcaaaatctctgcacactgctttcatgcagcactctaaagtgcaagcaaatgcaagacagaacctgtctgcctgataggcattggcatcgttcagtgcaatggcaaaaatgaacttgattttatttcagaccatctcattcatgataagggaaattcaatctagaattaaagacctactaatgattttctgtttggcttaggaagttggaatctgtgtagttcaaaaccattaaacataaatcaggatactaaagatggctgcctttcctaattgtaatttgtgtatttgttttcagtatctactaatactgtatgttgcctggtgccaacaaatatttcaaaatacatttgttgtaaatgctctgggtgcttctgttacttgattagtgtggtctaaaaagctagtcataaaatgtcatggtgctgctcacctacaagcccaacatttaggaggtggagaccggaggatcaatagtttgagccatccttgtgtaggtgcaggagatataaacaagtccattaacagtttattgcggttgaggcttgggctccgagaaggagaatggtgcctggtgaatttatgttagggaaatgaggtagtgctgtccttattgatgttcagcaggtgctagaatctggcagggaaaaaacaacaacaaaaggattgctggcagatacttccactattccacaggatttctgtctgccaggaagagccacttctgtatctctccttcctctggcggatgaggcattaggctgattgttaatatgtacccatggtgcatgctaacctccagacttccccagttcgttccaggctgctccagttcagagggttcccttccccacctgcaactactgtttttctgcctaacccataaaaggttttcctgctcctgctcctgctcctgctcctgctcctgctcctgctcctgctcctgctcctgctcctgctcctgctcctgctcctgctcctcctcctgctcctgctcctgctcctgctcctgctcctgctcctgctcctgctcctgctcctgctcctgctcctgctcctgctcctgctcctgctgctgctcctgctgctgctgctgctgctgctgctgctgctgctgctgctgnnnnnnnnnnnnnnnnnnnnnnnnnnnnnnnnnnnnnnnnnnnnnnnnnnnnnnnnnnnnnnnnnnnnnnnnnnnnnnnnnnnnnnnnnnnnnnnnnnnnnnnnnnnnnnnnnnnnnnnnnnnnnnnnnnnnnnnnnnnnnnnnnnnnnnnnnnnnnnnnnnnnnnnnnnnnnnnnnnnnnnnnnnnnnnnnnnnnnnnnnnnnnnnnnnnnnnnnnnnnnnnnnnnnnnnnnnnnnnnnnnnnnnnnnnnnnnnnnnnnnnnnnnnnnnnnnnnnnnnnnnnnnnnnnnnnnnnnnnnnnnnnnnnnnnnctcctgctcctgctcctgctcctgctcctgctcctcctcctgctcctgctcctgctcctgctcctcctcctgctcctgctcctgctcctgctcctgctcctgctcctcctcctgctcctgctcctgctcctgctcctcctcctgctcctgctcctgctcctgcacctgctcctcctcctgctcctgctcctcctgctcctgctcctgctcctgctccctctcctctctctgctccctctcctctctcagctcccaagagcagtagtcctggcctttgacagtctgcccttctcctctctgccccagagactattgccccagagaccatggctattttggaagttcacaaaggctctggatattctctctctcatatctacaaaagtataaaaaaaaatctataaaaactttccacccatggatcagtcagtttgtcagctctctgtgcctttgcttacatgcccccacccccaccccagatttcagcacacaatcaagaaatcactgagatgatcactccacgaatggggaggtttttattaacactaaaagagagagaacagtcagaagcacctgtatgagtccagagcagagagaataagaggaaagactgaccatggccagagctagagaagtgggcatgaaaaatagtgtgggttacaaagagcacaagtagcctaggggaaggaatctgtgaactgaaacagcctggatgttcagagcagaggaggaggtttgaagggccaagatgctggtgtgggctttgaaatgcataacaggtacaagtgaatagggaccaaaggagcctcaaggcaaatgtgggcttttgatatgtaaccagaggtataaaccaagggaagtggccctttctgacaggctcctgaggaatgcttgggcctgacacccacaataaagagacacaaggacacctgcctctgcactttacctaactgctagtgcagttagagctccccttcccaccttttcaagcatagatgcctcaggcctttgaggaggacaaacagagagggcaccagaatattgcaattccccttttcatggtggcactcccttccccctaacatccccctgccccccccctccactgggggggggagcagcagatgccagctttggggacagacagaaaacagcataccttagcctccctgtcaccaaggctaacactctccttgatagataaccaacatttttccagtgcagatcgctcctgtccttgaagaaaacaaggactaaacatccttgaaatgataagaggcctgcgcttggaccaagacacaagggcaattaagtgttcccagacagctgtgaccactttgtaaaaatacactagctcccgatagcaccacaaagttacttcccaggtcaggaaggtccccttccagctacacagttctgccctgctgtctgaacaaatgttaccaggtttgaaggatggtttttcccttgtcacctcctcagtcatggaaccccaaagtttggggattcccggcatatatatgtacacacacacacacacacacacacacacacacacacacacacacaccaagcccctggttcggccattgtatccctaacctgcacagtgggaaagtctttctatctgggtctgacttataaaataaagactctctttgtttttacattggacttgcaattcctggcgttctccgggggttcccaagaactgggcataacaacaagattgttttataatgaaatgaaatatttaaaagtgtgttcatggggatggagagatggtttaccagttaaggatgcttgctcatccagtgaacctgaattaaagtcctagcacccatattaggcggcccatcaatctgggttcccaagccaaatgaggggtggtagaacactgcctatacccccagacagctccgagagagcacagcaggaataggactgctccctacccaaatcaggcttgggcctacttaactccatagagacaaaggccacttcataataatgccagttaaacttctgttttcccactagagaactggcttctgagaaattatgtgaagggcagtctgctaatcttgctgataagattggaaggttccacccctctgcaacacttcctcccttgtccttccccctaaagctatataacctgacccctctatttcaataaacaagctgtcctctgaaatagtctcccgggtggtttatatccaccatactcattgctgcctgagaccctgttcctgaacgcctccaaatcctgagactgccagtgcacaaaagctgatgggggcaagagacctacatctggtgcctgaacaggaacactccaggatgtgtggaagagagtgagtaccctccctgtccccctcccctcagcggcttccgcatcttgcttcgccatcctaccttgaggatctgcttccttgctcctctgctttgatttgacccaccttcaagtaccaattttgaagtgaaactatcattgtttgactgggtctacccccactcacccctgaattgactgaaggctcttagtcctctggtcggaccctgacaacccttcggcgacagcaaaaatcacccctctaaagctctgaaagcacctggtaatgcaataaccaggtaaaagtctttaggatactcggcagttttcttaaatgtgaggataggctaacaccccagtttcagtggaatcccctggaactcgtgcagtttggagagcgtccccatttgactgagcacttccattattttctgtcatgggaaagtctgcttctcaccagaaggaagcccttctgtaacatcttcacaggagcacagcaggtttgcccaacctctagggaattttgatcaagtactcctttgtgtccttcaggcctgggatcacataacctcccctcccccaacttctgaatcccgaaatggagatttcttgcttctcttcctccagcaaaaccccaaagaacccttctctgactttgctcttcgaacaaaaaatgagcctaggacacaaaattcctgatccctgtggctagagaaaccatcgttaaaggcatggccttgcaacactggctagcttgttaggggttgaaaaatgaacgttatgataaatggatagttaccactcaagacattaggatggtttctcataaagttactcccttcacccaggcctctgaggtgacctttaaaacaaaaggaaaaaagttttaaatttggaaaggcgagactctggaaggacaaatattctaactctggctcatctaagggcttggaagccacccctcctaaaaccaagtgtccctgatgctgtaaagaattccactggggactggagagatggctcagtggttaagagcactgactgctcttccagaggttctgagttcaattcccagcaaccacatggtaactcacaaccatctgtaatgggatccaatgccctcttctggtgtgtgtctgaagatggctacagtgtactcatataaataaaataagtaaatctttttttttttttttttacaaaggattccattggagaaagaattgccattctacatatgataaagatgtttagcccctcaatcctttaaatgccaaaaggggaaatcttcgaccccaaaaacaaaaggaaaaacctacaaaatcttgtgggtcactaacattttggaaggctcacaccccaaactcaatataaatattgcagaaaaccatttaaatgcctaattgacaccggagcagatagaattattttgaagcaatctgatgtccctcagcattgggaatggatccctgggcacaactaatgggcacaagaggctcctcccaggcatacaccacaaaagaggccttcaaaggggaggatccagatggtggtgttggccttatcagacctcttatctcagacatggccaccaatgtgttagggagagaagctttagatatggtccttatcagtaacatggaaagtgaatgcatccagatagaggaatatgacaaacatccttccagggaattctaagagccactgtcagatttgagactccctgcctcaactgggtctcagatgagcttgtctgggatgaacaatggcctttaccagggagaaattagaagttcttactcagctcattaaagaacaactacaatatccatcctttccttggctgatggaatttccccatctttgcaattaaaaagagttctatgagatgggagctattacaagacctttgggccatcaacatgactatgcatacttggggatccccatggaggggtctttcccttgtctctgcaatcctggccaatactctactattggccattggtattagagattgttttcttctctatccctgtacatcccaaagattgtcaacatttcacattttcagttccccaaattaacaactctggctcagcttcctgatatgaatgatgtaggcacgatgtttctgtgcactgggtaaaagttatccttgtattattcaaatactgatttctctgtccccttgtttcaatctgggcatggcattgtaatacttaagtcaagaatctcctatgtcaagtttgtataaacaatgtttatcatttattcgtgtcaataaaagcgattacccagtggctgggcagaagatagaatatggtggaactcccaccagccagaggagnnnnnnnnnnnnnnnnnnnncagggagggaaggagggagggagagagaagagtaagacagattgagccacaaggagggaggagaggtgattttagctggagcatgaaaggccctacatgaaattattacagggattttggccgggaagtagccagattaccttagaataatgagatggatcaatgactgcctaggtatttcagtgaagcttgaaaataaatcttggtttctctgtgtcactactggggaattagctaggataaagaaaaaagagccactgtattaatttatatttactatttatactaatttactatttattctaatttactatttgtatttatattatttatatatttatattaatttatattatatttctataatcatacattaataaaaataaagataatattaatacaattatatataaatatataatgtatattaaaattactgttacagaatgaagactcctccaccaagggatggccaccagccacactatttgccaggaagtagttgctgctgctctgaaatcacatttagaaaagggaatacacacttatcactctcctggttaaacaaccactgtactaactaccacctgagactctgctccccagctcgtccgaatcctgacacttcaagcacataatggccaattgggagctgggaacccacacataactacctgtaattccagctccaggagattgtagaaagagctggcctttgagggcacctgcatttatgtgaatactgccccacacatatgcataattaaaagtaataaaaataggttttgaagataaaatgaaaagatgctcagtacagtagtagaacataacccttaataaatgttattttaagccatggttggggattcacacttgtacttacagctactaaatttgttataaaaattaattaaaaattttcatacaatatattttgattgtttccctcccttaattcttcccaaactccctcacctccctatgcactcaacttcattgtctttctctttctctctttcataacacaaaatcaaacgaaaaccctccaaaattaatttaaaaacatggaaatgaaaatcaaaacaagcaaaatgcaggaaagaaaaatgaaaattccaaaataaaatgaagcaaaatgggaagaaagaaaggagagagggagagggagagggagagggagagggannnnnnnnnnnnnnnnnnnnttaagtattacaatgccatgcccagattgaaacaaggggacagagaaatcaatatttgaataatacaaggataacttttacccagtgcacagaaacatcgtgcctacatcattcatatcaggaagctgagccagagttgttaatttggggaactgaaaatgtgaaatgttgacaatctttgggatgtacagggatagagaagaaaacaatctctaataccaatggccaatagtagagtattggccaggattgcagagacaagggaaagacccctccatggggatccccaagtatgcatagtcatgttgatggcccaaaggtcttgtaatagctcccatctcatagaactctttttaattgcaaagatggggagggggagggggagaggactgtgcctgggcatgggtcctgccctatagtatgattgatatacacagtgagactccactggagaaaactgacttgcagtttcttgagtttagtttttcagcaggtatcaactgtaaataacttcttggttagagatgggactctgtccaatttgtcccatcagtgctaggacacatctggattgaacttgtgcaggtgttgtatgtgctgccacagtctctgtgagttcatatgagttctgagactctcacaacagctggctagaccagctggaagctgcttctgcctctggttatcccaagggactagagactgcagatacttatgtaagcgctatgtgcctgagggataaaagccggatagaacatggaggcagagccatgaccttaggatcaggatgctcagatctggaagaccctgtttccttggagtcattcctcagctacagccattcttcctcctcttctgcaaagatcccagattcttgacaagacaggcttgatgacaacgccccatcaagtgctcagacgtctctcactctgtatattgtccaggtgtgattctatgtcagttatatttttttactttaatcataagataatcatacaaaacagctattattattagtttggagattgaagaaggatgattacttaaatagttctagacattcttgagctagtgatattgatcctggggttgtttgggacagagcctcggtcctggcagtcctcacaagctaggtttggacacttgtccttgatagatctgttaaggaaataggtaataatgaaaaacagaaaagaatttattcaatacagtaacatttgaaagaagaacaaagaaagatattcagtggtgtgcaagcccatcaataaatgtggcatctgggtttaaatagagggaaagaggtgggcataactacgcagtcagggtcaagatgtggccaccactaaccccctgtctaggctctcatctgtcctacaagatggtcgacaagttgttagggtctctttgccagagacaagctccttttctggttggcatcttgggaattgattgtctccataatttgaaggaaaagttgtctctctgtagtatatcttcacacctaccacacagttgcaagatcttacctcaaaaagaaagaagattctgctaccttataccatatgttattatagtgttagtcaaggagggtggttttcattgcctctgatttccacaaggtggcaggtcaacttcaaagccagatagttggttttgtgtccaagtgacaaaacctactttacttgtttaagagtccagataggaactacgtggaaacatgctttgacgagtgcatgtcatagtccaggagtcttgttatgactgtaaacactttctcaatgatgattacgtaattcagttctttggtgtccatcattcttggggaagtctgcatttgtatgaagaatgtgtatgtgtgtgcgcgcgcgtgtgtgtgtgtgtgtgtgtgtgtgtgtatacatatatatacatatatataatacatttgtatgtatatatgtatatactatatgtgtctgagtgtgtgtatactagcttagtcatggatcaccttcactgatgagtatctgcaagtcagctcacagaacactggttaatccatgaagacagtgatggagaaaccttgcaatctggaaggagccctggccttgtaatatggttaacgttagaaggcaggagactctagatcaagaatatacttggtctggagattaggtgcttcaaaaatggcaaatgacgatactggatagaaggttctcaaagaacctactcgtgcttttgaaggaaatgtttagggtaatgtgatccagaatttacttctgtatattttctgctgtccattttcatatcatttgcatgccatgttgatagcctccaatttctgcatctgaattgtcttgaatgcattgggtttggaatcagatcagtctgggctcagatcttggctttctacttaactacaacaacgtgtatgtaaatcagtatgtaattggcaaatactcctctctttgcaacctgatacttcagctacaagtaagtccttacccaaaagagttatgaatatttaatgacatgaagagtattaaaaagttaactcaataaaattcaattagtggagaaagacataaaagcatttgccctgccatactaacctgaggtggccagaagaaagatacctaagcaactacctagggtatcactaccacaaatgaatatgtgatggagagatgggaagatggagtttgtggtggtgagatagaggaaaaagcaaagccaaggggtttgtatactatggagaaatgtggaactggagactgaacagcagcaagatgaggaggccatggtggtctccacatggtcttagcccaggtctctgccacaaaaggccatgtctggattcatgatgcagctagggtctgtgtcattgtctgtggcctgagttaccaccaaaggtgaaaaccatgtggatgtctgagggtgtgctggcatgggggtgaaggggatgatgtactgatctgaatagcgcgtcacctgaggccatgggacatccaggcccaggttgttgctagggatcatgtctgg

SEQ ID NO: 258 - DNA, 1563 bp, Mus musculus
gggcagtccgtgagtagaaacaggaggaggggctgaggaagggtgcggtctgggttgccacccaggctagccgggagctacggccgaggctgatcgttcaccttcgctgagcttctgcctgggcttcgcctccgcggccccaaggattgctgtgatctcggcttgagagaaaggtggactgtcatggcctctatctgggttggacctcgaggaaccataaaagattatccaggctttagcccgtcggtggatgccgaagctatccggaaagcgatcagaggacttgggactgatgagaaaaccctcatcaacattctgacggagcggtcgaacgcgcagcgacagctgattgccaagcagtaccaagcagcgtatgaacaggagctgaaagatgacttgaagggtgatctctctggccacttcgagcacgtcatggtggctcttgttactgcaccagccctgtttgatgcgaagcaactgaagaaatccatgaagggaactggcacagatgaagatgccctgattgaaatcctaacaaccaggtcaagcaggcagatgaaggaaatctcgcaggcctattatacagtgtataagaagagcctcggggatgacattagctctgagacgtctggagacttccggaaagctctgctgactctggcagatggtagaagagatgaaagcctcaaagtggatgaacatctggccaaaaaggatgctcagatcctctataatgctggtgagaacaaatggggcacagacgaagacaaattcaccgaggtcttgtgtctacggagcttcccgcagctgaaactaacatttgatgagtacagaaatattagccagaaggacattgaggacagcattaaaggagaattatctggacattttgaagacctgctgctggccataggtaagcccttgagtgttaataagtggaactgtttgtacttctttgaagtccatgtcaagggtgctggaacagatgaattcactctgaacagaataatggtttccagatcagagattgatcttttggacatcagacatgagttcaagaagcactatggctactctctatactcggccatccaatcagatacttctggagactacagaaccgtgctcttgaagatctgtggagaagatgattgaagaagatggctcccaatggctgcctgccctgatggtggaccgcctcaaaatctctgcacactgctttcatgcagcactctaaagtgcaagcaaatgcaagacagaacctgtctgcctgataggcattggcatcgttcagtgcaatggcaaaaatgaacttgattttatttcagaccatctcattcatgataagggaaattcaatctagaattaaagacctactaatgattttctgtttggcttaggaagttggaatctgtgtagttcaaaaccattaaacataaatcaggatactaaagatggctgcctttcctaattgtaatttgtgtatttgttttcagtatctactaatactgtatgttgcctggtgccaacaaatatttcaaaatacatttgttgtaaatgctc

SEQ ID NO: 259 - protein, 319 aa, Mus musculus
MASIWVGPRGTIKDYPGFSPSVDAEAIRKAIRGLGTDEKTLINILTERSNAQRQLIAKQYQAAYEQELKDDLKGDLSGHFEHVMVVTAPALFDAKQLKKSMKGTGTDEDALIEILTTRSSRQMKEISQAYYTVYKKSLGDDISSETSGDFRKALLTLADGRRDESLKVDEHLAKKDAQILYNAGENKWGTDEDKFTEVLCLRSFPQLKLTFDEYRNISQKDIEDSIKGELSGHFEDLLLAIGKPLSVNKWNCLYFFEVHVKGAGTDEFTLNRIMVSRSEIDLLDIRHEFKKHYGYSKAIQSDTSGDYRTVLLKICGEDD

SEQ ID NO: 260 - DNA, 78942 bp, Homo sapiens
ccagccccagctttctcctacagggcttttcctgagtccccagacagcagagtatgaactgctgacacccagattccattaaaaattctgctaatcgacacaacacatatatttgctcatgatttcacttgacagcgtatgctccttggcctctaattgtactttgcttttccagagccctttttacctggggatttcagtgtgcttaagtaaaatcctctgaaaaccacgggagcctctgcctcctcagccacagagaactccctcctacaaagggggagactgaaacccgagttaaggaggggcctggcaggcgtatcagagcacattagtgatgcccttcaccccagggaggtgtctgttcccaactagtttatgtggcactgagacatccatccctgaccaaggatgctgcgaaacaggatcaatgtactacggccttttaattcaacattgccataaatgctttaaagaaaacccaccacactttcctcctactccggtctttgcccgttcctgtaacagacaatcccatgtcctaggtatggttttttattctgttagtgcttcgggaaagtaagtgattcatttgaataaggcaaattaggagaaagcccaggttggggtgaaatcagacttaacagatacatgctggttctccttgctgtgtgtgacacagcagacagaggcactattcctggtgcagtatttcagggatttctctttgaggggttcttttctggtagctcaggcaattatttttaccatatcagcacatgacaaggccatgaacacatggctctaaaataatttagtgttcaagtatcagcttaactattttgtgtaggctacacacagcttgcttttgtttctcttctgtttctgccttattggcggaaacataagcgtgcatgccatgttgttttgaattggaggcacaatttcattattcgagagtaaaagacatgtcctcttttgatgcatggcacaccatagtcaccaagcaaataacagagccttcacattgtgtaatatttgtatgagaatgactcaagctctttgagaacattccaaactagtaacatttcgctactaaaagctagaaaggatgaactgtgaaaggttctaggcagctctgtgagactccaagctccttgaaagtaggacctttgtgagccacgcctttcattcttcaacagtgccttgcatgtaacaagcactccagaaatgtttgttgaatgaatgaatggtgtcatgggtgaatgatggggagtaaatttaggaaggggaagtgagagagtatggtggcaatatcacaagggaggagagaggaaaacaattatcttctctacttggattatgagataaccttttcttggaggaaagaaacaccgctttacaaaggcatgactctggcggtggtcctaaggaagcatgagcagaaaattcataaaaatgtatcatcagcaggagatgagactatgaattggcatccagaacaggagatttagagcaaaatctaatttagcattctgagatgagtgtcaggttttcaggagagaatgagttggggtgagcccagagtctgaaactcctgactggtcaggtgctacttaagaccagcttgggcaattcagggcagaactcctgtatcagcctcatggacacccagaattggtatctcatggctggagagctgatcagccaggcacagaatctccagaacaacctagagagtgaatgctaatttgtagagcgaacttccatttggcccattatttgtaactgtgtaactgctccaagtgccagaatgcttacacgttaaagcagcacctttccatttgcccacatattcttcttgcacaccccttccattactgctgaataggacattgcatgggaagagtacagaggtggcagaatgaagctagagtgggaaggactaaagactgagccccagagtgctcccagcaaccgccacgtacaaggtctgaaatgacaagggcaagagtgagataggaaactgtgtgtgaaaggaaagcccttgcagtatttctgcctccctttctttctgcctttcaccccactaaatgtatgttattgaatgccagtacttctctagtggatgcacacttgttaaatagtgttaagagatgtggagatgagatatacccctttgatgtagaattattcatttggtttgtttcatacttcattataggaatcaagtaatttgatgactaatgtggattatatttcagtcaaagctctgctttcaatttctctgatttgctcactaatgccttgtgtgtgttttactaaccttttatatcttgccttcaagtgagaaggaacaaacaactctcagtggttactacttgcttttatatgctggctgtgaaggttaaaagaaagaatggtctgtaccattctgctttgctgcccttttattgtaccccaggcctcctagaggactcctgcagattctattgttgggtgggaaatagtgttggaatgtgtttgcacagtcttatgatattcagtctcagtctgctataggtatttgttattcttggatactacacacctgctcagactgagtaaacatttgtggtgctgtcaacctgatttcttgactctcaaatgatttttgtatttccaatatgaatttgtgtgttatgaatttctgatttctccaatagtatatgccactatataaatttgtattaataaatgacagtcttgttggttttttgtttgttttcctatgttctttttagattatatctcttatgaatatagacattgccattaagatgccaaaattcattctaaatttgaagcggtcttctggagaaaacccttctaatgagggtgaatctgagacgctcattaactgtgttcagagtaagatgctgaataaattatatgtttccagattatcataggtctttggcaatcagttgaaattctgagacaaagaggaataattaaaatttccatgtgccatataataagatgatttttgtatttattatcaaaacttctaaagagacatgatatagtatgagggtggcttatgtccttctgtgcacatgcaaatatttgagcatccatcactgaccctggaaaagaccaaagctccaaacaagagtttataggctcatggaaggaaaaatcagagtcaaaatggagctgtacccagctggtctttgcattctgcaagcctgtgcatttgtgtgcctttcccttctgataaaacaaataactgccaataacagtgaccagcagggctctgttggcacgtttgcaaactcagcaagacttgagaaagcatgtttatagaaaatctggggaagggatgccacaaccaatcctggaagttgctgagatgctgccaggagcttaatgtaaacttccaatcctcacaatttcctgtgattatccgttgccttagagcagactctctgccctggagttcacttctctagagtgcagagaagctgtaccaggaattaatctaagaattgttaggattgtctataaaaatgcttctgagactggaaatgtcatggccataaaatttagggatcttgaggaatagtggcagaaaatgagttcccatttagaatttaaaatgcctcatagactgcttttgaagaaatgcactgggagtggtggaaggagactatatttggaatatgttattacattcaactacatgaaattgatttgataggttaaaaatagtccaatatcaatagttttgtatgtctcaacctaatattatgataccacaatatgtaatagagattctgtccccaaatgagccacagagaactcttaactagaaccctgtgtgctgagagtagctaatgccccaggactgttacagggactatatcaaatgatatattgggcatatctggcaatgctccgatcaagaacaatgactcacttatattctgtacctcattcagtcttcataacaaccccgtgagacatagttgtcctggataagttcctttgaaagtttcatatgaatttcagaatttcaaatctttgaaggccttcacaagcacaacttgatgttgctttaaaatggtcccaactcctatcacctaaatttaatgcttgtcatgaaaaattacatcacttgattaatacaacaaaatagacctatgctgcaaccctctctaaaaaagctagcagaattttatccctaggctcattttggtttaaggccaagttccaagattactcagcaagttataaaagttattagaatttcggtctatgggataattttcataaattgtgaaaaactagtatcaagatatctcagttccaagactactcagcaagttatagaagttattagaatttcagtctctggaataattttaataaattgttaaaaactagtatcaagatatctcccttaaacatcccactaaggaatgctttaaaaatgaaccagtgctggatactagcaactcccaagagtccctctgcggctgattctgttgctgcacactgaatctgccctgccctgtgctctgggaaaccgacttttcatcaactgcttcttcaaggctcccttgcctcttgcttctggttgaggttggccaagtggaaccactgatgagagagaagatgatgtgtgtttagcctcctccctgcttccttctgccttgtgattctggggtggctgcatccctccctggccacaggtgtcacgggttctgatgaaaccccttccctcccttgcccacgcaaggctagtcatgatttcatcctgtccctagtccttggagactatatcatccctgtggatacctaaccgaactctgcccatgcgtttgtaaatagctcctttatttgactctttattcagaccctttaagtactctgtctttctgtccaaactcttacacagtccttaaattcagtgccatttggttccacttctctaatgtaaatcaaaattaaatacttgaactcaaatcttgtctcaattttaaatttgcttgttattataaagagtgatgtgctgataaatgcttcacaactgacctttcgggtaaagggaagctccatttacagtatttcctagtttttgtgttgtatatactcccattatggctgaatacaacccattagcataatttcactgaatgtggagttgggaagagatgcacagtagtaccactttatgcactatttttcttttcttttttttgagtcggagtttcgctcttgttgcccgggctggagtacaatggcaccatctgggcacactgcaacctccgcctcccaggttcaggcgattctcctgcctcagccttcccgagtagctgggattacagacatgtgccaccatgcccggctaaattattattattattttttctttctgtttttcttggttttttttttttttttaagatggagtctcgctctgtcgcccaggctggagtgcagtggcgcaatttcggctcactgcaagctccgcctcccgggttcatgccattctcctgcctcagcctcctgagtagctgggactacaggcgcccgccaccacatccagctaatttttcgtatttttagtggaaacagggtttcaccgtattagccaggatgtcttgatctcctgacctcgtgatctgcccacctcggcctcccaaagtgctgggattacaggcgtgagccactgcgcccggcttatgccctattttcaccacatggatgcaataaacacaacctggaaagcatcactaataataaaatgtcctctccccctccccctccccctccctctccccacggtctccctctccctctctttccacggtctccctctgatgccgagccgaagctggactgtactgctaccatctcggctcactgcaacctccctgcctgattctcctgcctcagcctgccgagtgcctgcgattgcaggcgcgcgccaccacgcctgactagttttcgtatttttttggtggagacggggtttcgctgtgttggccgggctagtctccagctcctaaccgcaagtgatccgccagcctcggcctcccgaggtgcggggattgcagacggtgtctggttcactcagtgctcaatggtgcccaggctggagtgcagtggcgtgatctcggctcgctacaacctccacctcccagccgcctgccttggcctcccaaagtgccgagattacagcctctgcccggccgccaccccgtctgggaagtgaggagcgtctctgcctggccgcccatcgtctgggatgtgaggagcccctctgcctggctgcccagtctggaaagtgaggagcgtctctgcccggccgccatcccatctaggaagtgaggagcgcctcttccgggccgccatcccgtctaggaagtgaggagcgtctctgcccggcagcccatggtctgagatgtggggagcgcctctgccctgccgccccgtttgggatgtgaggagcgtctttgcccggccgccccgtctgagaagtgaggagaccctctgcctggcaaccgccccgtctgagcagtgaggagcccctccgcccggcagccgccctgtctgagaagtgaggaccccctctgcccggcagccaccccgtctgggaagtgaggagcgtctccgcccggcagccaccccgtccgggagggaggtggggggtcagcccccaccaggccagccaccccgtcccggagggaggtgggggttagccccccacccggccagccgccttgtctgggagggaggtggggggtcagccccccgcccggccagccgccccgtccgggaggtgaggggtgcctctgcccggccgcccctactgggaagtgaggagcccctctgcccggccagccgccccatctgggagggaggtgggggggtcagccccctgcccggccagccgccccgtcagggaggtgaggggcgcctctgcccggctgcccttactgggaagtgaggagcccctctgcccagccaccaccctgtctgggaggtgtacccaacagctcattgagaacgggccatgatgacaatggcggttttgtggaatagaaaggggggaaaggtggggaaaggattgagaaatcggatggttgccgtgtctgtgtggaaagaagtagacatgggagacttttcattttgttctgtactaagaaaaattcttctgtcttgggatcctgttgatctgtgaccttacccccaaccctgtgctctctgaaacatgtgctgtgtccactcaggtttgaatggattaagggcggtgcaagatgtgctttgttaaacagaggcttgaaggcagcatgctccttaagagtcatcaccactccctaatctcaagtacccagggacacaaacactgcggaaggccgcagggtcctctgcctaggaaaaccagagacctttgttcacttgtttatctgctgaccttccctccactattgtcctgtgaccctgccaaatccccctctgcgagaaacacccaagaatgatcaattaaaaaataaataaataaataaataaataaataaaaaataataaaaaaaataataataaaatgtgaaataattaggaagtggttaattttgagtacctattacctttgcttttaacgtaatttattcaattgtatttatttaacttgtaataatgtctacattaatactggctgtgaaataactgaaaattcaggaactggctttcacatgctggtataacccagctccaacacatcactgtaacagcagctatgtattcaacagccacaatcacgtagtcggtctttccttcacattttaccatatgttctaaatatatctcaataactttgctttaaaaatttgtatttggctgttaaattgttcttttgatcaggatgctataggaaaattccctttttactaacctgtaaagttctgtgtattcagaataatgaaacttttattaaataaccttttctgaattctttttctggataaccataaacctggattctaacagcatcctctaatatttccttccaagaaaactcatcctttggggaaaaaatagttttataatatgccatagcatgtttctaatataaatggtggtaattgggctgttgatacaactagaaaaactcaaaaaatgataaaagtgcatttgttaaagttaccatcaggaaatcaaagaagttaaatcctgaatggtttaaacaattaaaataaagcctacatgtaaaacatcacctgttactcattttcttctggctataaatctagccctatgacttcctagttgcctggaatacaactcgtagaacttactgagtccctctgagcctgtgtctgtatctgcaaaatagaggcaatcatacctaatttacagctagttggtaagcatgacatagatcacgtacgtcaagtgcattacccagtgtctggcacaaataataataaatattttcccccatttcatgctaatctcagaattttttgaggtaacatgggatttaacagtttattgtggtgaagtctgaatgggagtcaggaattactatgcagaacagaatgcagaacaccatcctatcttctctcttgcagaaagcccatcacttcggatttgtagatctgagagggctcccagggcactggccttttaagcatgaccacttctgccttctccgttgtagctcctcttaaaccagtggttctcaaactttaggatgcatcagaatcacttgatggcgcagggtttcagggaatttgcatttctaatgagtttctaggtcccaggactcagccttaaggaccaagactgtaatctcttcaactcacactcaagcagctccagccatgcttatcctctaaaaatcctctgtgctccacctgttcaccctacctcctctcaactcctagaaaccagtgattttttttactgtctccgtagtgttgccttttctggaatgtcatatagttggaatcatagtgtgtagcattttcaaatgggcttctttctcttaataatatgcatttaagtttcttccatgtgtttttatagcttgatagctaatttcttttcagtgctgaataaaattctattgtatagatgtatcacagtttatttatccattcacctacgaattacatcttggttgcttccgacttttgatacttaggagtaaagctactataaacatccatgtgcaggtgtttgtggaggtaagttttcaaatccttcgggtgaatacataaggggcccagtgatgactgagtgcaagcaatactttttacttacgtggtctcggataaatcacttcacttttctaagcctcagttttctcttctgcaaattgtgataaaaatagcacctcctagagttcccttgaagataaaagaggtaaggtattcaagcacttcaatgcctgatactcaatacatggtaactttttctacatccttcagcacacaactgctcataattccctcatacgagtagggctttaaccttttagcctcgatgatttgttttgctcttccaaatgcctagaatgcccttccaggttaccgtctccctgagcctttggttggaatcctcataccagagggtcaacacgtttagtagaggaattactgaaatagttgggttccaaacactagctctggcatttaccttctgtgtaaattggctgaagttacccaacgtctctgtatctcaatttcctcatctataaaatggggataatagtatctacctcatagagttgttgtcggagccattttaatggcaaaaaccgcaattacttttgcaccaacctaataaatccgcgcatattcttaaagaagttagaacagtgcctggtacaaagtaaatgccagatcaatgttattaatgttaggtgtccgccacctatgccacgcagtgagttccttaggtatagggacagtctaatctccgaatccacactgcctagaacaaaataagcattgcagtacatttgagaaagtaaaggtgtagtggaaaccgagagcgaaatgagggcgtagggagaaaagggtggggaagcttagagaccggtgagggagcagagctggggcgcctgtgtacagggatagagcccggcggcagcagggcgcggcttccctttcccggggcctggggccgcaatcaggtggagtcgagaggccggaggaggggcaggaggaaggggtgcggtcgcgatccggacccggagccagcgcggagcacctgcgcccgcggctgacaccttcgctcgcagtttgttcgcagtttactcgcacaccagtttcccccaccgcgctttgggtaagttcagcctcccggcgcgtccccgcgagcctcgcccacagccgcctgctgacgggtggcttggggaggtcgcggcgcctcgcccagttcccccgcgagtgcagctcgaccctgggcagggctggcggctggcgcccgcgcccggccccaacccagctgcgtgggtggggagctggagggacctcagtcctgcatttcagagtcgaggagactgggcccacgggggggaaagtgccgtgccatgggtgggtcacccaggtcttggtggggcccaagctgatactcagctgtcctcgctccctgaaagcttcgcttattacagctagcagcgtaagggatccacttagccatctcggcctccccagtcctaaaggtctaggggacagaaaaaagctgggagtcggaaggttcctcgggtccccggcatggcagacggggctggctcagaggtctgctctgtggacttggaatcgcacccatcctgtgagcatcttctccccctcacataggcaatttattttattttacttattttttttagaaggtagaaaacagtggatttgcatattgagggttggaagttcaagaagtttgctttttcctgaaaagactaaccgttttctttgcaacagaatcctattgactagatatgaatcattcccttggtatttgagtcaccaggtggaagatttggatacttgattgcagatgaccatatataggaaagtatgcaggtgctgggaggttctgggtcgctggaggcccctctggctactgatacgaaattgcatagcccaggccgaattctttccaaggatttgtgttcagcactgacagcaagaccctgccctccgggaaagatacatttactatgttcaccaacatcattttttaaaatgtaactaattaaaacgttactccatgaagataccacctttggttttcacgaagacggaaaacttcagactgaccagaaagggaatttttaaatgtaaagaaaaccagaatcttgttcccagaactatgtggttgtgtagagaaacctgtttagaaataaccgtagaggaggaagtaaaaggaaatgatgtaatccctttcaggaaaggatatattgaaattctgtttaagtcatttggccttcgctgtggagtaattctttacatcttaaaagttaaatgatagattagtaataattcttaataattttccagttctgctggatcaatgcatattaagtgtcagatttggtcaggtgtgggccaggcagcagattaaggcagaagcatgggggttaggttcatacctttagagtctagctgcctagatgcagtaggggtccactcactagctgtgtgactgtgggacattaccatacctctctgggctccagcttcttcatatgcaaaacgaagatgtaatacctaactcactggatgattgtgcggcttgtattaaatcattcatttaatcaataagttttttttttaaatatctaccgtgcaccagtgcacacagataagaagaatctccagccctgtgaaactgacctcgttcaatgctggcaacacccccttcttcactttttacagatgaggaaattgaggcccaaagaaattgtgtttagctttaagaggcaaaatgagaaccaataatgccttgttttcactgtacagatggtttgacttctgatttttagacttcagaatagtttatctggctgtaacccctcataagtcaaagagcatgtatttagagagatgcagtattagactctaactggagagttgactgccctaggctacagagagcctgaaaaaaccaaggtgaaatatttccagagactaatagtgtaatttcccattgaacttttctctgggggtgtcagggaatttttagaatattttgttcccaggaagggtgggagcaacttgcatttctaaatcaaccctggagatatgccagcatgtttgaataatatctatttaagaaaaatgtgtctggcttcccaatcaaagaactgtgcctttcacctctgcaccccaccaaggactggaccacctcctcaaagagcagatgtgtctttataacagactgtaggcttggagccttgtaaaatgtacatggagtttcacaatcaagcacaaggaatccaactgaaggcagctaaactttgtgttgatttggtgaggaggagtaaaatcctgtgtttttgttgttattgatccccgtagtggtagcctgtcagtaatcagcagagttctcctggactttaaataagtcaaaaattggcttttcaggaagtatatttgtaagcatcttaagtacaaagatttttttctgtctcttgtcttgaagtcctcacaggtctagcacagtcccttgcatatggtagatgctcagtaaatgtttgtttagcaaatgggatacccaatgtcagatatatgctcttcctgagaaggtttttctgtgaatgttgacatctgttttctggattcaagattaagggttggactaagattattgtgttctgaatcacatattgataccatttactaattgttttcttttaatagattagtgtgatctcagctcaaggcaaaggtgggatatcatggcatctatctgggtaagtaaaaattaagccttcacaacacagtaacatatatgagtcaaaccaaaacacagaaggtcaagatagcaaggaaaattttaggaaagtttttaagtttatctggcaaaattaacatgctagaaaagccagaggatgtcaaaaataataaaatatttttaaaaatgcattgtaaagttacatagttaaaataacttatgatgacaccaaggcggaaaggtcaaaatcagataataaatttagtatataatttgggaatttattatatgaaaaagatgacatatcagagaagaagagacggattattcaataaatgttaggaaaacttctagctgtttggggaaaaagtaaatctgtattcctttttctccttacaataaaataacttccatgtggataaaatacagaaatgaagaagatgaaatatgaatgggccgggtgtggtggctcacacctgtaatcctagcactttgggaggccgaggtgggtggatcacctaaagccaggagtttgagaccagcctggccaacatggtgaaaccgtgtctctactagaaatacaaaaatagcccggtgcgatggcagatgcctgtaatcccagctactcaggaggctgaggcaggagaatcgcctgaacctgggaggcagaggttgcagtgagctgagatcatgccactgcactccagcctgagagacagagtgagactccgtctcaaaaaaatagaaaaagagaaagaaatatgaatggattgaagaatattcttggagtggggaagatgcttacaactgtgacacaaaaccaaacgcctaaaagaaaaatattgatctattttaactacatacaagtttatcactatgacagccaacaatcccattggtagaggcagaagacagctcgcagggaaaaaatatttgcagcacattagacaaaagacttatttccttaacatacaaataacttgaataaattggtttaaaaaatgaacttgacagaaaaagttgtaagggacataaacaggacataaaaagaattataaatgtccaataacatcagaaggtgctacaaggttggacacagtggctcacacctataatcccagcattttgggaggccaagatgggaggatcatttgagcccagaagttcgagaccagcatgggtaatatggcaagacccagtctcttaaaaaaaaaaaaaaaaaactttaaaaattagctgaacgttgtggggtgtacccatggtcctagatacttgggaggctcaggtggtaagatcgcttaagcccaagaggtggaggctgcagtgagccatgttcataccactgtactccagcttgggtgacagagtgaaaccctatctattaaaaaaaaaaaaactcctgcatctcagaattgaaaaaaacataaatatcatgatgagaaacacttttctacttaagagattggtgaaggttaaaaaaaaaaagtaatgtagaggatgtggcaaggtgatatttttattctctgttcatgggagagtaaatttggtacacttttggatagtattttggcaatatctctcagtccttaaatgcacatgtcctttaaacccagtaattccacttgtgggtatgtatcttatagataaacttgcataaggttgaaaaaataggggcccaagtacatttgtttgtattaatgaaaacaaacatgcagacagcataaatgtccatcgatagggtaggaataagtaaattactcatttataacttacaggcatttttatgtgatcattaaaatgaatgggaaaaaagtggatcagctgtatgtgaattgacattaaaaaagtcccaagatgtaataatttaaaaaatcaacttatagagtaatatgtacagagggattctgtttaaaagaaagaacaaagaaaataaaaaatttacggaaagactattacatcaaaactttgtggaaaggtggaattgtgagaaaggaattttacttttcaatatatcaccttctgtactgtttgatttttttttttaatcatgagcatacattatattttataagtaaggtggagggcaagtttaaagaaaagcctgtgcagagatgtgaccatcccttggcctggcgtatggatggaaggtgtgctgttggaaggctttgtttggcccaagttactcccttctcactggctaggaggctaaactctcatctttcatctgaaatccctgctgcttttatgaacatatcatagaatcagatgaaaaaagcatctctccaaaatgctggtgttaaaaaaaaaagtcgccctctggccctcgcccatgagtaaattaacatggaattatttgggcaggctctcctgctgacaccttcaaaggcgtggcacatttctgaagggctaggagagacccaagtgcgtgtgatcaagggtgtattcatttcctattgcactatgacaaattatcataaatttagcaatttaaaacaacatccatttattatctcacagttctatatgttagaagcctgaaatgggtcacacagcactaaaatgaaggtgttgttgggactgcattcctttctggagactttgggaagaatcctcttccaagcccttttaggttgttggtagaatttagttccttgtagttgtcgaattgagttcttagtgcttgctggctgccagcagaagctgtctttggctcctggaggtctctgcctgtccttgtatgtggcccctgcatctcagaaccagcaatgatgcatcaaatcttacttatgcttggaatctctttggcttttctttctgggggatctcttttctgccattctcttctccctccagctgaagacatttctctgcttttaagggtgcgtgtgattaaattgggcccacctggataacacgggctaatccctgtgttttaaggtctggaaccttaattatgtttgcaaagtctctttcatcatgaaacacaatacattgacaattcccaaggattatggtgtatacattttaggaggctgttgttctgcctaccacaggggctaggagtatggctacatcagggatggtagcatttggcatcagatagcaggaaagaggtggggaggggccaaaaacaggaggctaacctgagcctggagggcaaacccacacgtggagaaagaggccctagccaaagaagggctcctactgtctctgggtttttctttcttttttttttttttcctgtttacctcctctccctcaattaaagaactaatacttatgagtggctcagagagcaaacattaggaacaactcagaactgctatggaaaacaagatagcaattctccaaaaaattaaaactagaactaccacatgctccagcaatcccatttctgggtatatatccaaaggaaatgaaagcaggatcttaaagaaaggtatctatacacccatgttcactgcagtactttttacaatagccaagaggtagaagcagcccagtttccattgacagaagaatgaataaacaaaatgcggtacacacacacaatggaatattattcagtcttttaaaaacacatgttgtgtgagaggaagaaaaccctgtcacatgctactatgtgggtgagccttgagcccagtatgttaagtgaaaaagccagtcccaaagagacaaaatactgtatgatttcattgataagaggtatccaaagcagtcaaattcataggaacagaaggagactggtcgttaggaatgaataaggaaagagaaaaagaggagttgtttaatgtgtagagtttcagtattgaaagatgaaaaagttctgaagatgtttcaaaacaatgtgaatattctaaccactactgaactatacacttagaaatggttaagatggtaaaaaccctcagatttccaattgtaaacattcttatcacaaagttttatgtgttctttttttctctctgccacacaaaaccacatacacactcaaacataaataagcaatcaagtcattgcatttctacaaaactgtatacgtgattatgtgtatgattaatttattacagtggtatgatcaagggagaagtcattagttgcaatttcaacgcattaccattgaagatgaaagaatggctggtttcttaggtcttttatattctatctaggagtgttgcaaccctaccattgtttcagatgaatcaacaatctatgttgcattagtatttcctttgtttgcaaattttgaatatctctgttcagacatatgttctaccacttcacccttgatgaaagggcctgatatcttattggtttgtactccttggacttagagtcccttgtcatatgttgcctgtaggtccacagcaagcactcaggaagcccacaaattagaatgtcttagaacgtgactttttattaagctaccacagcagtattttttctgcgtaccttctgttatacaatgctggctttcttaggtaaatactctgagctctttcctccttgatcaattcctaacttacatttacagaataataataaatgtaattcctattagtttgaactctcaaattagaatttttattatggtactagaatttttctttctttatttctttatttttttttgacagagcttcactgtcattcaggctggagtgcagtggtgcaatcacggcttgctgcagcctcaacctcctgggctcaagcgatcctactgcctcagtctcctgagtaggtgggaccacaggcatgcccccaccatgcccagctaatttttaaaatttttttatagagatgggaattcactgtgttgcccaggctggtcttgaactcctgagctcagctgatccacccacattggccttcggaagtgttgggattacaggtgtgagccaccacacccagtggtgctaaaatttttttaaattaactcacaatcattgtaatcaccatgaactgttagtaacatcctaacttgggatacattctcctttcaccactccaaactctaatttacaaaatgaggaaagggaatatagagctactctgcaaccaagggataagagaagttttataaaaatatattacctaaatacaatgcctactaactttgttttgaagttcatccaaaacagttaaacaattaaagcagcaagtacctagtgcgacaggctctgctgggagcagaatgaagacagtctaaccaaaattgtaactctccctttcagaactccctaatcatttaaaaggtaggctcttgagcaaattgcttagtctttctctacttcagtttcctcatctataaaacaggtagggtaatagtgcttatctcatctacggtttgtaagcattaagccagttcatgtaaaatgtattagcagtgcctggcatggagtgagcactcaataaatgttagttttaatcagcatgatttcaatatattaattttattctaaaatgtatttcttgccaaataatatcgctgcaactgtttttgtagaggggcttctgcctatttcctgggcctgattttattacacatcaatagccccctctccccattggaatggttctttcagccatctaaaagagatgtcatgtcctcaatcagattccttctgaccactcttgttttcaatattttataatattttaaacacatatatatttctaaagacataaaatactccctttccactcctagtgggcatactggaatacagttctgacactaactacccagcattagcatcagattccacaggattaagggttcagtcctctgcaaaactgccctcacttcagatgtcagttcaagtgtcgggaatcacctgcacttctggccaactggctataaatttaggagttttcatgaccctctgaaattaaagaattccccagaatgattcacagaactcactgaaagtgctatccttatgaatgcaagtgtattatgagggatacccatgggcaagctctggaagggtcctggacccagagcctccatgccctctccctgtggcatcagggcacctcaccctcctttgtgtcagtgtgttcaataaccaggaagctcctctgagcctcagtgtccagaattgtaattggagttccattatgtagacacgaatgattgattaaattatttgttacatgattgaactcaatctccagcccctctttcctcctcagaggtctggctgaccagagttgcaaccctgtgatcacagggctaatctttctggagaccagccatcattctaaggctatctaagggtctaccatgagtcaccccaattgcatcacaaagtcactcctatcactcaggaaattccaagggtttttgaagctctatgccaagaaccagtgcaaagaccagatacattcctaattatactacacatctataactcacattaaggcacacagtttccaatatatattcttttatttttgactaacattatattaaaaataaataaagttatattaataccaatggccctggctatttatgttgatcagaagctctgattgttagatgtatttttcatatatgggaaaaataggaaaatgaattaatgtttggtaataaatatagattagcaaggcagaatcattcaaaacatgggatccatatagaagataccgaaaaagggatccgcggtggtagaaatgttgggaaaggctgccaggatggacccttgcagataggaaaagctaatctatgatcaagtgttcatggtgagagaaggcacagccccccttccctcccgaacccttcctctctggtgggaacaagattggtgcagtttgacatatgaggacacagtcatctcatttccactgttaacccagaggaatggcagtagtggtagaggctcttaggaaaggtgcaatgtgctaacatgagagagaaatttgggaagataatgcctttcaaattctgtcccatagaagacaccagccctgggcatttggatgctgttgttcctgggttcaaagagtttgtgagtgtcctgtccagtttcatactccttgctttgacacagacatcccattagacctttctttcctgatgtgattgctcttctttgctatgcaaatttaaaacgtgtgaggagaaagctgtgttcatgcatgtgaatatgctgaactcctcctctggtctccctcacatctaccacatccaggaatggaagatcaagcttggtgactattttcactgaaagagacttttcacatcccaagcagaacaggcatctttcctggttaggtgctgttcaagtctgctgtgtgttttaaaccatgttccctgaagctgctttaggtaaatattggcattcagacaggtacacaaatggtcttttgcagaaagttgatttaaaacaggttagacctggatttcaaatcaaaacatttaagctttgttttgggacaaagcctggaaagtttctcatctgagtgagaacagagaggcttcctaggaatgagtggaatgaacactaaaaagctgttctttgccattctctgatgttagcccaactgtgaaggagggagggtccctcttttatatttaatcatgataaaactatagtatgcaaagctaatgtttaaccattggaaaagcctggtaaatcagaggtaaagaggaaaataaaaagctctagatcagaggaaggaatgtaaagtggagaaggtatgatttgttctcttgaaagtctatttttttggtggatgtaaagcagttagaaaaaaaagaagtatatagagtactgagcaataaaatgaatacacaggtctcacgtgaattataagagaataaatcaaaagaggagaaaattctcaagtctatcccttcattatcagatctttatttctttcatttgtaactctttgtgtttgattcagtacctcacgtaggttctggaggcatgtttaaataggagtagtgacagtcccatgtgaacagggtttaagaaaggtgaagattgcatttgtagaatttttaccatatggcatggagctctgaaaagtctgacaccggcatttgagaattattgaaagaaacaggatgcagaacaagaaagcatttttaattcatttattcactcaactaatatttactaactatcttttatatgccagatattggctctggcaacacagcagagaaagagaaataaaaaggatggcacctacattttattagggaagacagacaataaatgaagaaataaatgtacagtataaaaagacagttttaagtgctctggggaaaagtaaaggtggataataaatatgatggggggtgtgattttctgctcagatataggaggagaagtcaacgtggcatgagatggtgagctgagggaatatctcgggaaagagcagccaggcagacggaatgataagtgtaagccctgaggcagatgggcaagacacatttgaatgcaacaggaagattcccacgaagcaaaaacagggatacaagattacaaggggattgggggaggtattacaattctcttttatggtactttattatcctccaagggccacagagagtcccaagaagtcttcacatggactgttcaaggagtttccattctctaggtttactttacattaggaagcattcttaaatttgctgcaacttcttgttgggattatcgctttttaaaaaaactcataaataacccataaaataatgcatttaccatcatgtccagtagacatcatttaccttggccatttatgtaagaagtattctgcccagaatattacaaacaggagacatccctgatcccagtccctcacaggtttctcatcctcataggagtgaggtggatagagtaagtgtccccaaatcctgcaaagccagtgctgtggtctaaatgtctgtgtcgttccccctcccccaccaacctgccccttattcataggttgaaatcctgaccttcaggatgattgggcgatgggatctctggggggtgattaggttaggtggggattattgcccttttaaaagagtctgagggagcttggtcacatctgccatgtgagaacacagccagaaggtgccgtatatgaaccataaagtggaccttcactagacactgaatctgctggcaccttgatcttggaattttagcctccagaattgtgagaaataaatttttattatttataagacacccagtttgtggtattttgttatatcagcctggaatgctaagacagacagccaccgttctctagccaagggccatttaagaagatgtggattctgcacttcagtgagccaaattccctatatttctccatatatccaggaagatataaattctctatatattcctgttagattgcaggacccttagacagggacgtctcccgcagaagttacacatgcacagggctgagtatgtggccagaatagccatgttagtcttcaaatctttgtgacccttggccaagagaatttggtcaagaactcttaactaggttaagcactttactttgattgtagaacaaagagataatctacaaatactggtgctagatgactcaaaagaagattaatacaaattatttataatctgctttaaacaaatacatgaaaattattctgagaaagatgttcatgttaataaagtctctggggaggccaagtgtttcaaactcaatccagatagttgggtttgctacctttgtcagagaaaccctgagcgcttggagagacaggaaggaagatgtaacagaatcaccagacacagtcatgcatttcatgtctccagtgtactagaaaacactcagcttctgaagtatctcccaaatctcccagaatacaataggaactttgatttctagactattgatacttgaaggaagcaactcatcgggcagccaaccatctagtgtagagcttggagaaagtccacactgtgagatgtcattgtcttgctttcatattcttacttagcaaactaattcacagttatgtattaagcccctatctggggactgagcactgggctcccagctggataaataggaatgagtgaaacaaatgtctctgccttctggaattttattttagagggggtggagagacagatataaacagcgagaggtattactcaatgctgagtgccctaacaatggagaggtggctgagatgcagaataacagtagaagacctactcagatcaagtgccaaagaagatctgttagagaagatagtctttaaggagaggactgaaggtaaaaatcattccagttagagagaacaacacaaaccaaggcattaaggtgggaaagagttcattgtataccagcttgactttcaaagaactgaagtgtgggaactctacctctcatctggagagagtggctccagataagagtcatgaaggtggttgggccaaaccatgcagggccctatggaccagtgtaaggagtttggactctattcagtgtgaaataggggagtgacaagatctgacttagattttttttttttttttttttgagatggagtctcgctctgttgcacagaccagagtgcagtagcacgatctcagctcactacaacctctgcctcctgggttcaagtgattctcctgccccagcctcctgagtagctgggattacaggcacctgccaccacgcctggttaaattttgtatttttagtagaggcagagtttcatcatattggccaggctggtctcgaactcctgacctcaggtgatccatcccaaagcacagagattacaggtgtgagtcaccccacctggcccgacttagatctttaacagatcccttggctgctatgtgggaaatggctggagatgggaagtaggaagtagagaggaacatgactcagatgttcaagtacgggagagcgatgattgtgagttggacaagagcaggagcaaagaacctggggaggagcgcccatgcgattatcttcttaaaataatctcagcaggccttgctgatagatggaattcagagggaaatgcaggtgaaggaatcaaaggggactcccaggtttctggtggctgatgattgctccttttacagggatggggaaggttgaggaaactgagcaaattggcgatgagcacagaaactggagccagattgcctaggttcaaatcctggctgtgccacaaactacctatgtgaccttggcgagtgtcttaaccgctctggaccctcttttttctcctctataaaatcacggtattaattgtacctacctcatagggtggttttgaggattaaatgatcaggtatatgtaaaatacaagtaagtactatgtaagtgtcagaagggggaagaaatagcttgggaggaaacaatgagttgatataggagataatcaaaacaaatacatggaggagacattgaatatacaagaccagtgctcagaactgaagtctgggctagagctataatgtgggatttttctgtatacagaagagggagtggaagaaataacccacagcaggattagagggaaagaaaagagagagccactttccactttagaattgcgtattttatagaggtcagacaaaggtgagtgcatcctggagaggcgggaagaaacctaggaggtgaggcacaggagccaatggaaggcaggctagctgtgagtgacacatgctccaaggggtcaaggcttcttattataactcatgtgtcatggaaaatacaacatcaatggcttgtttgtccctgtcttccctgatttctgaatctcattcatctttctactccatcccacaccctcctctgttctcacattccagtcctcttgctctgacactgccctgatgatgaaatcactctatttaaaaaagaaaagctgaactattcacagtagcaaaaatatggaataaaactaaggtttatcaacagaggattgaattaagaaaatgaatgtagaatactatactatactatactatactatagaatactactcagccactcagccacaaaaaaaaaaaaaaatgaaatcatgtcttttgcaggaacatgaatggaactggaggccattatcctgagtgaaataactcagaagcagaaagtcaaataccacttataagtgggagctaaacaatgggtacacattgatatagagaacggaataatagagattgaacacttcaaaaggtgggagggtgggaggggctaagggctgaaaattacctattgagcacagggctcactagtcgggtgacgggtacactaataaaagccaagacttcaccaccatgcaccatctgcatgtaagaaatctgcacttgtaccccctaaatatttttaagaaatttaaaaaagaaaagctgaaaagtatgaatattttttctttgagtgagcccaagaacaaatataaactttttcttcagaactttggacacattatgaacaaagccatgttgtcagcctggcatatctcagggatcccagcgtctgccagtcttgcctgctgtggacgttcagcaccgcctactccttactgccctgtgggctgcagagcatgcctgcggtggtggtgggaggcttctgtttgtgcatcatcttccataggcacagtgatcattgccagccagtggcacttctaggtgaggaggctcttaggcgaggcccccaggatttgccctgtaggaaccgcttggttaccagtatttttctctggcctttacctgctgtattagtttcctagggctgctgtaataaagtaccacaagctgctggtttcgaatgacatgaatatattatctcacagttctggaggccagaagtctaaaatcaaggtgtggtcagggccgtcctccctctgaaagctgtaggggagaacttcttagcctcttcctggtttctagtggtttactggtataggggagtaacagtaatccccataggttcttagttggaaagcacctttgttacaaaagacagattgacaagagaaaaccagacagaagtttattaacatgtgtattttgagtatacatggagacaccaagagaatgagtagttttcagaggtggctttgaatttcagcttatatagcatcttcaacaaagaacagtaaattttttgtaacaagacaatagaaaaggacctttgaatctctgtgggcagcaacttgcaggtggggcagtgaagaaaggcaaataacttgcagataaaggttagttagtacagcttgctaatataaattcttctaataccattgtcaggctgataagggtcttaaactatcttcagtctttaacctttgttctccctggtagtcaggagggcagaataccttttgtcttcataaatctttgtcctgcttttaggcaaatggaggaaagatatctcttgagtatctgtttcttcttgtcttcaacaatccttcatgttttgaagaggcacattctggtctcatactggcagctcgcagctgcgtaactccagtctctgccttcaccatcacatcacattctttctgtatgtctctgcctttacatggctgtcttataaggataccagtggtattggattgggggcctgccactgtgacctcatcttaattaattacatctgcaataacctggtctccaagtaaggccacattctgtggtactgtgggttaggactttaaggtatttttttggggagacacaattcaacccataacacctgcctcacttgactgcattttatttcagggctgtttacagtaaactttctttggttttgaaaaatgctttttactggaaaaattgaacaggaagtcttaacaatttccaagtttgattgctttattttttataatctactccatttttccttgtatcataaagcttcatgacccaacatagcatcttgacattgaacagagagccatcgtttctccccggctctttgagagctccttgtcctggagttttatctggagctttgatttgatgcctcaatttttggatgtggcctttatagggctttctgaagtgatgagtgatctggcttcaccgcatcttcaaaatgtccctgcagcaactgctattcttgctctgtagcatttggctttaaatatgtttcatatcaacagggttggcaccttctgtttttctcttccactcatccttctgaatgtaaatgtttaacttcttgcaaacacagtacactttgcataaagaaataggtacaactggcttttgtgagtcaaaaacagactggcctctcccaggggcaatagcaaacagctccctaggcccagcttggccaagcagtggcttcaaggtgtcatgtgctaaggctgacctccgaaggatgattttagaagatcaagggagattatattgtcttgaaaaagatggtttaaatgagatgaaggctagtctagtttaggagcaaagactgttggaacagaccacttactggctgtgggaacttagacaagttacttaatcatcagtttcatcatctgtgaaaaggatttattatatctaccttataagtttattgcaaggattgaataagcaaatgcaggaaacgcgcttagcacagtacttggcacatagtgattagcagcaattgttcttagtataaagagctcctgttactttccccctttatctagacattctttgctttaatttgttttccaactggcttcagcagcatttttcttttggaggcatctgaaggtcaagtttcagaaaaggaaagcaactaaatgtgtttaaatgtgtggatggaaatctgatcaaaggcaatttttttttttttaaatagactttgccaagtattcaggtgatgttctacgctagcactgactatgttaggacactagggttactggaaataaactcagccaagtattgattagtaatataaatgtcaaggaattaagcttgcagtggagcaggcaatgcaagcagtcctgtttggctgtaaaaatgccgacattcctgaagcgatgagctcatcattaaattcttcatcttccacacccataagagaattcatggcttgtttgctcatttttgctttggttttctagacagctaagaaggaaataaagcagtgcttcttaaactttattgtgtactagaatcacctggaaggtttgttaaatcgcagattctgcatcctggccctgcagttgttggttcaggaacactggggttgggcctgagaatttgcatttctgtcacattcccgggtgatgctgatgcagctgcttcaggaaccacactttgagaaccactaagatgaactccctcgaggcattgtgatgtgacatagagcagggggcattttagtcataaggtgatgggtttgagtcctggggctgtccttattagcagagctcttttaagcaaataatctctgtgagactgggtttcttccattttcaattagaaataataaaattcacctcatgaaggctcttgtaagagttaaatgtttgtaaatcactttgttcatgtattagttttaaaagatttcattaatctttgattgtaagattattttgtaagtcatgtaatatttccgaatgatttgggcaaccaagtctatcaaatgaataatgccattcgtttaaataatggaagcagttttaaatatttcactaaaattccacttcagaattcccaagccctttttcaagttggggtgtgtgtgtgcgtactttcttccccccttgtaattaaacaagttattcctcccccatttaattcttgctaagtactaaattgcataataaattgggaatttcctccttctctaattctgtgcattggcattttagcatattttgatgtgtaggtggtaaaggccagtgaaaagttcacagctggagtgcaaaccctgagttttcatgatgcatgaacaactgggatctgaccacaattttgtctttttatatttagaatcagccacgtcaatatctgcatggcacagaatcacctgggagcttcttacacatgtagaatttagcaccccatctctaaaacatatgattcagtatatagaaggtgtgtcctggtcatatacatttaaagtatcactccaggtggtacagagactgcacttcatgaaacaccaggaatggtctggaatagtctagtttgcttttaaattcagcctctgcctgcaactagctgtgtagacttgatcaaattctctggtcttcttaaatcttggtgctgtttatgtgaaattgctcactctcatttattggggctgttatgcagattataattaacatatataaagtgcttagcatgtaaagtgtgctgggcatgaagcattcaaacaatctaacattggggtagttcttttacaatgccagacactggaaggtggacaggtaagatcaacacaaaagttcctagatggatagaagtgaaatgaagccagttggctctgtgaatccataaaatatttatcaagccttggagaaagagaattcatcaaaaattatattaaagtgactaatttattttctttctttctttctttctttttttttgtgagacacggtctcactctgtcacctagactacagtgcagtgacacaatcacagctcactgcagccttgaccttctgcgctcaagtggtcctcccacctcagcctcccaagtagctgggaccacacctgcacaccaccacacctggtaattttttaatattttgtagagacagggtcttactgtgttgcccaggctggccctgaactcctgggctcaaatgatcctctgtctttggcccccgaaagacctgggagtacaagagtgagccaccatgtccagactaaagtgactggtttgttacaggtatcttcaggtcaggaacattcacaactagtttctaacttgcaattattttctaggttctaaagttcttattttagatgctataagattaaacagtgtttgagtgtattgaaatcaattattcagtctaatctaatgaatcagcagactatcatattttactgtgccagaacactaattttccattcactttaatgtgacagataatgtcctttcatgaaaatattaaacccttcaagagagccaaaatgaacccatattaatacaagacaacagagccaatactattcagtaacaggatagaaaaatgctgtttaaaaggaaatattattactgtaaagacagatttttattcaagaagttaggaactaccacataaatctacgtttactttgatttttctcaacatctttgtggctgtccttctttagtctcataagcaattttaaaatattttttctatattatggtctttcccagcttactgacatgcttctaatttacatgcttaaaattagtagtgtggcattttttacttccttgcaattcctgaagatctatgatgtcagtagagcttttagaaggtcttctaattgcacattcattaaacaaagcttaagaacagacagtcctaagggggttttcatttatggatcatttagtctgggattccccaaggacaatggtcaacattaattaaaacatcttgaagtctgtaaaccacagttacttctgtgcgagatgccatgatgagctttgaattatcacttgaaaaataagaagatttaggaaatttcagctttcttgttgctctcctgcaaatgctactttaaaacaaattttcttcagtgtcaccaagattaacacaacttactgctctagagaaccaatgttttatatttgtaatttgttacacaaaagaaaaagaggactcctgagatatggggtagatatcatattccctgtgtctggggggtagaccatcacttcaactgtaactgccagatgggttcttcctgctcactgtgcagacaaaatcagtccactgagaccatcacattgcagtaaagaaaaagtttaattgatgccaggctagccacaccatgtgggagacagagttattactcaaatcaatttccctgaaggctcaaaagttaggggtttttcaaggttaaaatggagggcagggggctagggaaggggcatgctgattggttggagatgtaattataggggtatagaaaacagtccttgtaggctgagtctgcttctaagtgggggccaccaaaggagttgctggtctgggtggggctgtccagtagtcagaaatgcaaaagcctaaaagacttctcaaaaagccaactgtaggttctataatagtgatgctatctgcaagagtaattggggaggttgcaaatattgtgacctccagaataatggcaggtaattatgtaactatgcctgcatcttagtaaaattcaggcccctctcatcctcctaacttggtagacttccattaattttacaagggtagtttagcttttgggaagagctagtatcatttaaactataaactaaattcctcctgaagttagtttgccccacacccaggaatgagcaaagacagccagcctgtgaggctagaagcaagatggagtcaaccatgtcagatttctcttactgtcataattttccaaaggcaatttcagagccactcctgaagtggtaggaaggtgtgcgaattatgggtttgtcatatgcctctcatatgcatgaaggaatatgcatatgtaatacaagaaagatgtcattttgaaccaatgggactttcaagtatttccttctaggttggacaccgaggaacagtaagagattatccagactttagcccatcagtggatgctgaagctattcagaaagcaatcagaggaattggtgagtgatattttacaattcctttcttaatgttgaagcaaatcaggcaagttacaatctaaaagttcagtttgctcagattggcttactcaatttaataaattgtcaggaattttctaaaattgtgaaataacgaggaaatatatagagaacccagttttattaaatcttaacatttatcatatttacttaatattaaaaattaccactgatactagtggtctaggggagatccccaaatgccgggggaatctcaaccctggctggtatccagactcttgacaccatctagagaagaaattcaaggatgggtcaaaaaatactgaaaacacagagatttattgcaaagtgaaaaatacacactcaggaaaggggagtgtgagtgtactcaagagacagtcgtgcacaagggggtttggggctgttgcctttatgggtttctttaaccaaggggtggaatagtcatgaagattctgggaaaaaggtgatttcttgaaactgtagtgccacccctttttacaccaaatgtcggtgtttccggaactgccatggcactggtgggtgtgtgattgagtatgttaattagcatataatgagatcctaggagaatcctaggtcaaatccagcgccatgttgggtccagtgggtcttagccagcttgatccacactatgggttttcagggtcatatcagcccctagtttctgcagctatttcaacagtttccttttgctagtcatgtgaaactgctgcctggaattttctgttctcctgtgaccatcctgtattagtcctatctaaccaccaccaccactgccaccaacaacagtaataattatcataataaatcattacaaatatggcccccttggttgggcatggtggctcctgcctgtgatcccagcactttgggagggggaggcaggaggatcactagagcccaggagttcaacaccagcctggcaatataaggagggcccttctctacaaaaaaactcaaaaaattagctgggcttagtggcttgggcttgtgatcccagctacttgggaggctgaggtagggggatactttgagccagggaggttgaggctgccctgagctgtgattgtgccactgcactccagcctcgatgacagagtgagagtctatttcaaaaacaaaacaacaacaacaaaaaaacccaacacaatcccgtcagttcttcctggatttcactcttgcccctttccctagagataaacaccatcccaaattagagttcattcccatgaaacttttaataccataactacatatacatgtacatattgttatgcatggtctcaaacagcataaaatgaaatcatactgtatacattcttctgcaatatgtttttgtctcttaacattatgtttttgagatttatccatgttgatatggtgagctctagtgcattaattttaactgcatggtagtctattgcatcactatatcagaagatgggaatattgatggaacatttaaattgcctacaattcttttatattgcaatataaaaatgctgcaatgaatattcctctcatgtctcattgtgcatatttgctagcatttctctagaatatgacaagaactggaatttccacattgatggggatgcttctcttcaaatcaactagaaattttgccatactgctctctgaaatgaatgcagaaattagcattcctttcagcaatgtacaagacttccttttgctccatattctcaccaacacttgctatagtaagactattccatttttctaattaagtgtgtctaaacagtatcttatactgcatgtgtgtttgtttcctgtctctactccaatgactgatgcagttaagcatcctcacttgtgcatctgcttccactttcatatgtcaataaaatataaaatatattttatctatttttttcagttggtttgtcttctttatgattggcaagagtttttttataattcctcaatacagactttttaaaaaatattacaagccatgaaaatatttcctataagtttatggttttttttttaacattggtgacatggtttggccctgtgtccccacccaaatctcatcttgtagcttccataattcccacgtgttgtgggagggacctggtgggagatgactgaatcatggggacaggtctttcccgtgctgttctcatgatagtgaataagtctcacaagatctgatggctttataaggtggagtttccctgcacaagctctctccttgcctgccaccatccacgtaagatgtgacttctcctccttcccttccaccatgattgtgaggcttccccagccacatggaactgtgagttctccattaaagagttccttcataaattgcccaggctagggtatgtctttatcaacaacgtgaaatggattaatacaattggttacagtaatttttattgcatagaagttttaaattttagtgaaatcaagtttaccaatatttttgtccaggatttatgcttattgaatcttttctataacgaagtcataaagttagatattctcctactttttttttcaaagttttgaaattttatttttcgtattatgatcttaaatctacatggaattagtgttcatggatggtatttaaaggtgtctcattttattctatttcatgtggacatttaattgtcccagaacaatgtattgaagagctcttccttttcacactgatttgtacgtaatatcacctatgttttatgcttccctatttttctcttctctgttatgcttcatttatctatttggccctcccaacaccacattgtcacaattattaggattttataatgacactaaatatctaccaggcaaggtctttcttggctctttgccctcctctatgaattttaaaatcagcttgtcaaattcaataaatatactatattagaactttatatcaatataatattatgttttttctgcctgtttgaggtttattttttccatttttcaatgtaagttatttcttcatttatctcttgatttccttattttttttttaagagagaagggcttgctctgtcacctaggctcgaatgcagtgatatgatcacagcccactgcagcctcaaactcctggatcctatggcctcagcctctggtgttgctaggactacagatgctcatcacaatgtgtacctaatttttaaattttctgtagtgacagggtcttgctatgttgcccacgctagtcttggactcctgggctcaagtaatccttctgccttgtcctcccaaagtcctgggattatagatgtgagtcactgcacccagcctgattgccctatttatatctagtgttgaatagactgtttcatgaggttaatagtctttaaattctgtcacctctttttaaacattatgtttcttcatgaatttgcactttggcttacaggccttctttaagaaggaggttattgtttatgagcaccacttctgataggttctgagttcagaatgaggtatcataacggtgtttgcattagggatgggtcagacacagtctctgaacctgaggcatcttggcttagtttttgatcttgggcatgtttaaaaataagagatgagaaactgccaggcatacaaactacacataactgcaggtagtttggtatagttgtagtctaggtgcataggttatagagatgcagagagggggtagaaaatgagaacaaagacataaggcaggagagatcataatgagctgatacatgagctaaggggcttaaacttcatcctgaagattacaaagagccattagaattttagccaagggggtgacatgatcagattgtatttttaaacatttacttaggcagtagtttacaggaataattatatgggagtcacattaggaggtgatttaggttatccaggtaaaatatgataaggacacaggagcagagggcatgcagaggagacgacaaatttaagagatgcagataattgctataatatagagaataagataaagaaaggaatctgagatgattcccagggtttttgcctggatgactatatccatagttgtggatgagggaacataaaaagaaagacaagtcagagaggaaatacaataaattccacccagaatgtgctgagtttcagatacttgtgcagttgtggtggccggtagtgtactgacacagatgctgggtacaatacacagcaccaaattggtgctcagacccacagagcacaaatacactttaatctgattcggtatttatttaactatgtgtaagaatacaaaaccaaagacacagaaaggcagcatctttcattgggaggcccagcagctaaccaagtacacagaagcttttgcttcatcattgatgtaagctgtgtaccactgccacggaagtgtgtagatgaggtctgtgagggtcaccttgacacaaagaagttgagcattgagttccaggtgctcttttatacctctctagtcatgcatgctctaggcctgcaagccaattcacagcttcccaaaccaggtatcatcgtgggttgggaaattaattagacacaactttccacgtttttcttactactgtagtcaccaagataagaatgaccttgaggtcattcttaggcaggccagcatcagctctggcctgatgttaccttttgcttacaaacaattcattttgtatatgggtttgaaatttatgagagaggccgggtacggtggcttacccctgaaatcccggcactttggaaggctgaggcgggtggatcacctgaggtcaggagttcgagaccagcctgatcaacatggtgaaaccccatctctactaaattaaaaaaaaaattagctgggcatgattgcacatgcctgtaatcccagctacttgggagactgaggcaggagaatcgcttgaacccgggaggtggtggttgcagtgagccgagatcgtgccattgcactgcagcctgggcaacgagagagagagaaagggcgaaggggagagagagagcgagagagagagagagagagagagagagagagaaagggagggagggagggagggaaggagggagagagggaggaaagaaggaagggagggagggagggagagagagatgtggaagaaatgcatgagagagatgtggaccaaagatagaaatatatgttttggggtcagagatttgggttcaacttcttgctggaccactcagcagttgtgtgactttggcaaggaagataagttcgtgtcttcatctttagtacagcgggcccctgtgaatattaactatggcaatgaataaaagggtgtttcatgcagggcagattttcaataagtgttggttcctgttttccagaggaagaaatattttgatatcaagtatgggagagagataaaaggcaataagacagtaaccaaacctcataaaggtaaaaaagtcaagttcaaaagtagtaggttgttttgtctgatgtacagaaaggagtatttagacaatgattgtttccttccccccaaaactatccaaataaagttaacttttttttcccaaaactcaggcaaacaaaataaataaataaataaataaataaataaataaataaaattccaaccagataagatgctagaaattaaaatgccttactctctgcatttgtctcaggccattgatcattttgcttttgttcaagacaaatgttgagcataaatattgagtaaaataacttttgtttcatttaggaactgatgagaaaatgctcatcagcattctgactgagaggtcaaatgcacagcggcagctgattgttaaggaatatcaagcagcatatggaaaggtaaggtcacattaacatgacaggcagtaaagagatcattaatgtaccatggtcgctcccacatggttatgcccacagtcttctgtttcaggctgagtgtaacagaagatgccctgtgcatccagtcaggagcctggaatctgagtcgtggttttgccttgaactagctgactggctttgggcatgttacttggtctttctgggcctcagtttcttcacctgtaggataaggtttgccttagcccagtgggttctaaaccagaagtgattttgctccccaggggacatttgggatgaatggagacattctgatgatcacaaacaggatggtggggagtacttctagcatgtagtaggcataggtcagggatgctacaagcatctgagaatgcgcaaggcagccctccacaacaaagaattactaaggaaactatctgactaattctgtcttaggtaaccttttatttctcttttaattttaaaatatttatgtagttataggtttaattcattcagcaaagaaaatttagtaattaccagaaactatataagaacaagtaactttgggaggctgaggcgggtggatcacctgagatcaggagtttgagaccagcctggccaacatggtgtaaccccatttctactaaaaatactgaaattagcctggtgtgatggcacatgcctgtaatctcagctactcgggaggctgagggctgaggcaggagaattgcttgaacccgggaggcggagtcttcagtgagccgagattgatccagcctggaaacagagcaagactccgtctcaaaaaacaaaataaaaaggaaaaagtaaaagtaagacttggtctttgctatacagtttatttgtccaatgtctatttctgagtactaatctgtgttaggagatatcctagacattggaaatagactggtataaaaagcacatcctgccttctttcatggagctaacattctattagaatataataaacaagtaaataaaaataattcagatatgataagtgatatgaaagaattaaaatggttgatatgatagacagtgactggtgactggctcctgcagatagagtgatgaaggaatgtcagtgaggggttgttacctcactccccactaagcctaaacaatactaggggttctgccctgcttgatcaggagatagtatttaaggtacagaaaatataaaagccctgaagcaaaaagaaactgggaatatgtgagaaataaagaattccaatatggcaggaatgtagaaagtgaagggggcagaagaaagagatgaggctggagacaggttgagaacatgctaagccttgggtcttggtagggtttagattttattctaagggctacagggaaccactggaggtttgtaagcagaggaataatatactgcagtttttatttttaaaggattattttggctgctgtagataatgaactgtggggggaaaaggtacaaacagacccggccaactgttgagagggtctagtgaccatccacaggcacctcaggaattacctcctgggagtgttctccaggcccccaggctccattaagacacccttctctgagctccctttatcagataacatattatattgaaattttatctttgaatatttctgtttttcccatgagggcagaatgccttaggataaggactttgtctaacttacctttaaaggactagcacagagcaggtgcccagaaaacatttgttgaattgagtgaattgcctagcttcagggcaagacaacactttcacatacagagaaggtgaatgatctattggccttttggtatttccaaaatatggaagaaagatggaggtggaggggaacaaccatttctcacagtggaataggatgagagctgtgaaataagattcagctgcagtggcttggattgaggacagatggtagtgaaatttaccatttagagaggaaaaaaacactgtggcaattaaagcagagttgataacactgaatgccaccccatttgtttcagcaggaacatgccactgctgcaccccccaggagtgtggttgtgtcaatctgtgcccacagcgtttcagcaggctcagaggctaccagcctctatttcagagctgaaaataatcaggagcaggaacaaacattattcagtattatgccattgaatattgaaaatagaaaccctgttacccccctttaagcaggggagatggactgtacttaggtgtgaaaacagtgctcaaaacaatatcaataggtaatgtctgtaagaggctaaattctagtgttccatcgccctgtaggataactatagttaacaataatatagtttcaaatagctagaaggaggatattgaatattcctaaaacaaaaaaatgttacatgtttgagatgatgggtatgcaattaccctgatctgattaccatacattatatgtattgaaacatcactatgtaccttatgaataagtacaattattatttgtcagaaaaaataagtctaatgtattgccacacttagggttttcttttctttacttgttgccagaaaattgcttctgatgccacctagttccacattctcaccagagacaaatgaccagccactgtcctcccttccccttcctcttggagctctttgggagttactgagaggcaagacaccgaggaagagagcacctcccactgaagctgggcgtgaatttataagggttcctcttcctcttcccttaccccaatctaagcattgaaagcatggcggatctaggaaatgcatttgaatacagttcctaactgtggcactcatggaatcctcccatttggctctccttcaaaaaacctctacaaaacagaacaatttgggagtaattagaaaatgcagattaatattcatagaaatattttcaacacttctgtttattccctgtggatggacatgttttgtctgattttgatacatatgttcatctttcactaggtgactttagagaaagagaaaaaaagtatttcacatttttccccttggttttttgattttaggagctgaaagatgacttgaagggtgatctctctggccactttgagcatctcatggtggccctagtgactccaccagcagtctttgatgcaaagcagctaaagaaatccatgaaggtatgagccccccacaagccatttctgcccagggtttgaccaagtcatcaaaaatagtgactttcttgcagtgcacacttgtgatgggtggacttggatgcccttttggtctggactctcccagtggtagaatgactctgaaataggcaacagctatagaaccttaagcccaaatgttcctgggctggaagaattttgtcatatcctttgtttgacatgaagagtcaagttctctaatttgtcatcgttgaaagtaaatagcactatgattaaccccaacactcaagctaaaaacctagcattatccttgagcccttgttttctcttacccttccaagctcccaaatctatcagcaagttccttagttttacttcaaaatccattataaatatgtgcacttctctcaaaatccattgctactgttctagtctgaccaccatcatctcttgactggtccatatcaataggcttctaactggtccctttgcctccatttttgcccatctcaaattcattctacacagaatagccaaaattatttttattaatttattttaaaaatcagattatgctacttacctgcataaatttccaatggctttgtacgcttaaaatccaagcttcttatcatgactttcatcacccaacatagtgcagctcctgtctaactctgtgactttttaaaattctatttatatcagtcagggttccctcagagaagcagaaccaataggcaggacatagactttaaaagatttattgtaaggccaggtgctgtggctcttgcctgtaatcccaatactttgggaggccaaggtaggtagattgcttgagctcaggagtttgaaatcagcctgggcaacttggagaaaccctgtctctacaaaaaataaaaaaaaaattagctgtgcatagtagtgcattcctgtagtcccagctacttgggaggctgtggtgggaggatcacctgagcccagaaggtcaaggctgcagtgagctgtgattgtgccactgcacttcagtctgggtgacagtgagaccctgtctcaaaacaacaacaacaaaaatttattggaaagaattggaggccatggtgggaggattgcttgggctcaggagttcaaaaccagcctcaaactgagcaacatagtgagaacttgtctctacaaaaaatttttaaaaattagccaggcatggtggctcatgcctgtagtcccagctatttgggaggctgaggtgggagaatcacttaagcccagcaggtctaggctacaatgagccatgaccgtgccactgcactccagcctgggatgctgtctcagaaaaaaaaaaaaaaagaagaagaagaagaagaaagaagaattggttacatgattatgggactggttaggcaagttcaaaatctgtagagcaggctgtcaggaaaggcaggctggaactcttgggcacaagctgaagctgctgtccacagaaagaatcttctaaacagaagccttgcctctggtcttaaggcgtttcaactgattggatcaggtctgccgagaaaggtaatctcccttacttaaagtgaatcgataataaactgaaattatatctacaaaataccttcacagcaacacctagattagtgtttgattgaataagtggcattatagcctggccaagttggcacataaaactgaccgtcataccccctcctgctcacccattaatgatgtagctacactggccttttctctgctccttgaacatcataagcttattcttgttttgagatctttatacatgatgtttcttccatctggaatgcttttcctccagacattttccattaattcactcaaatatattttcttaactgcacttattactgtctaaaagtatcttgtctatttatttgtttttgagacaaggtctcgcttcattgcccaggctctagtaaagtggtgcaattatggctcactgcagcctcaacctccctggcaagcctccaacttcagcctcctgagcagctgggactgcaggcacacaccaccacacctggctaattaaaattttttttttttgtagagacagggtcttgctatgtcacccagactggtctcaaactcctgagtcaagcaatcctcctgcctcggcctctcaaagtactggaattacaggtgtaagccactgcacctggccttttctatttttaaaatccatttgtttattatcttttttcatctaactaaaaggcaaacctccaccatggcagggaacctcattggtcttggcctatatcttctgttcctagagcaactcctgaaatgaagtgggtgctcaatgtattaattaataggaaggaggaaaaagaagggagcctagatctgaggcataagccatattctgccttgccatcagggaatggagttatcttcttttctgtggaggacatatgggcatctgagaagcagatggcaagatggaatttgatgtacaggagatttattttgagaaacacctgtgaaggataaagaggcgaagagcagggtaggtggggtgaaccttcagactgcagtggtggcctgacccctatgagaggagagaggagaggaagtaggctgagattaggaagagcctcagtgcatagtgaagctccgagaaaaccttggtaggctgttggggagcccctgagcaaagactgccctttggaggagttctgtgttgggcgcaagtccagtacccctgttgtttacagtcattgactgacagccacctggagagggcatgacctcagtgtgaactttggtagacccaaaggtgtggcagttggaggctgttagctaactgcgttctttgcagctgattctcttgaagtgaaatctgagcattgtttctctatggctacccaaaggggagggtttagcaggtgtaattgtaaggattagattcaccaataagtattagaacagtttctcttttacataaaagaaatccaggctgtggtggcaccaccattatcagagactcagtctccttctatcttgaggctctgccgtctttaactcatggttttcacttcctggctaaagaaggctcatgactcagccattatgtcttcattccaggcaactcaaaagagtaaaggacaaagaagggttcactccctcactctaaggatactccctgagcatacatatggtacttctgcatatatcccattggtcagagtttagtttctggacatatttcactgtaaaagaagctgagaaacatagcctttatatgggtagcaatgtaccaagttaaaagttgggggttccattactaagcaagaaagacaaaagagatactgtggtaaactaggaatctctgctacagagagacagaattcagtctctgttcatatgctgcactggccttattcaatcaagtcttagtgtatatgacttttcttggagtcacagtgtgattcagtgaccttgatataaacaggactgagaggtaattagtccccatgccagccaggcccatgatgcacattactgaggatttgaaaggctccctgtatgaagagaatgatacatgctgatagacccagtacagtgatgcaaggatgaaatcattcaaaagtattatagagccttttctaaacatagtggaatgtttgaatgttggtagggttaatcctgttagactgtcacttctaatcttgaatgacacaggctttttcttttatactatttctttccagaattattcaattgattttcacactagagtgaaaaatttgctgtcactttattccagatgatttatgttattactaaaatatatggaaaaatagaaaacgagagcaatagagaaccttgtattgatttacttaaaagtgtcctttcatctatataaacaagataataagaccaaaaggcatgagattaagttatttaagtgttctaaaaattagattttcttttcctttttagggcgcgggaacaaacgaagatgccttgattgaaatcttaactaccaggacaagcaggcaaatgaaggatatctctcaagcctattatacaggtgtcttattttctgcttaccttcaccactgttcacacatatttgagccaatgttgcttttcctagaatcctctcaatctcttcatgaggcattttgagaagacaagacttacagaaacgagaatacattctaaaatcagctaaagactatgagtttccaggaaaaattggaatatgatctgagctagagactgctacataacaatagcattaatgctttacatttataatattacagctgcagtggattttgctctcggcaatctctcattaattgaattaaccattgtcatcaatgtaagagactcaaatcgtattttatttttaggcgttagaaatcactcagattagatccacgattttgggtgtgggaaattagattaatttagaggatgtgttgagcataaggattcaatagaagtagctaaagacctaatagtctgctggctgtgtaaaattagaaagactctgaaatgtaattctgactgtaactacccagggttagtgtgacttcacaggttaaggtcacagtccccacaagactaccttcacctcagacaccagcccacaagctcaggtgttttcaggctacacgtgcttttaaccagctggctacaaattcagggttctcactaccctctcaggttgaatagcacactagaatgacacagaactcaagaaagtgctgtgttcacaaatgcgatattatcataaaggaaacaaatcagggccaatccaatgtggagactgcatatggagatatttggaagggtccagtggaagcttccactctcctgaccattgatatatcattaccaaccagcaagctcacttgattattggtagccttagtttttattggggttttgttatataagcatgattggttgaaccattgttcatgtgattgaaccagtccacctacactccccagaggtcaggctgatattgtggctcaaagcctcaaccttttaatcatatggttgatctttctgatgtgaccagcctttattctgggtcatattgttagcataactgagctgtagtccaagagaccaaccatgaataacaaggacacacctatgacttgggaaatccaaagaatttagagtttacctcccaggaatcaggaataagaccagcccaattctctactattcaatggccccatagaaccctctccaagtactttaagggagccacagtttctctgtttgtgtctcacagaggtcagttgtgtcatagcagcttttgcagtgggagaggtccaaagaaggagtacatattggtcctcatgtaggtgttaaagaggatgctttgggagattcttgttagaaggtaaatacctcaatgtcaggtgactgttttgttattgatgtactaattgggttctaatcagaaaaacagaaacagcactaggtattttgacagatagaatgtaatataaagaactgcttaaagggccgggtgtggtgactcacgcctgtaatcacagcacttggggaggctgaggtcagcggatcacaaggtcaggagttcgagaccagcctggccaatatggtgaaatcccatctctactaaaaaatacaaaaaaagttagatggtcatggtggcgtgcacctgtagtcccagctactcaggaggctgaggcaggagaattgcttgaacccaggaggcagaggttacagtgagccgagatggtgccactgcactccagcctgggcaacagaatgagattccatctcaaaagaattgcttaagctgggcacagtggctcatgcctgtaatcctggcattttgggaggctgaggtgggcagattgcgtgagccaaggagtttaagaccagcccaggcaacatgacaaaacccagtctctataaaaaataccaaaaattggccaggtgtggtggtgcacgcctacagtcccagctcctcaggaggctcaagtgggaggatcacttgagtctaagagattgaggccacagtaagccttgatcatgccactgcactccagcctgcgtgacagagtgagaccttgtcttggaaaaaaaagaagaattgctaaacacctttcagaggactgaaaaagcaaaaagggaacaaaaggattcatgcaggttataaccccccagacctgagacaacaaaggaaagaggttgaggctatcagaaactggaagctagaatgagggacatacctggctgatgtcgggacctcaggggctcagagcagaggcttaaggagcaggagttcagatctctgaaaagagggctccatctgtaggtactggagccagtacctacacgggggtcaaagtgactttttctaggaagctggagccagttgctgctgtcggggtgaacagccttccctgggttgacactgacatgactagccgtcagatagcttgcacttctttccacctcctgccttccagtcccctctactccccagtactggtggaacctaatagggagcgggtacagacagaagtagacaagagaattgcttaatcattaatgcacaaaagagtatgttttaggtgtttaaaatatttcagttcaacaaggtttacatattttacaaaacccatcagaaccaggcactgtttcccaagttggcttggtattttctggtgtttcttagaagagccactgctccccaagtggacctgccctgtgacagatccctggagcccagcatttaggtacaaacagttccaggatgtgagctttatgaggatgaggattttcgtctatgttgttcactgctgtatcctcagttctaagaacagtggggcagataagtgcaaatatttattaaatgagtgtcctcaaaattgaggttaaggtcttaagagccaagtgaaacttttaccattcaggatagtgttgtgcagatatgacagatgataatagcacaaagttaccagagcctcaatttctatgtgagtaatgctctctgaggctacaaaggatacaactgcatcaaggttaccttggttactagagattaatgatacacaagaagatcaagaaggaaattgtctcaatcatgcatagccaaactttacagagattaaagtcacagcactacccgagggacccagttatgttgtcactctctcggcagcaggcatccattgctccccatgctaatgttttccgtgacagtaactgctcctcttcctttttgcttctaatgttcttgacaccagcaagtaacatcccctcccctaccacatggtgtttgtctacccaaggcttataaatatttgtgcatagcttttggttattcttggctactgttttcttcattatttccaggagtcttttggttctttgttattctattgtctttgtctccttttctgtgtcactcgctccctaagagagaagatacaatgggttcaggaagtcactatcatgttggccctcataaagggaccagatgtcttctacagcttattcagtacagtggcacaatagagtctaaataaagagagatctaaattcttaacttttttcggtattctaaagtcaatggtgtgtgagagagagaacactgaaacagggatcagggactcaaagttctagtccaggcacctgtactattaaaatattctatttgattttatactctactgtgcctcaaaatggataaagtagttgtcaacttaggttgaaataattttttactctaatatcccacaaaatatttgaaggaaagggagaggctgtgtgaaatgacttataaagtctcatctaaataattccaaaattacaaaatacttccccaagttctaagaaatgggatattcattcttctacttgatattttcaaatttaaagttttttatctaactagaatgaaggatagatgtaacaatatcacaaccattaggtttaatgatgcctactaaatattattatttagaaaaataacacacttttttggtggattttgcttatatgaattgctttgaaaagttacagatttcataaaaaagagacttactaaaatcatgctgaagaagtttccatctcagcgcagttcttgctattggataatctcatatcactttctataattgtctttcattgatttaaatagatgagaattctcatggctagtatggctaatttatagaattcttgagaatggtgcagacagttcagatagccacatggtgtcacctacaacaaagggtatagtggctccaagagaatcaccaccccatggatggggcagacagagatttaagactgatgggcactgcacatcacaggccatgcaaaaggggctacaactagtcagtactaaaatatatgaacacacagttggcatttgtaaagggaaatggcatgttttgggtagctttcttacttttgggagatacgaaaaaatatggtttaattatattcattaagattagggttagattcgataaaacagaaaaattacagtggcttacaaaaggtagaagtttatttctatcatatgtagaagtctagacattggcaattctaagtctagtatgacagctactcaaagcttttaggaactcagacttcttcttgattacttttatgccatcactaagaagtggtccttatcttcacagtccaagatggctgcccaagatgcagatatcagttcacatgtaaggcagttggatggaggaaggactaagatgaacatggcctcatccctttaaggagatttgtctgccttcatttcattgtgaataactaagttatagaactgtactagctaagaggaaagctgagaaagtagtttttaagctgtgtacattatatcttgcttaaggttagggttctcttagtatggaagatggccagaatggaaattgaaaggcacactagtagctcatccaccccagcttttccactatgcatcccttagtgccattgtcagatgaaataaaccaagatttgctccagaatgacaactctttctattcttttgcatctaccacaacacagtgcagtaagagttacaagaagaatgtaccatctcacaacagaaaagcatgaagaaattaaataaaagggcaagatttatcttatcacatacccattctttgctagtgttggcatttaaacttttctctgttttataatcatatttttcagtttgtcaaggcttaatttcattctgatttggtttcagtatacaagaagagtcttggagatgacattagttccgaaacatctggtgacttccggaaagctctgttgactttggcagatgtaaggttttattttttattttttaactccccagtaagctgcatgctcaataacaatttttagggagtttaaaaataaccaaactgagacaatgagttcacaattttccttatgaaatggtttgttcattttacattttcattgccaccaagcaatataatgtttaaccaagatcataaaagcatacataatgatgtaacaacaaagaaaacttatttgagtcagtaagtggaggtgttttggtcaggtttcacaattttgacattagaagacattctgatacatcatctgacatacaatatttatttccattataagtgtctccattttaaagaacaggtttattttcttctggactctgaagaataaatatttcttttgttagcttctaaattaaataggaagcatgatacagaagaatgatctttagagatggggattaaattgagtatcagtctcaggattaaaaaaaagaaaatgattgctgcaatttcagccttgccaccttggaaaagctgccaaactattaatcatcatgtgacctaatgaggccacaccttgctttctctttttagaaggcttatgacttttattataaagatggtaaggtcaaggatgaggtgtattcacagctgtgtgtaagagagaacgtgatttaaaccatagctcaccaattttctttcagctgatttacatagcacctaaatgtgagaaaatcccaacaacggtctcagcctcatggttgaaacagcacctgtcaaagtgaggcattatgccattaggaagcgatttatctaaattatggtttcagttactttaaatgtgaaaaacttatgaaggttgaacccacaacaccaaatttatgaagcattgctgcaaacatatgctctcagaggtatatattcctaagtgcacatctgtttgtgtatggacatgaatgcacccacccacaggaggcagtatagagtagggctctaggacagggttctagaatcaaacagggctggaatctcatgctgccaactagctttgtatatttggacaagttctttaagtcttaaagcattcattttcatatctgtaaaactaaaatactaacaataacaagtactcatagggtgttatgaagattaagagaaagagagagtatgtgaagtacttagtgatcaacacagggtggtagtggttagtattatattaagaccgatgataatcagcatttatgtcattggagcgagcgtaagtgaaagagaacaagaagaaagcaaacagcagcagggtatcagcagcacagaaaagaaaccaggcaaaaatcagacagtcatacaaggacctaatgtttaaaaataggaacaaattcattttaaactattgtagctaaatgtttcattcacctataatttgccaaataattcaggcaatcccgtgttttggttttgtctcctgtctttccataatgtgcttaagtatttgtacatgaacacacataccacacacacacacacacacacacacacacacacacacacacacaccacttaaaccatagagcctttaatatcacagttggggatctttgaggactttttattttttcttttttgagacagagtctcactctgtcatccagactggagtgctgtggtgcgatctcggctcactgcaacctctgcctcccaggttcaagcaattctcctgcctcagcctccctagcagctgggattacaggcacacgccaccacacccggctaatttttgtattttagtagagacagggtttcatcatgttggctaggatggtctcaaactcctgacctcaatcaatccacccgcctcagcctcccaaagtgctgggattacaggcgtgagccactgcgccccgcctttgagttttttttttttttaaataaactttactttttagagcagcttcagatttatggaaaaattgagcagaaagtacagagagctcccatatgaccctattctactctctcctttcctttccattattattattattattattattattttgagacaggatctggctctgttgcccaggcttgagaactatggtgtgatcttagctcactgtagtctcgacctcctgggcccaagcagacctcccacttcagcctcctgagtaactgggaccacaggtgtacaccaccacattcagctaattttttttttttttttttttttttttagagcgagagaaggtctcactcttgcattaattagtatgtgtatttattataattggtgaatgaatattgatacattattattaactgaagtttatagtttacattagggttcactctttctgtgatatagttctatggattttaataaatgtataatgtcatatgtctatcattacagtatgatagagtagtttcactgtcctaaaaatcctctgtgctctgccagttcataccttcctccccaccaactactgatcttcttactgtctctatagttttgccatctctagaatgtcctatagttggaatcatacagtacgtagccatttcaggcaggctggcttctttcacttagctatatgcctttaaggttcctctatgtcttttcatggcttgatagctcatttctttttagtactgagtagtattccattgtatagaatatttattttacctgctgaaaggcatcttctttgcttccaagtttggcaattataaataaaacttctgtaaacattcatgtgcagatttttgtatggacatgttttcaactcctttagttaaatagcgaggggtgcaattgcttgattatatagtaagagatatttagctttattaaaaaactgcagaactgtcttccaaagtgactgtaccattttgctttcatatcagcagtgaatgagagttcctgttgctccacattctcaccagtatttggtgttgtcagtgttttggatttgagcccttctaataggttgtgtagtggcatcttattgttttaatttgtaattatctaatgacatacaatgttgagaatcttttcatgtgccatctgtgcgtcttctttggtgagatgtctgttgagatctttcaaccatttttaaattgggttgttattttcatattgagttttaagagttctttatgtattttggatacaagttctttatcagatacatgttacaaatatgttctcccagtttgtaccttgtcttttcttccacataagacctctgtgttgggttgggcacagtggcccacacttgtattcccagagattcaggaggctgaggtgggaggacagcttgaggccaggagtttgagaccagcctgggcaacatagcgagatcccatctctaaaaaaaatttttaaattagctgtgtgtggtggtgtgcacctgtagtcatattagctattcaggaggctgaagcgggaagatggcttgagccttggagttcaaggttatagtgagctatgactgcaggactacactctggcctggccaacagagagtgagaacctgtctctaaatatatatatatatgaattttcggaggagggaactgaggcccccaaaattgtgtgatttgctaaaaatttcatgactagtcaatggcagaaccagaactggagccctgagtacatgatttttctgtgcaacctgtcctgccttaaagaaaaaccactaagatcccctgctggttgaagtactatgtgttagaatcttctatctttaaaggatggcccttgttttcgtcctcctgtttagggcagaagagatgaaagtctgaaagtggatgagcatctggccaaacaagatgcccaggtcagtaacaaagcgggaaaacatttcctttacctattctcctatgtggctgcctttgcatttatgtgaaaagggagaaaaatagcagcaacagggacttttctttttttttttttcctgtttgaaagagaagcctgaagcttggggatcggaaccctaactttttgcctgccccagtggtagttatcattctccttggctcctgacagcccaatttttgatttctagtcttctgaaagtgagagatttagataatagatgatggcactgacctctgaaatacaactccgattcttctcatgtcacctctcaaaaagaaaataattgtgtctctaatatcattctcttgtgaatagattctctataaagctggtgagaacagatggggcacggatgaagacaaattcactgagatcctgtgtttaaggagctttcctcaattaaaactaagtacaaactcacattacaatcctttgtgttgtatgttgtttttacaaatgtttttgcatttagtatacaaagatctagaaaaacgaagtttaaaattgcgaagtctgttccagttattcacacttcaggaaacaaaatgggaaagctgtattgtaactcaaggaagtactgacactacacttttgtttttccatagaggctgagtagattacctagtgagtaccaggtaatagatgggggagggaggtggcagggagaagaaaagaggccaccctctagggtgagagtagaagggcttgttcctgtggaatggagaagcccaactgcttccactccacctaacagttctccctagttagccacttccagaaaagccagacactgcaggtgagtctctgttgacacatcaatactgattaacctttagctatttctgatatgaaggtaagtggtagaatggatcaactcttatcgtcagaccagctattacatggaattgtgggcacccgccctcttgctcatggcatctcctagaactgttctggaagcaacaacacctagaaaactaaaccttcatttactgtgaacatcttctgactgtggcttccagatgctagtttacagaacaaccacacagcaagaccaagcttatgctgagttgacggaacaatgagtaaacataaggatattactgtgactttgaaattctgaaattgttctttcttaacttttgcattaaaatcacatttattttataaaataatgacaacagtatgtgatagttgctttattcatgtctttgtttgaaaaacaaaaaccagataaccctaggtctctctccaaaatttctttttttaaaaatgtattggggaaaaatatacttggcttacaaaatatgcctgtatacttggtgacatatgtacaggttttgcttggggcaaatactgatcaagaaattcaaatgccttctgggaggtgtgaagtaggccatgccaccttaggaaatgattcagcacaaggaagtcttcagaattaagatttctttaccagagaaaacatatttgactagtgattatagtatcatttcccaggtgctgctataaataaaatttaaaatagcccaacttactggataaattatttattatttaactatttaggctatttaaaatgcttactgcttgagagaaggggaaagagaaagagagatcattgaagaaaatcatctagggagtttgggttttgttgtagatgatttccttaaaaaggaacaaaagaaaaacaaaaacttctgtgcccagattttcatggtttaaagagggagttttttagcttgctacttgatcttctgcatatcaaataaaaaactagaatatattcaaatgtgctcaactgcgttgctttaaataattttgtggtgcttctttttagcatttgatgaatacagaaatatcagccaaaaggacattgtggacagcataaaaggagaattatctgggcattttgaagacttactgttggccataggtaagacttcgagtgctggtaaactaagttactttgcacttgctttaactcagtgccgaggcctgctccttttgggcaagaatcctgactgatccattttttttgctccctacagcccccaacatggtccaggatacacacagtacgctcaacaaatattgttaaatgaatgcttgaagaagttatttttttaagtcttttttctttttcttttttgaaacaggatctcactctgtcacccaggctggagtgcagtggtgtgatctcagctcactgcagcctcaacctcctgggctcaagcagtcctcccacctcagcctcccaagtagctgagacaacaagcatgtataccacctggcccagctaattttgtattttttgtagagatggggtttcaccatgttgcccaggctggtcgtgaactcctgagctcaagcaatccatccacctcagcctcccaaagtgttgggattacaggtgtgagctaccacatccagccatctttttaaatcttaccttgctttttaaatttgtatttgtcttgtgaccatgtttagcttgtagacttcttgagagctgaaatattttatttctactggcatttttattgagctttgttgaaaactgagacgtaggcaaagcacagtggcatgcacgtgtagtcttacctacttgggaggctgaggtggaaggattgctggagccaaggagttcaaggccagtttgggcaacatagcaagatcttgtctctttaattaaaaaaaccacacacacacacacacacacacacacatgcaactaagacctaagccagtttggtaatccaccatatttggttatttatgaaagatatcagtggcttttcttttctttctttcttttttttttttcttttgagatggagtctcactctgtcacccagactagagtgcagtggcacaatctcagctcattgttgactctgaattgctaaaagataagccgaggaggctaagaaagggaaaactttcttcttcaattaaaaaagtagaattgagatcagtcttcataattagttctcagactgttccagtggtaatgatacacctggttaatttttttttccattttacattgttaatctttttttctttttttttctttgtgacggagtctcgctcggttgcccaagctggagtgtggtggcgcaatctcaggtcactgcaacctccgccttccaggttcaagcaattcttgtgcctcagcctcctaagtagctgggattacaggcacacgccaccacgcctggctaacgtttgtatttttagtagagacagggtttcaccatgttggccggggtggtctcaaattcctgacctcaagtgatccgcccacctctgcctcccaaagtgctgggattacaggcttgagccaccacccctggcctatattgttaatctttatattaattctgcttgctgtttttcatttggtgttcttgctaagccgtaatgtttgaaaaactttgttgagatgtacaaactctcattcactgagctaaggagcattcttggaaatatatcattgaataatgtattacatttgggctataatgcacattattttatcatgtaaaaaaagaccttataattcaattgaagttcaaaatatgttacactttcattttgtttcagtctaccattggaataaaccagtttataaaattttttattgagatataacttacataccataaagttcacccactcaaagtgtgcaattcaatgctttttaatgtagtcacaaggttttgcaaccatcaccacaatctaagtttaggacgttttaatcagccgcataagaaaccctgtaactattgacagtcactttccaatcctccccaccccctggctcctataatcattaatctactttctgtctctatagatttgcctactctgcatatttcatacacaaggaatccaatacaatggtcaacacatagtttttgacatgaaaaacgatctgagctgtgtcatcttagaatcgtgtaataggagcatactacttgccaaataagaacaaatccagacttaagtaaggagaggctttattcagtagaactatttcaatagagagaacatgttgatttcagaaacctgaaagactgggctgggtgtggtggctcatgcacataatcccatcactttgagaggctgaggcaggaggatccctttaggccaggagttcaagaccagcctgggcaacatagtgagagcagcattctgagactgttccaatggcaatgatagaactggttaattttttttccattttatattgttaatctatatattaaagattctacaaaaaaataaaaaattagctgggtaggttggtggacgcctgtagtcccagctactcaaggggctaaggtgggaggagtgcttgaacccaggaggtcgaggctccagtgagctatgttggtgccactacaccagagcctgagtgacaaaagtgagatcccatctctaaaagatggggaaaaatgtgcaaaagtttcaaaatccaacagaaaagtcttagcagcaacttttaatgttgggcaagcacaagggcatgatcactggggattgacaggaaacacgtctggcagtggacagctggactctcaagataagctgcaacagaggcatgttctgcattttagggcttgcccaggactggggacaagccagagttcaggaacctgtgggaggagagaggcctgatggaagtgtggtcaagacaatgaagagggtagggaatgggcaattatgaattcttggtcatggtaattaactctaacggactcccaagcttccctgcctatggtgctgggtgataaagcctccttcccactgaaacatactgccaccttccaaaactttcagatatgaagaacaaatctagtaggtaagaatataaagcagaaggcaagctaaagggaagaaaggatcatgaaaagaagggattgtacaaatctagttggcagggaggtgactggaaagcttaataggatgaaagtgggcatcattattttttatcaagctattatggcttacttaatgtgagttttactagtttaaatggttagtttcttgtcagagaacttcatgtaacagtttgattctaaatgctgtgtttgggtttctaatacatttctccttctatttcccttaaatcactcaaaaagccaaaagtcttttagctttccttaagacagtctataagccacgatgagaaagtcacttattcttgttctgagctccaaaattcattataaaatccattcacttttggttggattcctacctagagatcagatttaagattataaaaataattgtgttgctgtaaataggtttcttccctacagacttttctattcctattttctttttatttaaaagataatttactcttgcgtttttgtcagtttcctttttcttgttttatttctgctttacttgttatttcaaaataaagaattgaaggattgtattttttttttaaggcaactgaatttagatgacagatacttgttctaatggagtcactctaaccagcctataaattctaatccagtcatttaaaagaaaattctttccatgggaaaaattgcttttaaatggaactccagtgcccctgcgtgcctaatgagttatttggagcaacatcgctgcagttgtcaggcccaggttgttcatcagtagcccgagatgctagtagctgagcagtgtcgcaccctagggagttatcagggaaagcgtaggtgttcggggtgtctgggatccagagatgagtcagtcgctgtgggagtttctttggcaggtaattttattttccccatggctggagataattactgtgctaaagttctgtgcaaatatggtattaaaaggctatgaaaatcagggtaagcagcctttctttcattccaagtaaaagccagttgtggggaggggatagagtggtatgacagtccaaagaatctttttaaaaaacatattacttactatagattaacccaatttctattccgtgaagctgaacattatttgctttttgttacagttaattgtgtgaggaacacgccggcctttttagccgaaagactgcatcgagccttgaaggttggtctggaaagttcatgtgcattcttagcgtcccttaattcccttgggaaagtatgcaaatagtagaacaaatatttaaaaattagttattttaatgtaatttaaacattttaagataaattatattacagcaaatcaaggtatgatacaatacactctttacacagacacctgattttctcttcaaaataaacagacctgggtttatgaaataatttttttctaagtaggtataatttgatttctatttaactaaaacattctcattttctctaatatgatgagtttaagtagatgctaatattccacttgtatgaaagatgaaaattcatgtataatattaaattttaaaagttcatcctctattttaaatagaaaatgagaaggcaggccaggcgcggtggctcacgcctgtaatcccagcattttaggaggcccaggcgggtggatcacaaggtcaggagttcaagaccagcctggccagacggtgaaaccctgtctctactaaaaatacaaaaattagccgggcgtggtagcagatgcactgtaatcccagctactcgcgaggctgaggcagagaattgcttgaacccaggaggcagaggttgcagtgagcctagattgcgccactgcactccagtctgggcgacagagtgagactctgtctcaaaaaaaaaaaaaaaaaaagaaaatgagaaggtaaaaatatggcttaatgttgatagaatgtcatatttcttttccacttagattagttttctacagtagctaatttgtctactgatttgcctcataggttaatagtattctaacccatatagagataggtacagagaagtattgaccacattattttcactgcttcacagtaagtgcaggcagtaaaacttgttttagaatgccaaacctcaagcttgagacccagtagatcctgtggcctctcaaactgccttgcttaaaataaaccaagctgagttggcagcctttaatgatgccgtaaccctgtgtttgcttgtctgtctttactgccagatggtgcgctccatgagtacagactcctgtttatcctcagaccctagggccttgtgcacagaagatgcttacctccatctctttaccagccattttctgtggtcccacacgtaccttcaaagtcatatcctaagtgaacacatcctttccttcatctcgcccagccccacatctgctccccttcccctgttcagtcatcccagagaatggccccaacaggaatttgcccaactctctgaagtcgtaccattcctccccagacttcttgactatgcctcagccaccccaggcttctttccattcctcaactgtggcaagtctattctcacatcacagtctttgcatccattccttctctggaatgctcatcctctagatctttacctagctgactccttctcatctttcaggtttcagctctcctcctgagagaggtctcccctaactgtaccaggccaattggttccctttcagtcactctccatgccatttccagctttcttttcttcatatttctgatcactatttacttaagcaatagttaatttgctttgctgtctgtctccatctactagaacataagctccatgcagacagagatataatctgttctgttcaccgccattggcacagcacatggaataatgcctggctatagtcgatgctcataagcatttgctggatgaattacatagatgaatggaatatcatttagtatgttggccatcattaggtcaaaatccacctaactgctcagctagaaattttacactatctctctttttcattatcctgtagcgatacatcattatgttttgtcaatccatttacataagcaactctcaaatcttcccattttctccatccctactgcctttattctaaggatggccatcatcatctcttaattactcagtctcctcaagatgagtctcaaagcctctagtcttaactcccttatcttccttctactcctaccttgcaatctgtttctcatgctgcagtcaaagtgattttctgaaaccacgaatttgatctgatctcaacattctcatgtttaaaatattacaagagctctccacacttaggataaagtcagaatttcatttcatggttaacaaggtctggcctttccagacacatttctttttatccctctttgttaacttacgtatccttgaacgtggcgttctttattgccctaaaccttcacgcctgctatttcctctataggaagtttctctcctccctacatgaacctactccttcctcttgttgactgtttagtccttgcttaaatgtcactttctcagacttttcctaatccctaatctttcttaggcccccctgaagtatgctcccatggtacccaatattttcaacatgtcagactgttttgcaatggcttactttcttgcctgtattctttacaaaactggaagcttaacatgggtatctcatctctgctttgcagcatttagcatgatgctgtcacagagtaggtgctcaacaaatatttcttgaataatgaatgatgagtttgataataaatgaaaaagaatcactatagttgaatattttgcacaccattatctgattcttataaatatagatctctatgttgctttgtgaccaatgacatttgtgttgtgaacacctgcattccttaacagggtattggaactgatgagtttactctgaaccgaataatggtgtccagatcagaaattgaccttttggacattcgaacagagttcaagaagcattatggctattccctatattcagcaattaaagtaagtctacttttaaaaatagcaaaacatattttgcccttctctacccatctccttactcttatatgccttaaaatataaagatatttgacttagatttctctctccttgtcaatgtataaatgtgttgtctgagcttaaaatagtagcagcaaaatatcccttattttcagctctaaaatcccaggcatataatagacactcaatatttttttaggtgtactagccactaatttttcttcttttgtgaattacatatgcaagttgtttacctgttttttatattgcactgtttttatttatttcagtctttatgacaatgtaagaaaagaaaaatacgtattttaaatttcctctctgttttacatgagacagcatggttctgcagcttagagtgcttttcatttcagtatataggaaactttctcattttatttaacagctgtatatcattccattgtttgtatatttgtacccaccacaacaaacagaggcttccagtttattgctattgcaaacaatgttgtataatgcatacacaacttcatcaggtacgagtgtatctttgggatgaattctcagaagtaggatttctgagacagatataaatgcattttaaattttgacaaatattactaattgaattccattttgcaattccatgaggaatgtatgagaacttctttctccatagctttggcacagagggtattttcaaacttttaggtttttaaaacattttttagagatggggtcttgctgtgttgcccaggctgaagtgctgtggctgttcacaggtgcgatcataatacattgtagcctagaactcctgggctcgagcagtcctcttgccttagcctccaagtagctgggactataggtaaacttttgggttttcataatctgataggtgaggaattgtatctcagtgtagttgtaatatacatttttcttagtataagtaaggctgaatatattttcatgtttgaaataacatttgtatttctctttctgtgatctgtctttttacattctttgtccacattcttttgggtttttgttctttttggtcagtttctaagacgtttttcacataaggtagattagccttttgtctggtcatattttcccagtccgttctttgtcctttgacttggccaaaagtatttttttccaagcagaggttgcacatcttatttaattaaatttatcaatctttcacagtattttagtttttaaaaaatctggtcccttctgtttctttcattctggatgagaatcttcctaaaatgggctccttcctttctcttttaaagcatgaaacccattttcattgttttcagatctcagttgatatattatacatagaaacttcaaataaattacaaattatttgaattaatagggcagtaagcctgacaaaaattgtacaagaggcttctgtaccttaagctcatggttcaaaagtcatagtcccaacaggaagatggcaactagttagtggagaactaaggggctagccccacacctgctcagtagccttccattgatttacttttctaccttgatgctccagaccacatatgaaagtctctagtaaatgagtgatagagagtgttagtccaagctggttccctggaacaaagtggaagctggggttggtgagtggagcaatccactgtccttgcctccaaggccacactgaccaggggaaaagacagagtcagggctgccttcgcagaggacttgcaggctatgcagacctctccgtctctttgctactccatctacccttgaatgtctcgaggaaatcagcactagagagtattggacccaggtgaactctccaaggtctaagctgagacttggggcctagaaggtgatccaggatgaagagggaagcagcagccaagcagagtgtttgctctgagtgctgagggtctaaaactgggaatggagtccatgctgattagaccccctaagctgtggatcattatgcaccatgcacatcctgatcctgggtagcagcaccctctctcaagcccctacaaggctggagcactacctctgtgggggagcttacactcagcgatgtcccctggggacacctggcttagaccacattccagtgtccctgccagcagctggagtctttggtccaaccttcgctatggccctacccacaatagccacccttgaacaggcacaaatattagcctgggtctttctgcagctatcttgggaaggtttctgcctctgactttacaaatggcctttgaatgaatgaatgaatgaatgaacatcaatcagtcaactagattcattcactaaaatctctctctctctctttttaatcagagtttttgtttttgcactaaacttttacagaaagagagctgagatgcatgcataagttgaaatcaggaacttactcaaaaaggcaattctcagactgtgcctgggacttagcacaaattgcatcaactgctcacactcaattctatttgaatcagtcctgacacatcacaatagtttcaatcatcagaggaagattcaataacattaaccatgttgtagctactaaggcagaaaaatagactcacacattttctaaagattgtcagtaacaaggttgagacataaagagggctttcagttcaccctcagcaaaccagaaaattaaattaaccagtggctctccgttccccagtggtctgggtaattgaggcttattgtattagaaaacatttaaactatttgtagtttgatagaaaagaaaaatccatcactgaaaacttcagtttgcagtttgaaatagtacaagatttctttatttctaccacctaacacatattattaagtaatctcattacatttttgctattgaagaacaggatctttttagatggttgtttctgaaattcatgggatagagttccattttgcatatcatctcagcctgtcatcctgcctgttttcttccttccacctattgtttagacatttctttgtccattgacacctttctcagggggtaaccggtgggaaggagaaggcaaggaagaacagaggtgaaaaaccaatgtgtacctcttactactttataagaagatattatggaaaatttagatgaaattatattttttggtagttttccttcatagacaaattctgtatttatttaataaatagcacaattccaagctttttatgggaaaatatagtagccactcacaatcaactcataatctatgtggagacttgaggtaggtatgaagaaacaattagaagataataattgaaacaacagacaattaaatactagattgttgaatatagagctagtactatcggaattgagaagaaaagaagtttggggttagagaaatgggtcttgagcctgcctttcaggtcaacaagcatgtgttgagtgtctcctgtgggccaggtgctctgctggagcatttacctttaagaccccagatcaatagggtcttaaaagtaaatgctctagagacagatatgggaagaagcaagagggaaagaagtaataaggcatttgtttgattagagggtctaccttggggaatattgagaaataaaatccaagtagcaagatgagttcagttgaaagagagctttgagatcagcgaattcactcattcaattaaaaatattatcaaatgcatattatgtgctaggctcagggttacaattataagcaaagggggtagggtgggggaagacattttctgcccttatggaattacaactatgttaaatgtaaaggaaagtgacattgtgctaaaagatcctacaatagtaggacttgacttagaggaaaggcttctatgagaaagtcatgattcagatctggaaaataagtagatattaataaggcaaaatgtatggaggtaagggagccagtagaacattctaataaaagaaatgacaaatggaaaggcctcatggtggaggaagcataatgaaaaatgaggatgtgggggccagatcatgcaggacctttttggcaatgtttaaggaattttggctttagcttaagagtaaggggaagccattgaagagttctgggcatgagctcttgaagagttagtatcaggatcatgaaaagatccctgtaagatcttcttattctggagaataagaagggctcaaaagatatttaggagttgaaacttaagggacttggtataatatcttggtgtgaggaaaggaagatagcaaggatgacactcaagttcctaacttggaaaacagacagtggcgccattccttgcaagaggatcaggttttaggttgtttgtttgtttgtttgtttccttttcttttgggggagtggggggaggtttatgagtttggttttacatgtattgagtttgagatgtctttgagccatgtaagacatgtggagaggtcaagtaagtcattagcggtgtaaatatactttgagttacttggatgtattttcttgactaactggtagaacgcctaattgtttacaactctgatcagagatgtctagaaggagctcttttaatacaaagctggagcattgttgacttgtcagctctgctattgcagagcaagacaggaaaaccaatagcataagaactaaaatctatataaaaacgaagaatattgtcatatattttgtgaaacagacaaatgaacaagaaataaagaaaacagaaaaatatatataaaggcctattgtgtcttactatgaaagtaatgcttaacttcttcactaaatgagccttctctgagacttcctttatattaccactttctctaatattcaccccagtaacagccattccaaatgtgaaacttaagtgataagaagagctcactggttgggttacctcaaataaaataaaaataatgtgagcatcttacacaatccaggttgaaagccaagttttacctcctgtgaagtcttttgcgttacaaacttggtatctttgccctttaagcctcaacctcacgtagtatcttttctggacaacagtctatttttggttggccttgggaaaaggaactgataaacatattctttaaaaatgtggttcatttcactttcctaagttaggcagtgtagcagggtattaaggagccaggatatagggattcaaatcctgcttttgtcacttattctcgataagatttgaggcaagtttcctaacctgtctttctcattttacttatctgttaaatgggggatacgtatagtacctattgcagagagcttttaaaagggttaaagtagttaatacacattaagccttttgaatagcaagtgttcgataaatattattaaaactaaaatttgaagtttttatagaaatcaatattatgtaagtgatgcaatcttattttattaaaccaaaattgaaatttaactgcagtatatcaggaagaatctaaatattacttacagtgaagaagatgctggtcagaacgtaattacactcaggtatgaatgaatgatggaattgcaggtatgttttactaaatggtatagctcatgagtctcacacccaggtgaattccctagtgctataggatttgattcatttatggtctcccattatttatactgtatttgttcttcattgattttattctttgcagtcggatacttctggagactatgaaatcacactcttaaaaatctgtggtggagatgactgaaccaagaagataatctccaaaggtccacgatgggctttcccaacagctccaccttacttcttctcatactatttaagagaacaagcaaatataaacagcaacttgtgttcctaacaggaattttcattgttctataacaacaacaacaaaagcgattattattttagagcatctcatttataatgtagcagctcataaatgaaattgaaaatggtattaaagatctgcaactactatccaacttatatttctgctttcaaagttaagaatctttatagttctaatccattaaatataaagcaagataataaaaattgttgcttttgttaaaagtaatttctttgtttgctttcagagcttgccaacattgtttgatgcctggtgccaacaactaatattttaaaacatgtttctgtatagaagctgttactgcttcagtttatcaccttgttaatcacacttttttgaaagaaaggaataagatgaagatgtatgtgaccctggcctaccctttgtagttgtgatcaagctataggagtggtaatgcatgataagttatttcagctttcagaaaacatctgctgaaggattaatctaaccacttcctgtctgaatggcaagcatgaattatggttgcttcatgctaaatactactttcccagaatgggcatttagaatcaagcctctaaggtttccttttctcttgagttggcaaaactatgcatttaaagaatccatcatgccatctttgagtgggacctaatatgaaataccttgactgatatgaaatagataaagtgaaaaaaattccagttagagttattttcctggaccagaatagaaatgatcgtactggccatgtgcagtggctcacgcctgtaatctcagcactttgggaggttagcaggcggattgcttgagcccaggagtttgagaccagcctgggcaacctagtgagaccctgtctctgccaaaaatacaaaaattagcctggcatggtggcacatgcctgtggtccaagctacttgggaggctgaggtgggaggattgcttgagtcaggaagctcatttggcaagttagttctgtaatcaatactataaatgtcagtcataactaagatgatggcaggagataatgaaaacaactacttaaatatttgggagataaaattgagtaaacatggtattcaaagttaccaagtgtcagtcaagtatgccttcacgattttagtgtaagtgatttagtgagtaagtatatcacgaagcaataaatcaatgttaatactcatagagtgcttactatgtattaggtactatgttaaacagtgtagtatattttaatttgttaatcctcaaggcatcttacaatgtagataccaacacagatatagaaatggaaatggaagcttagagaaattaagtaacttgtcactgtaagagccaggtagtccaactccagtgtccaggctcttaaccactgttttgccttagaatttatcccatcccagggccactgtagttttcaatgcctagtgcttagattagaacagtgctcagcacataaaaggcatttaatacagtgaatctttattttagatctcattcatcctcagagttgttataccacttatgtattaagtactttctgaaacaaagcatggttacatgtgtcaatatttcccctgttttgcaagtgaggaaaatgagactcaggttaggtatccagcccagggttacacagtggcaaagccaaggcttaagatccgggtcatctggactttaaaacttatctgtggctgggcaaagtggctcacacctctaatcccagcatgttgggaggctgagacagaaggatcacttgagcccaggggtttgagaccagtccaggaaacatcaggagactctgtctctacgaaaaatttaaaaattagctgggtgtggtagtgtgcacctatagtctcagctactcaagagactgaagtgggatgatcagttgagcccaggagtttgaggctgcagtaagctatgatcacaccaccgtactgcagcctgggtgacagagcaagaccccgtctcaaaaacaaaacaaaacaaaaaaaccttacctgtgcatgagtgagtttgaagaaggtgagaacttgaacacagtagtgatcacacaagagaattctgcagaaaaaaaaaaagccccaatgaggtaaccctctaacccttctactcacatctgttttgccttgtatgcattggacttcaggcaattacctttctaagccacatattcctcgtctttaaaatgggacaacaatagtacctacctcataagattgttttgaaaaataaatgaaaaaaaacacttaaaaggtattccacatagtgcatagcacatggtaagcccttaataaatgttagcctgtatcatataattattatagagtagtattcaatggccacattttttattgcctccaatttccacaaggtggcatgtcaagttcaaagtgaaccccacggccttgcatcccaatggcaaaacctacttaacttgcttcagaataacatggccaaatctaaactgttggaaacttcttctatagaaggtttgtcatggttcagaaatcttattgtcactgtaaactccttcttaaggaaacatgtggaacatttaatttaatcatctggcttctctggattcccaggaccatcttcatttacatgaatgtgcattagctctgacatggatcacctgcagaattgagtgcattcatgtcatctcattaagccctaagtttagtccctgaagattgaaagaagagaaaaatagccagctgcagagagtcctgggctctgtggttggtgagctgcagaagcagaaggtttgtacacttcacgctacagtaacagaatgtttggtctataaatcaggagctgcaaaaatggcaaatgaggatgttgaataggagattctctagcctatttgtaagaatgtattgaggaaatttttaaaatagtgtacagtagttcagacatttcttccatgtaccttcccctatttccatttccccaatttcatgccatatggataacccacagttttactttgtctttaaaacaataattttggggtcatatcaaactgggttcaaatcctggcttcaccacttatggcagcagcgtagataacagtgctcgacaaatacttaacctccatacaactcaattctttagctgacaataacagcacctaccttaaatatgtgcaaggatgaaatgaaataaagcatgtgaaaaatttaactcaataaaaattagttaccaataactgcattggcatggtgagttgccagtgaagagcagatagtaagtgttcaacaagcatttgtagaataaataagcgatacttgttttagtactactcagcgacagtaactctgaggccttggaagcttcagagaactgtcagctgaaatcagtgttattaatatgttgtcagtgtgtcctccaacgataagagccaactgtgttcacctcagtgatgaggttacaggatctgaagaaagtttcctagtcttatttcctgcccatcagttgacagtagtatgacatgtgagggagtgagtcgcttactctttctgtaccttagtttcctcacctgtaaagccaggatggccatgcaagtatcattcagagtaggcgtgaggtttcaataagccagattaggtgatgcacttaccacagtgcctgcacccgttaagtgctcaataaacattagccattattctctggctcagtttggaagacttacaattgcttatacagtgctctaatcacttgggggattttgagatgttgtaaagctacctcttctagtttgcaattaggaaagaagataaagcaaacttcttggcaatttcctgcctgtgaaaccttgtgttttatgagccacggaaagtaccccaaattttttttcaaccccacccccagcaaactgacaaactcagatctttcccacccactctgtatgtctcccgtgggactgtgagagtcaagcaagtacaggttgctgtgtgctgaagcctttttactggtgctatatttctttcagtttcatcaaactcagctttgtgccagttttacccaccagggccagccctcctctgaaaccaaagtttgcctatttctgtagagtttacaaagtcaacagtgagagagaggagaatttcaaatgaggaggagggttacagagtaggaggtaacattgaatggctgctgcagtaaactgttaaaagaaatcccaaacccagaataccagagcagcccattcagctgaaaggttttatgacacaaccatgcataagaaaaaactagctatcaaaatgtacatgtgacctctttgggcataaactttgtggaactggatgtggcaataaatagtggtccaggccaggcgtggtggctcacccctgtaatcccaacactctggaaaaccgaggaaggcagatcacctgaggtcaggagtttgagaccagcctggccaacatggtgaatccctgtctctactaaaagtacaaaaaaattagctgggcgtggtggcagatgcctgtaatcccagctactcaggaggctgaggcaggagaattcgcttgaacatgggagaaagaggttgcagtgagccgagatggtgccattgcattccagcctgggtgacaagagtgaaactctatctcaaaaaaaaaaatagtggtccaaggtgacctggcagagcatcagacttgctgtgaagcgacagatgtgatttgccaattgctacaatatcaaccaccagataaaaggaagttttgaaaaagaacattgggataaaatcagctcctacgaaaaagagcatgccacagtggggtagaaagtagagaagaacaaaggtcacaagggtagggagttggtgagaattagcccaaattcacccctccttttagagaactgcagcaatccacagcgtaactggcttgcattggtgcccctggccacagacctcagaagagtttagagatttccaaagttgcatttaaattttttgttttgttttgtgtcagagagccaagtccacaaagaaagttccagatcatgtctgcaaattctatttaaaccggtgttaaatagaatttgacatctgataacttcatgaaaaatatttttcttggtttttatcagtcaaaccaaactccttccaacctttattcttccaacatttattacatggtaactgtagtccagaaactacgccaggtgttggagttataaaagtgaagaaagctacacatttcctgacttcaaggagttgacgatctggggaataagcaaaggagaggaaagacagatacttggctaattggcaaggacagcatagtggtgatagcggtgggtgggtttggggattaagcaaatgtggcttccacacaaaattctcacactctttgcaacttgcagagttaaaggataagatatttgaagcaactgccaattactaggtgttcagttaaagactgttaaagttgtattgcacagtggttaaaagtctggagtcagcctagctggacaaattctagctctaacagctctaaagtctctagctgtgtgatcgtgggaaaattacttaagccctttatgtctcagattccttcatctgtgaaatttgagtgatagtagtaattagaccaaccacctaggattacaaagattaaatggatcgatgcatgtaagtacttagaatgacccagtacattgtaagcatatgtaaatgctagctacttaaaattaactatagtaaaatatgatatgtactgtaacaatgctagtaaaaatgctgcggactactaagtatcagaaatactgatagatatagaaatagatacagatacacacaaaagatgtttatgatattttgctaaatggaagaaaagttgcttgacgaaacagaaaaagaaaaccagtgtgagacaacatagcaaatgtaaggaggcatgtctgctcatttctgcatgccagcataatttcacgaagcctaactctgtgacgacgtgcagctctccggaaatatgctttgaaggcaaagcaggatagagcacatggccccatcatgtctcttgcctgagtcactaagttccttaaaagataaatgactctattccctgccttttcttacacgtaaggtaatatctgatggggttagtgatgatgcctctgtaatctataaccagctgtactcttacacccaaacttcgatgtgattctgctttaatgtaacttctgcacacatttgatgtgattttacaagtactaaaccttcacaactcatatataaactgtgagctaaaacaccatttcagagcagtctgacagaacctctttgaaggactgttcccaggctctaggcctcagtctatagtcctcagtaagacttctaaatacaaccacctttcattctttacaagcttgatttttttttctttagttgacaccagaagggctgggaaaatgtacatgaccatggtaactgtttatctctgggtagtagcattacagctgatgcatttttctttttttgtcaaagttgtgttttctaagtaaatttaaatttattgacttaataatttaagaatatctttacatgacatataagaaaatttggttattaaaaggcacctagaactcaaatgaaggattaattaagtatgcagggcaggattcaccaggaatgtcacctctgagctaggtattaaaggaattgattggtagggctttgaagatataaagattagtagagataagaacaagatccccgtatttgataatattggaaaataatgtatcaaatagtacatgagttaagtgagctgttaatccttttctgtttctttctttttttaaaaaatagcaacaaggtctcactgtgttgcccaggctggtctcgaactcctcggcctccccaagtgctaagattacaagtgtgagccaccacacccagccgagtgggctactaatcctcagtgaagaggccatcactgggcactgaatatcagagtccatccttattttttgtgtgtgttcctcttgtttctgaagtatctaatggaaagtctggcttctctgtttctctctttctctgatttcagaaatcttattacggtatcctatctattgaagataactagagatcagtttaagtcttctccatgctggagcttacagaatagatgctaattctattgcctgctttcccagatactgacaggtaataagagggccaagtagaccaccctgccatggattggagccatgtaagacccatcctgtgtacactcagagctgactctttcctaggaagtgagtggtatggatagacatgcgtcttttccaattcttcctgtgcctcacctcagtcttcaggactccaaggaggtaggaccaaaaagcacagggcccctgagtgttatttcagatcctctgtgtaaccagcccacacctgagccttctgtcaatggaaaactccattaggcagcaatgactggagaatgtctccaatttattcaaacatgtttctagagagaagacggtggtggggagaaaagcacttccttcctctctctacctcctgtctcttcctaacctcctctgctttaatttctggctaacctcagcactgttgacatgaaaaagaagcctttgcactgttaagtctactttgaattatttcaatatggggaccttccctggccaccaggcaacaaactgtccattcttgattttctcctctctctctcttctgggtattgaatatgtagtttggctggaccaggtgctgccaaaaacttcttgggaggcccacggcttcccagaatctagaatccacccagagaaagtccctgtgaggaaacttcacagatctttctctggttacgtctctgggaacactgcacttgcccggcttttcctgcactgcttttcttggcttcctcagtgtgatggtcctgtcttctttcttcaggaaaaacaggccccctggccttccctttcctagatgtgaaggaaagatgccagagccatacaatgttggtttcagtaccaccaacttgccgtgtaactttcggcaaattacttagcctcgctgatccatcatttccttttgtttctaagataggagtaataatttatcaattcatagtgccaggaagacccaggtgccaggaaggatggaatgcttagatctgtcatggaagatacaaggaattagatgaggaaacacaagtaaaggaattagcacaatatctgaaatatgtagtcattggctattatttacatctttccccaatttcccagtctcttttgctgttatcaagtatatgcataaggtcttttttattttgaaagacttagtcattatgggaaaattgacaaaggactgcaaattctgtataatcatgtggaactttcacaacttaaccaactgcaccacattcttgacctctctgtgcaggcagagagaattcagctccctttggactgtggctttataacctcacatgctcttctcagccaaccgacctgaagagccagtaggcattgacttgcattctttcagaggtcctcttgtttcaataataataagcaccatttcttaacactcactatgagcaattcatatattttgtctcattttgactttataacaacaccatgaggcaggtaaccttatctcaatttactagtctggaaagaggctcagaaacgttaagaccactctagatatagttctggagccacaaaacaaactgagatttctatacagtagatccaaaatctatacgcttgactctctcacgctgggaccatgatacagcagtagcaacagttacaaagctctttactttagaggcccgtttcttgggctctggggttgggaggtaggtctgaacacttgggtgtctcataaattctctgacttcacacactgagcaacttcaccacacatcactggcatctaacggtcagtaatactgaagtctaaataagtctctcagaagcttacatatcaataatataaagtcatctagtacaggacagaagccaccttgatagagccaagtcagtatctttcaatctgacaagactggtcaggaggctctcagaccagaaggtaatatcttcacttgctgagcactgtactatccgaagttcaaaactatagactgtgccacagcggggcacatgtgcaagggcagagttggagccctgaataaacagttcaccattacttacagaatttccctggttccatgtttccccctttcttttttggggggaaggatgtgaatttttcttctttttctccagcagtagcagtactgaaaccattcagcaacgaggatttggcagcttctaagggtcatgtcgttggtgggtgcagtttgagttgaagtgattgcagacgtgcagacaaacacacagaaatagaggttcagtagggcctgggcctaagccctggggaaagctacagttacttcagtggaaggggagtaggagccaacagagcaaatggaaggaagagcaggaagatgatgccgcactccggaggagaagcagcagagttgctctctgtacctgcaagccaatggagaagtttatcataagacagtaatgaactaataacacaccgctgaccggtgacacacagcaatagtggcaactgttgaagaactactgtgtgctcagcgtcacgctacatgctttagagaagcccttagggcacagtggagttagaagtacgttatttattaggaatgactgtacataggataaaaaaaaaagaaataggtcatttatcctaactcttacagcaactagctttgagaaagtgagcagcttattcaatctctctgagtattaatttcatctgagaaattggagtaataatatccatattactcatttagcctatcaatgtgaactgaaagcctactgtgtactaaacactactctaaaagctgcatatacatgtaaaaatttactacctgttcggctgggcgcggtggctcaagcctgtaatctcagcactttgggaggccgaggcggatgaatcacttgaagtcaagagttcgtgaccagcctgaccaacatggtgaaacccagtctctactaaaaatacaaaaattagccgggcatggtggcgcacactagtaatcccagctactcaagaggctgaggcaggagaattgcttgaacctgggaggcagaggttgcagtgagcctagataatgccactgcactctagcctgggtgacagagcg

SEQ ID NO: 261 - DNA, 1347 bp, Homo sapiens
attagtgtgatctcagctcaaggcaaaggtgggatatcatggcatctatctgggttggacaccgaggaacagtaagagattatccagactttagcccatcagtggatgctgaagctattcagaaagcaatcagaggaattggaactgatgagaaaatgctcatcagcattctgactgagaggtcaaatgcacagcggcagctgattgttaaggaatatcaagcagcatatggaaaggagctgaaagatgacttgaagggtgatctctctggccactttgagcatctcatggtggccctagtgactccaccagcagtctttgatgcaaagcagctaaagaaatccatgaagggcgcgggaacaaacgaagatgccttgattgaaatcttaactaccaggacaagcaggcaaatgaaggatatctctcaagcctattatacagtatacaagaagagtcttggagatgacattagttccgaaacatctggtgacttccggaaagctctgttgactttggcagatggcagaagagatgaaagtctgaaagtggatgagcatctggccaaacaagatgcccagattctctataaagctggtgagaacagatggggcacggatgaagacaaattcactgagatcctgtgtttaaggagctttcctcaattaaaactaacatttgatgaatacagaaatatcagccaaaaggacattgtggacagcataaaaggagaattatctgggcattttgaagacttactgttggccatagttaattgtgtgaggaacacgccggcctttttagccgaaagactgcatcgagccttgaagggtattggaactgatgagtttactctgaaccgaataatggtgtccagatcagaaattgaccttttggacattcgaacagagttcaagaagcattatggctattccctatattcagcaattaaatcggatacttctggagactatgaaatcacactcttaaaaatctgtggtggagatgactgaaccaagaagataatctccaaaggtccacgatgggctttcccaacagctccaccttacttcttctcatactatttaagagaacaagcaaatataaacagcaacttgtgttcctaacaggaattttcattgttctataacaacaacaacaaaagcgattattattttagagcatctcatttataatgtagcagctcataaatgaaattgaaaatggtattaaagatctgcaactactatccaacttatatttctgctttcaaagttaagaatctttatagttctaatccattaaatataaagcaagataataaaaattgttgcttttgttaaaagtaat

SEQ ID NO: 262 - protein, 319 aa, Homo sapiens
MASIWVGHRGTVRDYPDFSPSVDAEAIQKAIRGIGTDEKMLISILTERSNAQRQLIVKEYQAAYGKELKDDLKGDLSGHFEHLMVVTPPAVFDAKQLKKSMKGAGTNEDALIEILTTRTSRQMKDISQAYYTVYKKSLGDDISSETSGDFRKALLTLADGRRDESLKVDEHLAKQDAQILYKAGENRWGTDEDKFTEILCLRSFPQLKLTFDEYRNISQKDIVDSIKGELSGHFEDLLLAIVNCVRNTPAFLAERLHRALKGIGTDEFTLNRIMVSRSEIDLLDIRTEFKKHYGYSKAIKSDTSGDYEITLLKICGGDD

SEQ ID NO: 263 - DNA, 1506 bp, Homo sapiens
attgcagtacatttgagaaagtaaaggtgtagtggaaaccgagagcgaaatgagggcgtagggagaaaagggtggggaagcttagagaccggtgagggagcagagctggggcgcctgtgtacagggatagagcccggcggcagcagggcgcggcttccctttcccggggcctggggccgcaatcaggtggagtcgagaggccggaggaggggcaggaggaaggggtgcggtcgcgatccggacccggagccagcgcggagcacctgcgcccgcggctgacaccttcgctcgcagtttgttcgcagtttactcgcacaccagtttcccccaccgcgctttggattagtgtgatctcagctcaaggcaaaggtgggatatcatggcatctatctgggttggacaccgaggaacagtaagagattatccagactttagcccatcagtggatgctgaagctattcagaaagcaatcagaggaattggaactgatgagaaaatgctcatcagcattctgactgagaggtcaaatgcacagcggcagctgattgttaaggaatatcaagcagcatatggaaaggagctgaaagatgacttgaagggtgatctctctggccactttgagcatctcatggtggccctagtgactccaccagcagtctttgatgcaaagcagctaaagaaatccatgaagggcgcgggaacaaacgaagatgccttgattgaaatcttaactaccaggacaagcaggcaaatgaaggatatctctcaagcctattatacagtatacaagaagagtcttggagatgacattagttccgaaacatctggtgacttccggaaagctctgttgactttggcagatgtaagaagagatgaaagtctgaaagtggatgagcatctggccaaacaagatgcccagattctctataaagctggtgagaacagatggggcacggatgaagacaaattcactgagatcctgtgtttaaggagctttcctcaattaaaactaacatttgatgaatacagaaatatcagccaaaaggacattgtggacagcataaaaggagaattatctgggcattttgaagacttactgttggccatagttaattgtgtgaggaacacgccggcctttttagccgaaagactgcatcgagccttgaagggtattggaactgatgagtttactctgaaccgaataatggtgtccagatcagaaattgaccttttggacattcgaacagagttcaagaagcattatggctattccctatattcagcaattaaatcggatacttctggagactatgaaatcacactcttaaaaatgggctttcccaacagctccaccttacttcttctcatactatttaagagaacaagcaaatataaacagcaacttgtgttcctaacaggaattttcattgttctataacaacaacaacaaaagcgattattattttagagcatctcatttataatgtagcagctcataaatgaaat

SEQ ID NO: 264 - protein, 348 aa, Homo sapiens
MASIWVGHRGTVRDYPDFSPSVDAEAIQKAIRGIGTDEKMLISILTERSNAQRQLIVKEYQAAYGKELKDDLKGDLSGHFEHLMVVTPPAVFDAKQLKKSMKGAGTNEDALIEILTTRTSRQMKDISQAYYTVYKKSLGDDISSETSGDFRKALLTLADVRRDESLKVDEHLAKQDAQILYKAGENRWGTDEDKFTEILCLRSFPQLKLTFDEYRNISQKDIVDSIKGELSGHFEDLLLAIVNCVRNTPAFLAERLHRALKGIGTDEFTLNRIMVSRSEIDLLDIRTEFKKHYGYSKAIKSDTSGDYEITLLKMGFPNSSTLLLLILFKRTSKYKQQLVFLTGIFIVL

SEQ ID NO: 265 - DNA, 1691 bp, Homo sapiens
attgcagtacatttgagaaagtaaaggtgtagtggaaaccgagagcgaaatgagggcgtagggagaaaagggtggggaagcttagagaccggtgagggagcagagctggggcgcctgtgtacagggatagagcccggcggcagcagggcgcggcttccctttcccggggcctggggccgcaatcaggtggagtcgagaggccggaggaggggcaggaggaaggggtgcggtcgcgatccggacccggagccagcgcggagcacctgcgcccgcggctgacaccttcgctcgcagtttgttcgcagtttactcgcacaccagtttcccccaccgcgctttggattagtgtgatctcagctcaaggcaaaggtgggatatcatggctatttccttctaggttggacaccgaggaacagtaagagattatccagactttagcccatcagtggatgctgaagctattcagaaagcaatcagaggaattggaactgatgagaaaatgctcatcagcattctgactgagaggtcaaatgcacagcggcagctgattgttaaggaatatcaagcagcatatggaaaggagctgaaagatgacttgaagggtgatctctctggccactttgagcatctcatggtggccctagtgactccaccagcagtctttgatgcaaagcagctaaagaaatccatgaagggcgcgggaacaaacgaagatgccttgattgaaatcttaactaccaggacaagcaggcaaatgaaggatatctctcaagcctattatacagtatacaagaagagtcttggagatgacattagttccgaaacatctggtgacttccggaaagctctgttgactttggcagatgtaagaagagatgaaagtctgaaagtggatgagcatctggccaaacaagatgcccagattctctataaagctggtgagaacagatggggcacggatgaagacaaattcactgagatcctgtgtttaaggagctttcctcaattaaaactaacatttgatgaatacagaaatatcagccaaaaggacattgtggacagcataaaaggagaattatctgggcattttgaagacttactgttggccatagttaattgtgtgaggaacacgccggcctttttagccgaaagactgcatcgagccttgaagggtattggaactgatgagtttactctgaaccgaataatggtgtccagatcagaaattgaccttttggacattcgaacagagttcaagaagcattatggctattccctatattcagcaattaaatcggatacttctggagactatgaaatcacactcttaaaaatctgtggtggagatgactgaaccaagaagataatctccaaaggtccacgatgggctttcccaacagctccaccttacttcttctcatactatttaagagaacaagcaaatataaacagcaacttgtgttcctaacaggaattttcattgttctataacaacaacaacaaaagcgattattattttagagcatctcatttataatgtagcagctcataaatgaaattgaaaatggtattaaagatctgcaactactatccaacttatatttctgctttcaaagttaagaatctttatagttctaatccattaaatataaagcaagataataaaaattgttgcttttgttaaaagtaat

SEQ ID NO: 266 - protein, 280 aa, Homo sapiens
MLISILTERSNAQRQLIVKEYQAAYGKELKDDLKGDLSGHFEHLMVVTPPAVFDAKQLKKSMKGAGTNEDALIEILTTRTSRQMKDISQAYYTVYKKSLGDDISSETSGDFRKALLTLADVRRDESLKVDEHLAKQDAQILYKAGENRWGTDEDKFTEILCLRSFPQLKLTFDEYRNISQKDIVDSIKGELSGHFEDLLLAIVNCVRNTPAFLAERLHRALKGIGTDEFTLNRIMVSRSEIDLLDIRTEFKKHYGYSKAIKSDTSGDYEITLLKICGGDD

SEQ ID NO: 267 - DNA, 1688 bp, Homo sapiens
attgcagtacatttgagaaagtaaaggtgtagtggaaaccgagagcgaaatgagggcgtagggagaaaagggtggggaagcttagagaccggtgagggagcagagctggggcgcctgtgtacagggatagagcccggcggcagcagggcgcggcttccctttcccggggcctggggccgcaatcaggtggagtcgagaggccggaggaggggcaggaggaaggggtgcggtcgcgatccggacccggagccagcgcggagcacctgcgcccgcggctgacaccttcgctcgcagtttgttcgcagtttactcgcacaccagtttcccccaccgcgctttggattagtgtgatctcagctcaaggcaaaggtgggatatcatggcatctatctgggttggacaccgaggaacagtaagagattatccagactttagcccatcagtggatgctgaagctattcagaaagcaatcagaggaattggaactgatgagaaaatgctcatcagcattctgactgagaggtcaaatgcacagcggcagctgattgttaaggaatatcaagcagcatatggaaaggagctgaaagatgacttgaagggtgatctctctggccactttgagcatctcatggtggccctagtgactccaccagcagtctttgatgcaaagcagctaaagaaatccatgaagggcgcgggaacaaacgaagatgccttgattgaaatcttaactaccaggacaagcaggcaaatgaaggatatctctcaagcctattatacagtatacaagaagagtcttggagatgacattagttccgaaacatctggtgacttccggaaagctctgttgactttggcagatggcagaagagatgaaagtctgaaagtggatgagcatctggccaaacaagatgcccagattctctataaagctggtgagaacagatggggcacggatgaagacaaattcactgagatcctgtgtttaaggagctttcctcaattaaaactaacatttgatgaatacagaaatatcagccaaaaggacattgtggacagcataaaaggagaattatctgggcattttgaagacttactgttggccatagttaattgtgtgaggaacacgccggcctttttagccgaaagactgcatcgagccttgaagggtattggaactgatgagtttactctgaaccgaataatggtgtccagatcagaaattgaccttttggacattcgaacagagttcaagaagcattatggctattccctatattcagcaattaaatcggatacttctggagactatgaaatcacactcttaaaaatctgtggtggagatgactgaaccaagaagataatctccaaaggtccacgatgggctttcccaacagctccaccttacttcttctcatactatttaagagaacaagcaaatataaacagcaacttgtgttcctaacaggaattttcattgttctataacaacaacaacaaaagcgattattattttagagcatctcatttataatgtagcagctcataaatgaaattgaaaatggtattaaagatctgcaactactatccaacttatatttctgctttcaaagttaagaatctttatagttctaatccattaaatataaagcaagataataaaaattgttgcttttgttaaaagtaat

SEQ ID NO: 268 - protein, 319 aa, Homo sapiens; identical to SEQ ID NO: 262

SEQ ID NO: 269 - DNA, 151491 bp, Mus musculus
  misc_feature (1)...(151491): n = A, C, G or T/U
tgtgtatgtgattcactcctccttcactccttgtccactgcccctcctgggaaagtggaattagcatcagaatacaagcaacaccagggctctccacaacacaaacatatgagcctacgaggaccatttttatttcatttaccagcttggtaaattctttttaaaacatttcaaagtttatagtaatttacacattttatcctttagaaattagtaaggagttattactatatcaagcaattaataaataataatatactacaaataaatcagaaagtataatggctgaaaactaaggatgttaaagaaaaaaataatgtctagcattactaggagtcaagaattgtttttgtttttgtatttttttcttttgtgaataaaagagaatcattgaagtgagcctagcaaataatcagtatttttgctatattaaatatttggttatatttttaaaatttcaaaacaatcttcaaattaagaattaattttatgtttaaaagcattacattggcatagagttcctacccatcagtaacatctgacataaccaacttgtatttatattgtgtaaaagaaataaatatatacacacatatgtatgtatgtacacatatatgcacacatgtgtatgtatgtacacacatcaggcaatatgaactactctgattttatgactacgtggagttagaacttggcatttgtatgtggaggtcagaggttgacagtagatgacgtcttcaattgctttccactataaattttgatacagggtttgttgctgtacctggagctcactgattggctagatgagctgcctataactagccaactaacctcttacttgccagaagtagaaaattcatattggtatactaacatgaacataaatagagttgggtactaattgatgatactattggacaaatgaattcactccagttccaccagagtccatagtaacagttgtattctgcactgggataaagtataggataaggtattctataggattgccaaggctcctatgtctcatcttcctacataaacttctaagtgatctcaaatttattaaggagttgcaaatacaaaggactttcttctcctggaccactttgagagtgaattggttttgtcccaagccaccatatccaagggcttctgttgtatttccctaagtccaggcactcttcaatagagacacaaaggttttctaataactccaataaagtcctttagaacacagtgattcacttaaaaatggtgtatttcatgtggttgccaaataacttcatcttttatgcgtaacaatttataagtcttttcttgatacatttcaaggatccaggctagtgcagttatagaaagcccattggtttagggttatataatggtttttcatgattggactcaggttatatgtctaacacagtcatatcaccaagtaatacagtattcttttcattatatacaatgaaatttagttgtgtgtgtgtgtgtgtgtgtgtgtgtgtgtgtgtttgtgtgtgtgtgtgtgtgtgtgtgtgtgtgtgtgagagagagagagagagagagagagagagagagaacagaacacatgtggaggacagatgttgattgtcttcttgaattgcatttcatcttatttgtttaaatgtgtttttaattggaatagaattatatcattttcctcctccgtttcttcctccagcccctcctgtctggctacgcttatttgagaccttcacttgtgccctttcactctcaagatgagtgtctcttcttcttttattattacatacatttataaatatatgcatactgtcctacaaactcaggtagcctgttccttcctcctggctctgagattacaggtgcatgctgccatgcctctgtttcatgtgcatgagttgatcaaattaaggttctcatgctttactgagtgagacatttccttggtcccataacttagctttgtatcgttgccgctgatgttgactttgataactggattgagaaaatacctgacagacttatctatgtaaagttacttagttttttatcatgtataaaatttttgtggtgattacttctataaatgcagtttttatatacacattaatgtatttatttatattaatagggactcatggtctcttatcaagtaaagtgtaatgttttaccgttgttcatctaaacaacatttttatttagaattgtatatttattggtgataaaaacaagaagaaaatcccacagaggttctcttttgtgtgcacgtcatctagtttctccccatggttatattttgttattatagcacaatgtaacaggaaactgacatggatacaatctacaaagtttatccagatttccttggttttatttgcacatatagatatctgtaatttcacatttgtgtgccccacataaaggctagcacaatacagatacagaactcttccatgaactctgagcagccttggattacctctttcaaatcacttcccatgtcttcttctctttaatactaaagtttcaagaaccactaatctgttcttaacttctttaactttatttcaagaacatattaatgggataataaaggggtgtactggatggtgttatatcaacttgacacaagctaaagtgatctgagaggagggatctcaattaagaaaatggctccagaagattgggctggaggcaagtgctagtctgacgctgcttgtattcaaaggctaaattctgtatcccaacatctgcttgctccaagataagcagatcctcacacataccagcttttgttgtgtaagttttgtctgccccccccccccaagttatttgtgactggctaataaagatgcctacagcctgtggctgggcagatgagttcctgagcttggggtctgaggcaaggaccctgaagagacagggtggaagaaggaagaagcaccatgggggtaggtggatcatgagtgcatgactgcaaggggtagaagcagtccatgcagaacatgttatatcttggggttattgacaggggaatagaaaaattagcatagagggttgatatctgtggagctataatgctttaaggcttattataaatgtaaaggttttctgtcatttatttaggaactaaatgatctaagagagggtagaaatgttcagatatttactgcaacatgcaaacctataggacattttcttaattagtgattgatgggttcagtctgttacttttggtgccactcctgtgttggtggtcctaggttctacaagaaagcagggcaagcaagccatgaggaacaagccaggcctccatgacctggcatcagccctgtttgcgtttctgccctgacttcctttagtgatgaataaggctctgtagtcataagccaaatgaagcttttcctcgccaacttgctttggtcatggtgttttatcagagctaggttagagtgtatccattttttagattttttttttttaacattttggttgagatggaaccaagctcttccatgtttcaacagttcatttgttttaatcaagtaacagtatattctgtgaatgcaaccatttgttcagcgtgcaactactggtttgaatgcacaagtacctctaaaagttctttccttggaactcaaatgccaaggtgatgatactcagaaatggggccttggagggtgactgggtcgtgaggattttgccttccccagagaggccggtgccctctaacaaagactgtaagcaatgagctcaacccttagaatcttttgtcttcttccatatgagggtgttgtcaaagaagtcacctttgaagtaaaagctttccttagatcctgaatctgctgccttggtccggggatttgcaagtttgtaggcacgccaaagcaggctttcccataccaaagctttcccctcttcttaggctcaggcatctcagtggtttttttggactccaatttaacttcagtgttaggcttagcttttgactcatgcagagataccaccttctcatgtggctgtcaccctcaccattcccaggttcgggtaccaactctaggccacccctctccacacatggggcatctttacgccactcagtctcagacagcctgctctaagttcctacacctcctcttgataaccaaaaattagttggccttctataggattttgactgaatcattcagcaatggaatggaagggaagaggagacaacacagacacctggaatgtgtataaggcaaaaatggacattttaaagtgaggtaagacttgaagatgcaatagtacctgtgaggggagcaggaaagatcttgacttttctgatgcatgtagtcgcggtaaggacctgtgttttatagaggtgagagtagagtcaagttgcaatactgtggttgagattgagagtcataaattgttaggaaacggtattccattggcagtgtagtttttacaaccaattttatacttgagaaaatgaaacataattggagtgttcaggaagcacgaatacatggaatgctcttagattaactccattgaaaagtgagaaactgacctgggacagggctagcacagaaagcactcatatgattctttcttccagtgtgtcagtctatcgctgagctgtttgtgaagccccaacttcatgcaagagaaggctttcatcaaagtagattcagacccctgacatattgtggtcttctggatgcttcctcaaagcagattcagtgtccaggcttgttgggatgttctggatgctgtggctgcagatgttacacttgcactatctgtattcatgctttaggactaggacacctcactcacctagacggctgccagtgacagctcccagccgagtttctgacagcagttgctagccaaagcatgttttcctaccagagcttgtgcccctagttggggggcagtccaaatttgatgacctttctatgaacaaacatagaaatcaggcccccacctgaaaggccatttcggccagagttacttttgaggatggctgaggtttcctctgcaattatgtcctgcctgggaccatttctgtatccttcctctcctaggtttctctcctgaaaggatgttccacttcacatgtggtcttagtctcatgcctctttctaggaacctgggttttaagcatctagtcccaaatgcagatgttgataactttcctataatacacactgaaattttaagtggtctcatacacagagaatctactttacaggtaattatacctccccaaaccattcacaggaactcgatcagacataggggaaatttagttcttttatgaccatgcctgataaaagctgaaataggctttatcacctgtaggcactgaagatttattttcttcctctgaatcactttagataccacacaatgaatcacttccgatgtgatgagtatatgaatcacttctagcagtagacaatcccagagagtcatgtccatcactgtggctgccaggcaaagaagcctgcttgtaagtaacacagaggtttgctttcacctttttagacctaaaagatgtttttaaatgtttgcctttatttttacacatttgcttatttacttatttgcttgttatttgttggtaaaggtagagagaaataaattaatttctatgcagatttcttgagatcagggtgggtagcattctaatttatttttgagttatgtgtctatttgggtgtttctgtgtgagttttacatatacaggtggcttgctcacagatgccagaagatgctttggataccctggactgagtataggttatgaacctcctagacataggtgctgggaactgaaatctggtcctctggaaggcattgctcttagccactgggccatctcttcagtcctgcatttttgcttagaatgttgtaacacacatcgcaggtatcagcaaacatctgctaacaaagattagtacatgaattattatataaaatggaacatgagtgtgtgtcttcatctcttcctttttcctcccccctccccgcaacttcctgaaactgtgtccttttccccattcttacagggaaagaaaacttggtttgaaacgttgtgctcacccaaacccttagtccccttaggagtggaaaagggaagtggtgctgttgtctcagctcaacatggcccagaaagaattccaagtgtattctggctctcatctccttcattattgcttgtgagaaagcatggtcagcagcagcatttgccagggacactcccaagaagagactgacctacttttagctttagcccatgtccttggactccccacagtaagcagcaaatcaggacagcgggttaccctaataaccaaaaatcagtaaatagtttttacatgaacataatttggttgactattgatctctgctggttgaggccatttcctgttttgtggtcagtcttgcatgagcaagctagtgaaatgcaagacttctagagctgtgctgaactcatcacctacacaaaccaacaaagaaccatgagtgccggggttcagtataccagttacttctattagccttgggatccaggaagtgccgaggtcagagagtgtattttgctataatttgagtgtaagagaagacatcaaagtctacaagatgagcaggcaatgagtcaagaaaccaggggcaaaggagccaattatcgagagttccaagtaccttaccaaggggcaatatcctgtagcatatctcttcaaattgcttcttgaaaacacttttacagtttctggcagacttcatttatcccagatttttattagaatatatgtgtgtgtgtgtgtatatatacatacatacatacatatatatgtatacacacatatatgtatatatgtatacacacatgtaatatatggtattatttggtaaaattactcaaagtataattctcttttgaataggattagagttaaaaatggagacctaactgcaagtctcacaaagggcatttactatctgaattctgggcactagctgataggaactcaataaatattcattgaagtgatggtctcctgtcctcaaagagctgacattgacatatctggctgtaaatcaaaatcataaatatcataaatagagtatcataaataaaaagttaaacatagatggtggccaacaatacacatgcaaaagagcagcctgtaagcatcacaggaacttcctatcataaagcattgacttgttacagtgacttgtgaaggaggaggggctgcctcctctcagtcactgtgtgcatcagtgacgttgaaagctctaaaagctacgttgttgacaaagcaaaaggggaagtcacaggtggaagtggtggagaagagaggggagggagaaatggggaagagaacagaatcagtaaggagaaatttgcacacaaacttcagcccctgtaggattttggcaagatctgatgagctcaccgccggatgaagtcttattgtgattcagtttgttctttgagtcatacgtaaccataaaattgtacatattaatgtacacattgcacaatgcttacaagttacctggctttatctcctccactacttagccttttcaaggtgaaacccgtgataactgggctcagggagagtgggactagatatttccaggtgtgattttccattgctaccgaagtgatcactggctcctagctttgtcttggctgggagagatgcaaattaaaagcccagtggggtgtgggataaccttcctttaagttgttgatcacaggtgtcccaaaatcaatacaggctattaccattactcttggttgcctaccggaacttgatgtcaagaccctttagctgtagacaccatgcattttggacacaggactttgaggaacccatctggaactgacctgtagtctcccgaaatctagctcttatagtcttagaattgattatgtgagctgccaagagagaaaagccatcaatagtcctgcctaccagtgaagcctgcaagccacaggaatggctaacatggagagatatgctcatttctacaatatagggtgataactgttttctgattgggattaaggctcactccacagaaagaaacgtatctttctccaagatactccaagagcctgtggctgtggtgctcatgggccacaggaatgaacctattactttgatgtcaaataaatggacatcaaagcaaacgaccctctgaattcatgtctctctacttgtagatcagccagcgcaactctgagacctcatcagacaagtttctcagtgcaggggatggtggttaatgcacaaacccacaaatggtcaaatcgaagagaataaatgctcgtggattgcccagccacaaatgggacatacaaatcacaagccctccttaacgttccaggacaatccacaaagggtgggagtaaggtgagtgaaaagattcacagaactctaggtcaggggcactacagctcagcgctggcctctgggcatgacgggattgctgcatgcatgaacacacagccgctgaggttgtcgcacaatatcctcagaagatcaagccagtcaacctgctagcatggagtgggaaactttttttttttttttttttttatgaaatcccaccggtcaccctggagctatgcacagtagaaggcttccgagtggggctatggttttctttaagggtgtggttctttgaaggctaaacctactccattgaatggtccccacgtggaccaggagtatatagactgctcaaattggagtctatgggttcttgacaaaagggacacgaagttgaggtgtgtgtagggaggtgagggttgatttcagaggagttaggggtagtgaggtgttgggtgtgtgtgtgtgaaaaatatatatgatcagtacacgtcgcatgaaactctcagaattaatgaaaaatggaaaaattatcaaatagaaaaaaaaagagaaagaaaagaggaagtcccctttcttaaaccttaaatcctgcgtcactaggtcggtgtgtgatggatgaaaggtgcggagggatgaggcataaggccgtcactatccaggagacagctggtcctgagtctctaaaccacgcggagggccgttccagcacagctggggaaaacaggccgggccaggcttgcgggagagttggatatgtttagtatctagaggacgtttgtttttcagaactcctctctcccttccgaaatctggcaggcgttagtcatccgctgctcagcacgaacccttaagtgtgcttgtgtggctcgtcgggcttcctcccggcgccccgccctcgggctcgcacgagcagaccggtcagcgcccactcccaccccccaggcctgaggtgcccggcggcctgccgctcccccgggtgcttagcatcccgggctgcagaggctcgccccgcgcggcgcggcgccaggttggggcagggaagaaagttataaagtgccgcgaggagttgggcggtccgaggaagagaggcggaagaggaggactcggctgagttcccgcggcgatcgtggggtccgcgggtgcctgtcccgcagctcaccaccgcagctagacgccagcctttctgctcccgggtgggcgccggagactcagcgggaggcgaggaacttgtcccgagagctgtcgctgcgggcctcattgtctgcagcaactctccggaatccggagtgggagaactggactctgtccactgggatttgcccagagttccggcggcagctgtggcggctgcggagactctctttgtcctcccaggacctcgctctctctcctcggtggcagctgttgggtggctctgagcttggagagggcatcccagccccgctcagcctctgacccccgggcgagtccccggtgactccgcctctttcacgtctctgctctgtgaagcccggagcccagaaccccgagcccaagggactgtgagccagagagagctgccgggccccggccacaggatggtggccggtcggtcccgggcgcgcagccctgggagctggctgttccctggcctgtggttgttggctgtgggcggtccggggtcgttgctgcaagcccaggagcagccctcttgcaaaaaagccttcgatttgtacttcgtactggacaagtgagtgaaggaggactgtggggtcagggtctcctggggggagggcagctctgaatcagctaggactgaagttgagatgtgtttggattctgggggaggcgacgagggaactctccctagtgtgcatgtggctgactcctttcaaaggcaagctcattagctgtacaggaataggggctgcgagactccagggctacttggttctccaaaggagaggcgtgcagtgctttttttgtcctggaatcttttgggccacctgcagctcgtttcctcccaggaacttttgtgcctctttatcatactccccctagacccccacggcacattctaaagtttgcctaattttatcctgatcacactgggagccaggggggggggaaaaagccttaatatacccaatgtggcttgcatttcctgagaaatgagggcttgtgtttttattttgaaaagccaggtctctctctaaacagtacaaagcaagtgtccaccccccctccccgccccccaagaagtgtggtcttcctggtttccttgattcagcccaaacactaaagtttcagctctgaacatggacatgaacaagcacacttaactttgaagaggggagtcagtnnnnnnnnnnnnnnnnnnnngagtcagtccccgccccctatccctgacccccccgacctccaccccccatcatgcgccttttaaaactgaagaaatgtttgccattaaggcccactttttgtctttctgatcaatttatcttcctttttcaggtctggcagtgtagcaaataactggattgaaatttataattttgtccaccagctgacagagagatttgtgaggtatgtctccccatcgtacctttcttggcattggaaaggaaatcgaacaaacagccgggtttccctgttctaaaacccttctcatgggaaatctttcccgaaatcaaaatgttgaattttaaacgtctcaaggtggccctttcacacatggtgtgcaggcgagactttcagctaacccttgcaagttcaatttatctggctcccagaaacttggcccagggtgtgagggaacatcttcaaatacaattcttaatgtcttttccttttcgaccactcatctgttttgagtttgagttatgctttctcataatttatcacatttaaaaaatacattttatcctaatagtgcctgtactatattttcaattccacacacttggctctgtaaacttccacattttaaaagtgtcggaaaactttaaatgaacatgtgttaataacccactagctgaaaaagcacttgtgtgtgtgtgcatttaaagaaatgagttgtgtttacacaatgtgtgggtgtgtggctggtttaaaatgtaaccgttctatatatgcaggaggcttcactagcaaacactgtttccctcggctataaaaagcatggctgctggtaaatccagcttactctcttatttagaagtaaccaggaattagtggcaatccctatttaaaaataacccttggatgcaatgttttctgtggttaccctcttctgtttttttttttcttttcttttcttttctttctttctttttttttttttttttggatgccaggaacaagtgcaagtttatcagggtaatgggagggacacggataggagctgtgtcattaaatattgcctccctcagtcttctgagcccaaatgttttctgtaaaacaggcttggatgatcaaaacattttgaaagtcatgttgcaagtaacttcaaacaatctgtagaggcctaggcaattcccgctttggttattggcagccgtaaagctgtccctataaaaatgtatgcctgtcggtgttcaatcttcagtctcctgcttcaggagccaaagatagcactctggttcctggacagggtctgaggtcaaaccatctaggcagggaatataaataagagcttagatctgtaactgtcaaagccaagcagaccgttgtttataagtttctgattccatcgctgaatgtgctgagaatgtcattcagtgttactcaaaagcaacggattacttcaatgtcacatttgaagaaaacgaggctcttattgaatctggtttgcaagtttggatttctatagcatatactgttctctggctcaagtatagttgctcagttactaattatatgttgtggggaaatgaataaaagatagctgctgtcaagcacagtgcttacaggagctagggcctttggaccttccagcttgtgtctcagtttcacaactgcagtttcagacctgagcaacactagcatacgcttttctaaaaacaaccaccttttggtgacattagtgccaaaatcctggaatatagattgggaatttgaaatgccaagtcaaaaggtgatttcttaatgctcaaagtattaagaaatgtaattattaagatatttaagcatttacagtatttatggtgacttttgtctggactcttatcataacgtggcttctacgttaagctgacttctctccagccctaagtgaagggtgtggcctcctgcagagagaagtaggagaaggtcaaaggaaggaacatttttctaggaaagagtcttgcagcagcctagagactgtccagttattctttctagatgtaaacgccagtcatttgtggaggagtgttctgagagcggagaagcacagactgcataaaaagaaatgcagtgcagacaggagggctgtgcagagttagctgatctactgagagagttccatttaagggaagtggggactgtgcagggagaccaattttaaatgagattcctggctctgcttttgtattgtaccaatatttcttttgaaaatgttttaactgcctctttccttattttgcagccctgaaatgagattgtccttcattgtgttttcttcccaagcaaccattattttgccattaactggagacaggttagtgcattatcatttcagcgcaggcttttaggagagatgaatcataaaggcatgattgatattgccgtgtggtgatctgggcctctccgtgggctcaagcgaacacacagacaactcagtgctctgcaggaacagaagggagaggcagcatgagtatgcaggagtagaccatctgaaaatcaatatcatctatattggttgtggaatacattctacatttctagtctttctctgaagttcagtgacttgcaacaaaagactgcacacacacaaacacacgcacacgcacacacacaccctgctacccctcagtgcttagaaaaggagtggctttcctgtccattgtcacaccatttcttgtgaccctttctatggtgtctgatcatagtgtggtacattggaagcaaccatccacgtatctgactcatggctgcttttcctggggttacttttgttttcttgactgtggagtctacgatcagaaatggagtgctatgattccatttttacttcatctgacagaaagtgtgtaagaccttggttagtgaatacttgttgactgaaggaatgtggtaaccacatttcgggatcacctctttctgatccacagttttaagcaagggcgactgcagtgctttggtttacagaatgtgtgaatttctaaaaaataattgtgaaaatagtttttaggtttcttttgtaaaacccagttaatatgctttaatccttatttcttgagctttcagtttaaaaagatcaataaggcatactatttaaaagcactgaaggagataacttgtttatagttaattgactcaattaggaaaattatatatatatgtatatatatatattacattatactatactatatcacactattctatactatactatgctatactatactttgtgtgtgtgcatatgtgtgtgtgtgtgtgagcacatatgtaactcttgtgtcaaatttttctttgcctgaagaggaaaccctctctaggttgcgagacctgctcagacttaagtattcctatttgtattttgcctctttaatttattatgaacatgtggtttcaacactgacagtcccttataacccatgaacatattttcctatgtgtctcaatataaaaatttttgtttttatgaaaaggacatatctttactgtccagattagtttccaaagagtcaggtttggatctagcatgtcaaggaagaaaaacacagttctaatattcatgatattcatatatacatagcaaagcacttagcacaatgccagacatgtcaaaggctcagcaactgacagttgcatacattgtgccagggtttctgctaggcactttgcatatgggttctccatcatgctggagatgaaacatagtcacgggtcgcccagattgataatgtttagacatgtagggaggagatgtaaatcttttatgtaagctcaagacatgtcctttgtccatggttaaatccactgcataagggactgaaattggtggcagaagaggctgtcactcaagaggcaacttaacgacacactcaagagttaccaatctgaatctacttgggtttaaatcccacccctttaggttactagttgagtgacgaagggtaacttgcttaacaacaagcttcttatgactcatgtggatcctcatgtagatgctgctgctaatgatgacaagagtaaaccccaccttataagacagttgcaagaactgaagttgatgaatataaggaaagatgtaatatgttagtgttcacgagataagagctttggatgtggagagatggctcagtcagtaaagtgcatccatgcaagcttaaagacctgagttcaatctccaagtactatgtaaaaaaatggatattgcagtgcacacttgtaatttcagcagttgggagacagagacagagactggggatgctttgggacagacagcctagtctaattaggaagcttctgaccaacaagagaccctgtctcaaaaaaaccaaccaaccaaaaacaaaccaacaacaacaacaacaacaacaacaacaacaacaacaaagaaaaccaaaggcctgacacccatcatagtcccctgacctccatgtgcatgcgaacacacaaaatgagatgaatcctactcagtgtcagcctttctgtcgatagaacacagatgtccaatctgcagtgttttcttagagttattgtagagatccaaataagacaatgggcagtgtaatattttatatgtcatagagcaatctccaataaaaagggctagttccttctaagctaccatgttactagttctgctaattgaattggtatcaaattaactgtgattctccatctttggatatagaatcagtccacaattttaaatttagagaaatagtttttttgttgagatggaagatcagtggacaactgtttccaagacccctgtgactctttgtattaaaacctagaaactgggttccttactgtatataaactttcccaaaggtttgtgtgtatgcacacacacacacacacacacacacacacacacagatctaagcatatgatttgaaaagtaagagttaagcaaaagaaaagtacagaaagtttcacaattttgggttttcttactcacagtaccttgacaaatacaagaagttgttctttcgtgtttcgtaggggttgctaaagagatgaagcaaaatgggaacacaataagtatgcacgtcagggctgggtcttctgtcatgattttggcatgatgtctagtgttaggtaaatccacaaaatcataatcatggcagacaattttcagttatacattttagatacccaaagcttaaatttttatcaaattaaatactttcatctgaagcatgcctgcctttttcttgttcccaggactttgttctccatgtacttgctaggtccctgatatactcacttacctgtctgctttatatatgagatttggattccacaaagatagtaatctaatgtgtgtgtgtgtgtatgagatagatagatagatagatagatagatagatagatagatagatagatagatagatagtcagggcatgattatacacataaataaccaagatccgtagttgagcagtggttctcaacctatgggttgtgatccctttggcaaaactctgtctctaaaattatttacattatgattcataaaagtatcaaaattacaatcatgaaatagcaatgaaataattacgtagctgcgggtcaccacgacatgaggaacggtattaaaagaattgtattaggaagcgtgaaaacccctgtattagagggtcagggcagaggcaatattcagtatgtaaatatgtaacctctcagaatatggaaaaagaatgaattttgatagtgttactagttactattgcacataaatgtgaatagtgatttctgcccaattctgctcataattatttaattctgtgataatgatttagataaaaacatttgctgaacaatcattatgtgccagataatttgtaaagtgctttctatgcataacctctgttaactctatgtaattacttgtactttaagataggtcatctatcttgtctaaggactcccagtagcaagtgccaagcagtgtattagccaatgtttaagtagactatgtcattctaacaccttggaagagaaacaaatgtctccaaaaccctatccaggtgcccctcactcttttcctgggtcctatggccttcttcccatcccatgaacaagccaagcttatttcaagttaggccttccttctctaacccaagtcttctctgaggtcctgttcttcttttcctttcctgagctagggatgtatctgagtggtagagtgttcataagtatgattctggtttgatcccagtatcaaaaaaaaataaacaaacaaaactccaaaccagccaatgaaacaaaagctcatctcacggataacttcagagaagtcttgccttgcctccaagtgtaaggtatccatacccttccccagtatttctaaaaccactgttcttattttttaaataatgaatgaatgaatgaatgaatgaatgaatgaatatgaatttccctgagcctagagtatatgaaagtatggcattcttcattttcttgttcactcatatacccaaccctagaacagagcctggtatatatagaagctcaacaaatctttgttgaatggtggaattcttctgatgccagaacctaagttaatgctcagagctactacaatagactctagttaggccaacagtataaatcatggcagtgtaatgtaaacactctcttgtatttgctacttaccccattcctattcttacatggcaattgtaaatactcccacttcctttttaccatctatatatttttctcaagttaagaaagacttgtctacccaaactggactttagattttgagtataatataacttaggaaaaaatagtccttatacaaacttatagaaatgatagaagccatttaattaagtttatataatatatgcattttattgtttgaatgagtttcttctaattattttaaaacataactaaatatttacttgtggggaagtagttcttgataaacagttgataactcataaattagcacataatttttagaagaaaaattgtcagtatctataaaagtagcaagtttcaagtaagagattccagtttttgcactgtctcagcaaagacagataataggttcaacactggacactaaagaattttgtgtaataatgagaaactatatttaaattctatgctcgattgattatattttgttgtactatatacataggatgaatatgcagtcattataggtgattaaatcaaaatacttatctaaagtaggtatatgatacagtaattgagtaaccattttgcagaatacttaacatgaatttaatttcttttgtaaaaaagataaaaatttctatctattgtatttattaaaaaacacatggagtagaagtctggttgataaacatgaagtatttaatgattttcttataggcaggagactaaatatgatgagtatcatcctaatttcaatcttcatgtatttaacagggatacatgtggaaaaatccttatagtgcttgagttcaaatgtcaaaaccttatagagttctgcagccatgggttgcaggtttgtaatcagaatggaattgaaggattgaagaaaaagcatcgagatccagaacacattcagtttggagggcccatcttcacctctctagtgaagagattggatgctgggccaagtagacataggagcgctgtagtatctggatgacactggtgtgttacttaatgagttgagcccaagtttgcagctctacagaaggagctgagtgtcccaaccatcgagcagtgttcaggtggctgggcgcagtgtctgagaagccctagtgaaggagttaacacgtgcaccaggaggtctgtgtccgcttgcttttctctctctgcttctgtcctctgtctgcaattatgacctttagttcagacgcctattttcatagttattctatttctctttatgtttcaatgattagttaggaaggcatgaagaggaattgagttgaaggttagttagcccaggtttatcctgtgcctcttcgctaacggaagactaaagatttcacgtggtcctgtttgtccagagaggctcaggttggtagtcagactcaccctggcctgacactacacagggacacttcagtgtgctgttctgactcaggctgcctatgttcctctctgtacttttcaaatgaatcagagtctttcctagtctcaagacatcatcttctgcattattctgttcttctaagccagcaaactggggtagagaaaatgaatatacttggtgagttgggttttaaatttttaattaattaattaattaattttattaacaaaaattattccaggaaactgttctgtttagaaaagtcagctctagccacagacctggcctctggatgggtctggttctggcagcttctgtgttctgatggtgtttgtcctaacagttactttgctccatggacttatcttagaaagtaatacgttcattacattttcactcacgctttggggacaaacatgaacacacagaagtagtaaaatgtacggatcacttccagtggcccagtagtacagtgagtgagaaaacaaagccatagcaggaaagagcttcaaggctagagtcgtagaacatacaggctaaattagagaaactttttcataaaattagactaacatgagatgtggtgagcaggtatttttcagatcctagactgctccttcagatttattggtctagattctatatcacaaatgtaggccttagagtgatatttgatttaagcaataggcaagatttgatgtgatttacagtgagagtctaccatgtcctgagatgataggtcatgagatacccacaggttcacatggtttctaaactttgtgcttggggcctgggactgactgaccacaacattcagcagacatgaatacataatgctgttagctctagttctaggcccatgactcaacaaggcatgggagtgccccttgtcatggtctttgaaaactttcactgaatgaaattgtgcctatcctgacaccactgtgcttgagcaaagcacagcttacccatgagtgggagaaccaggcattggctggcactggccaagctgagttcatggccagcactggagtcagtatcagttccactttgccaacccggtgagcaagagcatccaccctcctggttgctgcactgtcctcaatggccacacgtgataagtcagacctgcccggtcaagtaagcagcaaagcgagaagggatcacatctttacactagtttttgcatggtttgaggaacaaacttgctgtcatttgtgtgttgtccccctcttcttcttgtatttctctcttttctctcagctatcatgttttcctcttcatgtcacctgtatcctgctacttccgtcccaagccacccagccatctctgtatggtttcctggactttgcatttcagccatgtggtacactcagatgagagaggatatgacacgtttgtctctctgagtttgagttacctcactggagaatcttctctaggtccatccatcggtttcatttatactggtccgtctgaccaattatgagtctctgcattaacctctacccattgacaaaagaatctctgaccaaagttgatataagttctatagacataagcatgaatattttagaattcactttgacatcatgatcatgtggaaaattgttgcttctcctagtacccatgctctgtcccctcataaacttttgacaaggtttatagatagtatcagacataaaatcctacaaagcaggcttcatagcccatcggatattagtttattaatccctaactatatgccactattgtacctgtggacatgttttgctgggtaggctggtattgtagcatataggatcaggtactgggtaagaccattgatgtttttctccccttgcagcctgcacagtgttccctgacatgatgtaaactggtgagttctctgtctcctacatccaaagtgaatggtcttcagcaatagggtttttgtttttgtttttgtttttcaagcagggtttccctgtatagccctggctgtcctggaactcactttgtagatcaggctccgagtgctgggatcaaaggccccggcttcagcaatagggttttatcacctggttatgctaagcagccaagggcaatgacagtaatttgcattgcactggtgcctctgggacctgagtcaccaggaactcctgtgtctatgcaagagctgccaatcaagggtaaagtctcatgcttggccttggtgtcatgtttgttacttaggtcagggatcaaagaagggagaactgagggttgaccagcagatgaccttgttctgtccctgatggaaaccataggacaaaggaatattaattctcaacacacatgtcgccagtacattgcatgtgcaaactcatttgagttttgcatagctccggggtattcatatcactattccattaagtcctatatgaggcagccatggctacaagtgtgagatgattacctcaggtttacaagctttgaggacacacagtccagctttagggattgtcagttcccccattatgtcaccaggtgtccagctcgtgtcaccatatgcaggtttcctagaagagcatcccaggagtctaatgggaaaatgggaattctgctttgggccctactccttctgaatctctctggttatacactgggtctaagcccttacaatgttctgaaagctcagtgctgctgaatgatgtcataaataaaaatccagacagacgttactatttatatttcattggcatagaaactggattcaggaaagctacataactgcttacaggtatacagtgtgtcacgcatagaaccagggtttcacttcacctctgttttactccaacccctaggtcatcctacttcattaggtagctttccatagcaaattgccctcagtatgtgtggagggatggctttgagtaccactgtcacatacccaaacctgcacatgctcaaatactttgaatcaggcagtagtatttgtatgtaacccacacttatcctcatcaatgccttcagccatctacagattacttattgtatcgaacatacataggtctattcaaataactggtacgctagccaacagttgtttcaggactagtgacaagaacaaaagccagcaaaagacccaatgaagatgggtttttataagtgtgcaaggttgtagacatcgtgatctaatgtacttggaggttaaggcaggagggtcgtgagtttgaggccaggttgggatatgaaccgtgtctcaaaacctgagtttaaagaaatgactcagtctgcagttggttgcttttgctgttgtggtaccccgtgagtttgagactcagtcatagttcttcgttaccttccccttgtcaaagctttgatataactgttctcatttttctcttacttcctcttttgtctgcacttcctcctgggtctctacttcctcttttgatctttgcatgtgtgagcgctgcttgcagtcaggaagagagtgactaggtgagcagactcattctaacagagaacaagagctatgagcaggagctgggactcagtgaccttagttccctcaaggacttaccattcaccatccattcccataaagggtccgttaagaaaatgttttacagatgaggaaacaaggttagctttgaaaattaatttatgttctttctatcagtctatgcccatcttgatctatgccaatccagaaactctagctatggtttaagagactatcctgtttggtccagacccctccagtagacctgaatggtaaacttggtaagcaatggagagctacaaaatcatggtcagtgttaaagttaggtaagctagaagttcttagtataatgcactctcccttctaccctcccttcttacccttcccnnnnnnnnnnnnnnnnnnnnnnnnnnnnnnnnnnnnnnnnnnnnnnnnnnnnnnnnnnnnnnnnnnnnnnnnnnnnnnnnnnnnnnnnnnnnnnnnnnnnnnnnnnnnnnnnnnnnnnnnnnnnnnnnnnnnnnnnnnnnnnnnnnnnnnnnnnnnnnnnnnnnnnnnnnnnnnnnnnnnnnnnnnnnnnnnnnnnnnnnnnnnnnnnnnnnnnnnnnnnnnnnnnnnnnnnnnnnnnnnnnnnnnnnnnnnnntgattatgggggtttgttcggtggttctcaattaaaaatgaacaagcgacaaacagatatgtaataaacacttgtatttgttttagtcctgtcctcttctaaaacatacttgagtctttgtagggcataataacattaataaaccatgtaaaactaggtaagatcctggaaaacaagattaaataaataggtagctataagaagctaacagaattttgtgaccaattaagacatttactgcaggcttttaggcagtccaggcaagatgcaagttgacataagagctcctagaagccttttctcttttaatgagagacggaacaggatctggatgggagaggaggtagggaggaagtgggaggagtagaggaaggggggaaatcaagatagattgtatgagaagagaatctgcttctgtaattgagaagaggaatagacctttggaattgaaagagggttaacacagttgtaaaaagcagaaaggaggaagtgtaagtactcaaaggtgacagcagctgtggggcctcatgggctttcggatgatagcagtatcccgggcaacggcttcaaacaaatactgaatgtggtttcagtattacccttcctagtagctgacatagcattacagcgaaggaagcccgatgaagtggggctttcaggatgacatgagcatctcttcgcagccccaccgtttcctacccgatttcttcccacttgtcccagtctcctttacagtcctctgtcccagcatcttggccatgagactcctgtccttcctctacagcatcctttcccttctcgatcgctgactgagagagagacttagaacacttacaggtttgaagccccttgattttggccctgccttggcctgggttccagtttccctaaagagactgacagcctggatacttactgttgtaggtggcccacacctgcctcatgtgtgcccacgtcactggctctgggcaaggagcacgttatctctgtcttgtaacacaaacatgatgaactgccaccgtgcagtttggaggtgcgtgcgggtggtaggcacgttaaagatggagacccttgatacgttctctgctacccgattgaactagcagtgccttgaaaagactgaatcccacaatcgtttccctctactcagccttgctcatgcttcagactcttacatgcagtggtgagtgggcctgagccaatgagagggctatttttaccacacagattctgtttgtgtaagcttgcacatcagttgtctctctctcttttgacagaaaacattaatgcttgaggacacagtgtcactcatttcggggaaataccaaatatttgatatttatctctactcagacaaaatcagtctcaagttgtttccatagatctcaaatataaatatttacacaaaacaaacttatacattatagtatttactgcgtcgtctgcagaaatatgattatttcctatggaggattgaaattttattaggcatatattttgcaagaggcattatagtaagtagcagattcagaacacatgactatgtcagcagtagaagacagaggcagctataccaaacctctggtctcactgagatgttaaattaattagttaggcaaaatgatataagagactatgttttttttttgtttgtttgtttgtttgttttttcgagacagggtttttctgtgtagccctggctgtcctggagctcactttgtagaccaggctggcctcgaactcagaaatccgcctgcctctgcctcccaagtgctgggattaaaggcatgcactgccatgcctggcttgacttttttctgttggtttatttattttgtcctggtccaacttgcatttttcttttgctttggcttttttatttgcttttctttgtttttcaagacagggtctctgagtagctctggctattctataactcacttagtagaccaggctggcctcgaactcagaaatccgcctgcctctgcctcccgagtgctgggattaaaggcgtgcgccaccacgcccggctgagactatgttttatcatagtaaaattttaatatagataaggatagaagctagagtatagtaaaatcagctaaaggctatgagtaagtattttttttaaaccaagcattaatgctattaaaatataatcaattagttattttttaaatgtgtgaaacactggtacatggcttattgaaacatttaaatatatttcctattagttttatgtgttatcaccatgtgttacaaacaagtgcatacacataatgtacacatgaaattctttgtaagactcctcaatagtctctgatattaggatgatattatttttataatccacttttatctgtcatgtccagtaatatggacactagtcactatttctttaaaggatattaattctattgatagttccagatttacatttaaaacatcttttttcttctattaagaactaagagttataatttttttaatcttttctgaacctttaaaattaacatctcaatccaggtgatagtggggaggcacacacctttaatcatagcacttgggaggcagaggaagtagatctctgagttcaaggacagcctagtctacagagtgagtttcaggacagccagtgctacacagagaaaccctgtctcaaagaacaaaagcaaagcaaaacaaaacaaaaggatttctgcaaaattaacacataaactaggtgtggttgacacatgcttgtgattccagtactcaggaatttgagacagagggtactgagttcaagaccaacctagtggtcataacaaataaacctatcaaatgcaaaaacaaaacaaaacaaaataaaaaaatcaaaaaattgaatgtattttggactatttctattacaatattttatcccttaggattattagtattttttaaaaaagagattttgatacgaacacttaaaaccctaaagtgtgggtcttcctttaatcattcagatgaaatagcttttatgaactttatagacacactccatttagatattttccattggtgcaataaatcggttatatgaaaaaaatactcttcaccagagatggtgatctgtatctaggagaggctaaggctaaggtgactttcctgaagatggcctgacatttttgcatagtctatgatgggtgagctctgagaggcaaggtcccaagagactttatctcaggattgcttcttgcagctcatatacctttcctgtcactattgcatagcctaaggattccttggcattagcccaccctattgagcaaattttctgcagatcaacataaagacaaactttcatgaattaatactgtttagatgatttaatgattttataacttttctgatttgattcaaataattttaggaagaaagttttaagagatggttttagttgctttgccagaaagatataataaacttagaatcaagaatagaatgtgcccattcctcataaaatattaaaggctgtataataaggaatccaatgagctttcacaattacactgaaaagagaaataggcttgggacaattttgtgaccaaggaaaaacattcattctaggtcagatccaagggtgaagccacagatgtgctctatgttagagcaaggccatgtgaaaccgttgctctgaacttataatgagcttacagagtggaacactgctttgaacttactgcccacgtccttctgtaactccccttttgtgtaacattctatccatgatgtattgtctaagaactttgtctacaaaaaggccagagaaaagaaataaagtgtggctttggggcctctgctccatccatgcaccactccactaaatgtatatgtatggtatttggagctcagccccatctaccaagtgtatatgtctgtttatctatatattcatgtttaggtatatgtctatgaatgtaagcatgcataaatacttgtggagttgattgagacagatggtcagacccaaccagaatgtttgtgtgcatgagtgtgtatgagtctgtgtatatttttaaattattttcctttctttactttctggttcatgaagagttaaggagtccaagccattcgcctggccagtgagaggctccaggtcaaaagagaaaggagctctaacaattaaccctttacttaattccctgctgctaccaaatgtataactgtctgtctgtctgtctgtctgtctatatgtatgtacacttaagagttaaaggagttcagagtttcttgctgggccagccccagacaattaagttttgttctgtcagtagtattgacccatcactgtcactgagcccagtctgctattggcctgaccccaatctccacagatgttccccaccggctgccttccagagagagctggtgctgggcaggttcccagcagtgatccattccttcaatcctagcactccagaggtagaagcacatgggtctcttcaagtttgctagcctggtctacacaatgaattctagatcagtcaggactccatagtgagactgtgtctaagaagatgaagaacgtgaggaggaagaggagatgagggaggaggagaaggaaaaagatgtttatttagttttctcattcacattatctctaacaagagtgcattgtcctcttgtccatccatccatttatctgtttactacccattcatctatccattgatttattcacgcattcatttattcattcattcattccatccatttatctgtttactgcctacccacctatccattgacttattcatccattcattcattcattcactcattcattcattagttaaatccatattaaatttttactatattcaaaagaagaatattcaggaacctgagtgcgtgaacaggtcctctaacagtgaagtcctgagatgtaagacctagcaagactgagactgaagtagaacattttactttctatgagaaagggtgaatattagtctgtaagagtttgtaagcatctataaggcagggaggcaatgttcccattcgggaaggtggggtgagtgtggccaatagggagtctgagatacctcattgttgtacttctttgtatgagaggaagcacactggactccttgttacttaatgaagcaggtgtcaacaaaggctcctgggtcaccagcatatgatgcactttgattccatggcctactattgtctttatgcttgcatggttaaaattcataaattaccacatgcctgttaccatgataggaaggatgaggagcatccgaactcagaggccacatccttttccttgtttcttaccggtggagacctaggttgttcagaaagtgtttgttatagtcttgctcaatctcccccttttcaggtacaaaattggcaaaggactggaggatttaaaggccgttaagccagttggagaaacatacatccatgaaggactaaagcttgtaagttatcggacatttcgaactaggggagatgtgctttcttattttataaggagaaatccatttccatatatatgtctatttttgcaatggcctagtctatcctagacatgaggctgatagagaacaccattttctgagtgttgatagggagtttgtttacatcttgtctcctaacaagcctgtttccctctggggttagtttcagatcaatcaatcagaggtataaaaagctatatcacaggaacccaggcatagtgactcttctatatgaaaacacacatatttccaataaaaaagctaacagaaatacctgtttttgtaaattaattcatatgaacatataattctgtatgatataattctattgttctgtagcccttaatatctttattttgtcaggcctacacactcagctccacagacagtgctggttaaaagtgaaaatgaaattgtcagctgtataattattcttcattttttcaggcaaacgaacaaattcaaaatgcaggaggcttaaaagcctccagtatcataattgctttgacggacggtaagctggacggcctggtaccatcttatgcagagaacgaggtgagtgctaaggtgaagctgtctacacacccagtgttgcgtctgcacatgtagctgatttaaatctctctctctcctccatcccttgtgccctccctcctccccttttccatctctcttctatttttgtttccttataggcaaagaagtccaggtcacttggcgctagtgtttactgcgttggggtccttgattttgaacaagctcaggtgagttaggacatattaactgtaagtccctcactcgccttaaaggtatttaaatgagctcttgtgctgtggctaacggagattttgcataaaatgacttgtgttctgagctctcctaaaacggaaaattaaactcaaaatagattccttgaatatttatttggtgaggatcttaagagaagataaatgcttagattaatgttatgtaaatattcctttaccttaatcagtgagacaatggtgatagcttagaattcttactttgatttgaaaattttcttgtgtggtaatttgaagaatccatttagaaatctttaagatttttcatatacatctttttttttcataaagttttcttacaaatcatttttcctttacatttttttgtgtgggtaaaatggctaaaattctagactctcctattagacagcaattagacatccatgcgactttggctttgtatccagtgactttggttcatttcacggtggtatctcgggagggaaattggtcttttcaccatcagttctagggcttgagttttaattgtaacgtacagttacataacactgtcttgtgtgtgtgtgtgtgtgtgtgatataatcactaacacaaataatagatcacaggatgaatgagatctaggcaatacattttcagatgaatgtcactgaaacaattttccatgtgagtttaaattataaagagtggtgtgtctaaacctcccctttcttcaccttttctaaagctggaaagaattgctgattccaaggaccaggttttccctgtcaaaggtggatttcaagctctcaaaggcatcatcaactctgtaagtgtgcctccggatcccaggagcctgttaactttacaacacgtgttttcagttgtccgagcaatttttgcaagtggagcaggtgggcagtatttagccaaaggagtgtgagcttcgtctgttgctgccaagaggatgtgagatctgggtttctttgttggtgaggtttgccacagtctcccgcatgtactttgtgatcctgggctgggatttctagttgaagattttcgggaaattgcctccgacatctctgccctgctagcatggagttaaccatcttctacctttagagtttctccaggctttatgggagaaatctgaaataaaaaaaattgattggaatgcaccaccggtgagggcctcctcccagcccatcactgattagtcagggaactcgatctggtggctcaggctctgactatcgttgttcctcccgtttacatgattaatagtttccccggggcacataacatctctctttgagattcagcagcatccttcctggtgactgttagactctgggctctcctgagcgggggtttggcggggaaggcgaggaatgaaatttggagtcgggctctggctcttgctgtagaggtttatgtttggttttactgccttttgctagaagcgctaggaacagttgctattaagtatttatgatatttggtaaacatcaccctaaactgcaagtgaatatatattccctaagcaaaatcttctcctttaatctttaggcacttataaaggggagggagggtatctcacctccaacatttggctcaggcattttaaatttccccttgaagatcattctactcagatagacagggtgagatttattggctttggtttttcgtagtatgaaggctttacaagaactaatggagtttttagagaagacataatttggtttagtcacatccagtggacatccaaaatgtaaatgcagaatggaacggagattaaatcattacaggatttttagtagattattagttttgattttgaggggaaaattgcagtgtggaaaaaatagttaagttttatggctaagttcggggtaaataacaatatgatgtaaaattttaaaatccaaggaggggaatgaataattgactcccagtaaacaggtcagcagcgtgtattttaaatagatttttattgtgctttggggtacgcatctaaaggtctctctggattggtgtctttgatttttgtttttgttgttctgtgcacatgaagattgattcagaatcttctggatgacagcccagctttgcaaaactattgttgtgggattgaaatatggttattcttccctccagggaaactttagaatgtgatttaagtacagtgtagctcttggtggatgttagcttgaataagttatgtcgaaaagaatcagcagggaattagaaggagtcctgtgttttaggcacatgtttgataacaaaatcattcctgttacatctggagggtgctgatgggtaccgtaccaggtcagcacaggttagctccagctgttttgttatcccaagggaacaggcctccgaggaacccttgtgggatctgaaggtagaagctggagcctaaagcagtctggactcactattgcctgatgagtttattcatgttatgatagcggcggttgtggctctctttgtagaaatacaatgcagcacaaatacttccttcccccaccttttttttttggacagaagctgctcagtccataagaatatataagaccctattttcccttaaacttgaattgtattttataattacacattattgtcttatttgaaatacatgtttgctacttaaaataaatatagcatatcttctacagactgaggagcaatagaagacattgttctattcattatgcttccgaaaccaatggctgacattgtactataaacctcagcaaacaaataaaacacttaagtctctcagatgaatgagaggaagggagttgtcatcacctcagggatggagaagaaactaagattacaattggtgtcagatgcttctgtggatggagtgtaaattgacatgaaaatgggcttgtttaggtaggtgtcataggatcctttcatggtgggatttgaactgggctctgacaatggagtagctgtaactataaacaaagcacacatgaccagagtggcctgagctcagtgatttagagaatacatgtctccaggaagcatggattaagagtatgaatatttctacgtagttggatgggtctcatctcacaagtgaagtggaaggttaatttagaacatgggatctgtcagacggtcatttcaagtagaacaacaaacagtaatgggtagggtgacgtctagaatggagtcatgtgctcatattcactcacagtggtcattgtgagagatggtaaaagagtggagacagtctgatgttgcagcgggaggaggaggtataacttccaccctgctgctatgaagccacgtagtcaatcctttaccctgattaatcctgagttttaaacttggcctgtggggtggaatgatgagttgtatttcattacatgtttaagtgttttggaaggcagagaggctggaattgaagacatttaatgggaagctaggtatgcaatgatctataaccatataagatggagcaacaactgatctgtctgtggggcaacctatagggaaaggtgttcagcgatgtgtatgtcaaagtcttagggataacaggacatgcttgcataaagattgaattcagtaacataacatcataacaaggatttctagatttctagatggtgtgatagtcaatgtgtcaggtgttctaaatctccaggtcatggcatcaggactcagtttcataccaggtagtgagggctgaattttctatttcaaagttatatagaatttcaggagcctacattcacaaaagggccacagtttcttttgaggaagcttcattgctacttagaggcaggtatcataaggaatagggactctcagagtccctaaggctgttttgttttgttttgttttgttttgttttgttttgttttttagtagcttgttcagaataaagccaaatcaaggaactaattagggaagtgcttaacagattgccttccctggtcagaatgaagtcaagaatagagtgactctgagcctccagttacataattcttgtgctgcatggactcccaggaattggggctcttcaagtgctgtcttcaagacatctgtgctagttcaatggtaagtttggatagtgtaaaatttagcaaaacatgagaagtcactggatcacaggactagagaaaaagaaagcgtcaaatgtaatatcctatcagcatttgactccaatgatggataactagctgaagaccaagtaaaaacttcttaaacagagtaggtagaagtttgcttaacagaacagaagagagataagcagagagaagagttcaactgaccttgagaaagagagtccaagtggggatgtcccttagaaaattgtagggcaagtcaaatgttaaggttggaaaattttaaaattgagtcattccatcctctttgaatacttctcctaccacattgaccacaaacatatgattcttatgttttaactttagattacttaaaaaaatcatactcattaaaattgtttttggtgtcttgaggaaatgattgcaagatttatattggagaataaaattttatttgaactactaaaattcagactgtcgtgtgagtacacctcatagttcaaggtcagtgattcattatgcaatgccgtggaagaaaagataaaaataaaacaaacccacagattgaaacccacagcatagaaagagcaaaaataaaaaagcttcatggaaactcccttgattttatttttcaaaataggatcatggatgttttattacttagaattatttgtacaagttttattttttaataagagtaacttggaaaagattcagcagagagagatgaatccagtatgaagctagcttcatagaataactgtgttctaaaacataagtacaactatgattaacaagaattcgtttggaaaaagacctaatgtgaagggaatgatcctgggcaggatattcaaataacagtgcaaagatgcttttggagagaatctatacagtttagaattaaaatgtcacttcatccatagtgttaggaatataaagattggcatttggagctaaacttttcttagtaatgttcattgtttattgttttgtttgaaaaacatctgtacacaaaactatgttataatggaaggaggggatcctacaaactcctttctcttctggcaaagggagaagctagaggctaataactgtcctggcaagatgtccaccacagggactgtggtgagcatcttacccggggaaacctatatttgtaaaatcacagttgatgaaaagctcaaagcttgagcaactgtaaagatttagtcttaggaaaggagaaaccaaactgacaagatttattcaaaactggaaatcaagtttcaggatgctggacagcaaggcccttggaaagtacctggtattgacagcattaaaatcccaggtcctggatcagaacactgtcctgtttaattgaggcatgatattatgtcggcattatttaggtcaccagttcacctttgtcctcagggcctgaggtttaggttaaaagggagcctagcgatccgtaaattcactagggatatttgcaagaggagacaatttctccagtagaaaggaggcattatccatacaaaagaaagatgaaaaatgttctgggtgagcaataaatcagtaaacaggataggcctctgtaatatttggacacatttaagtagttcaaaggtactctacacgcctttgtcctaagttctctttagctaacgaggaaaatgaagaaactaaagtgtttactttattaaacactcttttgtactttgacattaaaaaaaaagatgtatttacttatttattttatgtatatgagtacaccattactctcttcagacacaccagaagagggcatcagatcccattacagatggttgtgagccaccatgtggttgctgggatttgaactcaggacctctggaagaacagtcagtgctcttaaccgctgagccttctctccagcccttgtactttgacatttaatatgcacatttaatattttctttaagaaaaactttggttggaattttgtcttgtagagaattaaacccacactgaacaactaattaatttcagctttatgatagtatgacaggaaactaaaatcatggcagtaggaaatccaaacagaattgagcaacgctctgtttgttaatattaacgggtaagttctaactagttttttgttgtcttttgtgttgtgtgtatgcctgtttgtgagtatgcgtgtgtgtgtgtctgtgtgtgtgtgtgttagagtaggcatgtgcctgtagaagtcagaagacaacatgagtgttgggtttgactcagtgtctatctttggcctagaacttcaagtaaactaggatacgtggtcagcgagctccagggatccacctgtctctgccttccatcttaccatctttttattaaaaacacatgccaccatagcacctggctttttatatggactctggggaccacctcaggttcttaagcttgcaaagccctctccttaggccccaggtccatttgtttttgagagtagattaaattgagagaaagtcagggcacattcttgtaatcctaccacttgggcgatggtctataatactcaggagttcaaggccattctcagcttcatcgcccagcttgggctacaggagacctacttcaaaacaaacaaacaaacaaataatcaacaaatgaacaaacaagccacaaacatagcaacaaaacaaaacaatactcctccccagaaaactatgcaaataggatttaatatcctttttctattttcatatatcctcttcaaaagatagtattcaactaaatttatgattttttaaatgttgctaccttattttttgtctttgctttattattttgcacttgggctcatgactcctgagtactactgagtagaaatctgaatccacacgaatacattttcactaggtatgacttaacatgacttgaaaattcccggtaacacagtgctacactctgtgctagctcgttatatgtcagcttggtacaaactggagtcatccgggaagagctaaccttgattggcaagatgcctccatcagactgacctatggggaacctgtggggcattttggcctctgcatgttgtaaccttagggactttctgcattaatgattaatttttatgtcttttcctgaggaaaaaaattaagtctgagtctttttaggaaaatgaaattaactttatctggccactctttcgcagtcttccttatgctctggggatcattaagcacagatgagcacagagctagaggaagccattactccaggaatctgcttggggtgtgtgcccctgagcaaactcaagaggtttaattgatgcagggtaaacagagacaatctacaaactcgaataggttacagatggaaggtcttggttaattgcaggcttacagctctctgaaatgtactttaaggagagaaggttgtacaggtacacacccctggagaaataaaactcagtaaataagatagattgagtaaataaacctttcctacttcagagcatagatgacgaaacatataataaaggggctaggtatatgtatttgctatttataaaaagaccggttcagatattttctgtttgtctggaatgctttaaaactacaaatgctggcagcctaaaagcagtgtcatataataagtgtgttggcttgtggagacattctttagattctttaaatcagagttatagggctagtaaaaggaaagtctgttctgtttgtattttctaattgtaactgaacttgtaaccctggacacgtaatgaaaaatcaaacacatagcctgtaccgcttggatattcattggtctatgtttgttctggttgctagtcagtcagagccccagaagaggcctgatcgctagccagttagaactgctcaattcccctgaccgtccacacctgactccctccctccccttgctgactccttatttcctctgtctgcagtcctgtcagcaaggaccctaagactctaggtgagcaaccctcccccctccactacctcttacagctgttcttagtacaacaatggaaagccaactaggaaacactgtattcatttgtctttttttccatgttttaataagaattattattttttcttcttttagtagatattttctttatttacatttcaaaatgttatcccctttcctagtttcccctccaaaacttcgctatcagcctcccccctccccctgctccccaacccacccactcccatttcctgaccctggcattccccaataccggggcatagaaccttcacaggaccaagtgcctctcctcccattgatgaccgagcaggccatcttctgctacatatgcagttagagccacgagtccctccatgagttttctttgattggtggtttaattccagggagctctgggggtactggttagttcatattgttgttcctcctatggggctgcaaatcccttcagttccttgggtaatttctctagctccttcattggggaccccaaatcacaaaagaacacacatgtatgcactttctgataagtggatattagcccagaagctcagaatacccaagatacaattcacaaaccacatgaaactcaagaagaaggaagaccaaagtgtggatacttcgttccttcttagaatggagaacaaaatacccacggaaagagttacagagacaaagttcagagcagagactgaaggaatgaccnnnnnnnnnnnnnnnnnnnnagactgaaggaatgaccatcaagaagactgccccacctggggatccatcccttaaacaaccaccaaacccagacactattgcagatgccaacaagagctagctggtgggagcctgatatagctgtctcccgagtgcctggcaaatacagaagtggatgctcacagtcatccattggatggggcacagggttcatttgtcttatagccagaatgccactgctttctattgagaaagtccctgaactatacgcccagctttgtatttgctttgggtcaaatttatttaatattaatcaagcaagtgatatctatgacaaattgctccatacactttttacattaggtcttagttcaaacatatggtaatcctgttcatttaaaattattcggtacatttttatggaatactctatttagaaataagaaaaatatagcgacttttaaatctgctttgacttatattggtttttgagaggtcatgatatcttttttttttccaaactggatatttgatattcaaatcataatgagctgagctattttttacattgcaatcataagttttgaaaacacttaggttgtaagtaataatttgacttcatgccccatatgaatttattccatgtgaaatgttcatcttgggtatattgtatatcctttcagtaaacagccctatgttgtcctaaatgccagaaaaaaaacctcattaactacatcatatagttttcagttcataatatggattttactttatgtgtctcctactggatactacaatatgcctctaatatgtagacttattcaggaagttatatgatcttaatcaattatgcaaagctccatatacacaatacatatttttaatacgtcataagatctattttttttctctgaaagtgactgttccttggcaacagtgtcatcatgtttggttattttgggttatttatcagtggctataaagacctgagtgagtgtcaaatggaatacaagataatgtactcattgtgggcagcagaattcctggaatggctggcctctgactcaggcctggttcctagttttcagttctgtgccagctctgcttgcagagagcatgtctgccccttagtagctagtgaagaacccagcctgtattgaaagtctgcaacctgatggcgcaggaaacagaggacgtttaatcctaattaatttggaacatgcttgtcctattccagacagatacttcattcaaattgggctgctgagaaggggcaatggtggcatctacttttatgtcctgccaaatgtccacacccccaaggaggccagcaggcggctttcacagctgcctcaccacactgcatctggccttgccaccaacccggagcagagtcaacagccttacccgattcttccctttgacctcctcaaacagacaaattccataaaattaatatttgcaagttcatgagttattcctagcattctgacctttgaattgtatgagtaatatattaaatctttatgaaactagttagaattgacagaaaatcagcaattattatttgtaagagacattgtaaccagtccaccagcaatttccacctgtttatatatagatctatctatctatctatctatctatctatctatctatctatctatctatctatctatctggtttcttcagatagggcttatctgtgtagacctggaccagctattctggactctttgttctcagagatctgcctgcctctgcctcccaagtacttggatcaaaggcatacaccacacagacttgcaaatgtctctctagaatgtagacttagagaccttcatgtatacacacaagagtggtatggctgtgtcatgtgctatgtttagtttgttttcttaagaaagcatttaaacatgtttatgtgtgagtctgtatatgcacttatgtatgcatgtgtgcacatatgtatgtatttgcacatgcatacgtgtggtatctatgacatagagtccaaagaagctgggctctatacagtgagaaactatacagcagcagcaatgacagcagcagagcagatgcacttgacagcaagagtgaaggaacagccaggcagcaggcattggttctttctttccatcctcactattctgtgtttccccatgtgcttgatgacagctattctaactggagtgagatggaagctaaactgcttttaatttgtgcttccctgatggctaaggctgttgagtacttttcacatttattggccactcctatcttcctatggaggactgtttattctgttcaggagcccattcattcattgaatgagttgattttattggtgcttgagttttaaattctttatatagactggatattaaacccatgtgagctgtgtagtttatgaagatctttctcattctctgctttcctgggctgtgctgaagctttttaattttttagaatcctatttgccaacttttggagttctgttctatgctgttagattattatttttttttcagagagaccttgcctgtgcctacatctttaaggttctttattggtgtttcctctagcagtttcaaggatttaggtattaaagtcgatgattaattttgaatttatgtttatacagtgtgagagatatggactgaacctcattcccatataggaatgaataataaggtagatgcttgttttttctatcaccatttattgaagagtgccattttccaaaatatatatttaatatctttgtcaaaaattcgatggctaggggggggagtgggtgggtaggggagtgggggtgggtgggtaaaggggggactttttgggtagcattggaaatgtaaatgagctaaatacctaataaaaaaaaaatgaaaaaaaaaaaattcgatggctacatccagctctgtagaattcctgtgctattctggcctttttgcatatttgtcttatttttcaatggtattagagtattgatttagttcctgtgacactgtagtatgtaggagtgttgacatagagtgttgtgattttgtgtctgtggcactgtagtatgtaggagtgttcacatagagtgttgtgattttgtgtctgtggcactgtagtatgtaggagtgttcacatagagtgttgtgattttgtgtctgtggcactgtagtatgtaggagtgttgacatagagtgttgtgatttagttcctgtggcactgtagtatgtaggagtgttgacatagagtgttgtgattttgtgtctgtggcactgtagtatgtaggagtgttcacatagggtgttgtgattttgtgtctgtggcactgtagtatgtaggagtgttgacatagagtgttgtgattttgtgtgtgtggcactgtagtatgtaggagtgttcacatagagtgttgtgattttgtgtctgtggcactgtagtatgtaggagtgttcacatagagtattgtgattttgtgtctgtggcactgtagtatgtaggagtgttcacatagagtgttgtgatttagttcctgtggcactgtagtatgtaggagtgttcacatagagtgttgtgattttgtgtctgtggcactgtagtatgtaggagtgttgacatagagtgttgtgattttgtgtctgtggcactgtagtatgtaggagtgttcacatggagtgttgtgattctgctactatttctttgtccagtaagcattgttctggagagtcagggattttgtacttccataagaattttggaattaatttttctagttctacgaagaattttattgggattttgatggggtttgtatttaatctgccactggctggatggcagtcttcacaatgtcttctttctcttgaacctgggagccctgggaaatgtcctcttcagtttcttttatagctgtcttaacatttttaacatagaggtcttcacctcttttgttaggtttatttccaatattttgctttccttgaagctattgtgaatgttatattttccttgtttcatccttgggaatgtttttgttggcatatagaaaggttgctgcgtagttgatgttcagtggctaccatgagacttttctaaaagtgtttataatatctaagtgtgttctgttaaagtcactaggctccttataactacaggattgtgtcatctgcaaatagggatacctcatttttttcctttcctgtttgaattccatttaatgtctttctcttacagctttggtagagttaaaacttatattgaacaagaacagtgagaatagacactcttgtctcatttctgatattagagaaaatgtttcctgtttttccctactattatattgtctataaaattattgtacataatctttagtatatgtgagtctatttttttaattcctgtttttaagggcattcatttatcaggaagggagatgaagtttgtcaaaggcctttttacatctattgaggcattgctgtgttttttgtcttttaagtctctctgtgttgcattacttgattgaaccgatcttgtattccttacctggggtaagaccggcttgatcataatgcatttgtgattttttttttgataattttttaaaaacagaatttatttttatttcatgtatatgaaatgtgtgcctgcctgcatgtgtgtgtagcatgagtatatctggtgcctgcagaggccagaagaagacctcctcttccctggaagtggtgttagagatgcttgtggtctagcatgcaggtgctggtaaaccgcattctctcctaaaacagaaagtgctctaacagccacggcgaatcgccgcagcttcatatgtgcgattccgaatatattcatgagagtgtgattgtaagaactttgttaatgttcaccagagaaattggtctacagacctccctgtttgtctgtttgtctgtctgtcaatctgtctctactctctgtgtgtgtatgtacctgtgtgtgtgtgcacccatgcatatgtgtgcacacatgtgcgcatgtgttttatgttttaatttagttggtatcagagcattactggctttggagaatgactttggctctttgctttctctctctctttctctttgtggaacactttttaggagtgttcttggtgtcttcaatcagtagttgaagaattctggagtgttgaaggagtcatgatgctttgccttttcatatttatggtgtctgtgtgctgtgattgcgtgtacggcttctggttgtattggaagatattcctgttgagtatcatactttgagggtctcaagtttttatttgcacagtttccctcctttgcataacagtgccaggggctgctcacagttagctctgcagtctgctctgtgtagactctctcacccttctgaacgctgcagtccatactgttccctcaggtagctaaatccacagggagtgggaaaggctacacactgagttctgaacaagtaggaggccctcctgaatagtttatccttctcccgcctcctgggatgcagctgtagtgttagtggagcatgggggagatttaggatttaggttctacagcaatgactaacaggtaattggttccagtggtgggttgttctcattgagcttctaatctccaagtgacccaaattcagggtattcgtaattaattagacctgctccaggaaactaagaggggaggctacctctcttccgtactccacttcctgagtctagctttcctgctgcgttctgtttttggctttggggcttctagtcctccagctgtttacaactgcatcaaaatctatacttaccctgggatggttgcagactaaattccaactccctgccctgtgacagttccccatcttcagcccctaaggatagtttagtttcaaagagtagcttctttctcaagatgatgttgggtccagcaccttccctctgaaccacaaaagtgcaagagtatgcttctgtaccactggggacccatctgcccgaggaatcgctgtttcatcaaaaccatcttgattttaagcctacacattttttcaggactatcctaaatgtaggaatccaagtcccttttcaccagggccacaagcctcctgctttggataagttttctgactttgctccctctgtccctgccaggcatccctgtgagcgcagggtgttaggctgggcatcttccacgagcgatatcctatccatagtcttgtaacgcccctgttttcttgttttctttccctgaaagatctccattttgacatcttgagcttctcattggtcacttcttgtacagaatatttattttttttaaaaaatgaactattgtgctttaatgtaattacagtttaaagtattgcatgtaaactacattccagcattaaagtattcagtgtctagttattgccatcttaatatagaatatggtaaattctagatgaggaaaacaaatttacaagtcatttttatttctaaatctgtattaactctctcgtcagtcttgtctacccgcctcttctctgactattttttcatttggaagtgattttgataaactttgttttaaattatatcatcttgcatttgtaaaattcataattcatagaagggctaggtgctttttcttaaaaaactgtcttgacttatctgtgtcccgatgtgattattggtttgatgactagagagaccttttaaatgttatttctagtttattttttcaacctaaacagttattggttacattgtacgtacagaacaggctgttcatcatggtgtggtcctgctctgtaatctgattgattttttttcaaaaagtatcttctcatggatgaagcaagttccgttctcaacacacggctcgagttctggagaagggaggccatgtttagcaaattcaactggcttatgtcacacactggtgccaactttatgactccctattttttttttttaaagaaaactttcccttattagcctaagctatatcaatcaggcccttttttattagttggaatattttcggtttagtcttaacccacacaagttttctcctttagagtctattacacaaattctgtaaaaatatttaaaggtgttattgaccagagattccattcctccagggagagtatgttggattttaccattggtccccagtgttgttatccaagaattttggtggcttttttttttttccaaatctcaaatcttatgcggtttgtagtgaagactcaatcatacatgaaaatttgtattcatttggaaaaaaactttcaaaggttcaaacgatgtctcttattcagaggcgcgttcagcatggataggtccgtgatttcacaggtggtttaagacactgagtgtctgtatttcctctgtaattcaacagcacaggaaaggtttgcaattttttatttatttatttattttttttgctgcgggatttccgtcctgtctggttacaagcaggggatgtgaccacctctgcacttcatctgtcttcgagttccatcaggagcggaacgctgatcacagaccatctggactttgtctgactttgataatgcagtgcagaggagctctaaaaatagaggcagaactctggtgaccatcaggcgcagcttgcttcattgttcttcactcgtagccctgtgcctcgtgcggtggtttctgcgtctcagagcgctttaagtggagcggttctgagtcagtgcgttgtacatgcttgagtgcagactgtgtttgagaataattgtttggttttcacaagggatctgcgttctgcaagtgtgatgtttgatacatgcaagggagttgtgtcccttgggagctaagccttgggaaatggactaggaacacgttgtcaaataaagaagctgttatgggttggcaatctttgaacttcaaaacagaaaacataacgaacagcaggattgagcaggcagtttgatttgctgtcttgttgttttggctggactgggaaggatagcattggttttgatatgaggagattttagttatctgttcagattttgaggcagtgctcagttttcccatgatcatctgggtttactctgataaaataggggatttaccatgtacagtgttagaccctgcgacaacacaagtgcttacacagagttttgtagctcaatgggtagtggtgaattgacttgtctctgacatctttagatatagggagtggacctcgactttgttaataaccatgggactcacatgctacaattagtcttatagcttattattttttttatccttttcagatattagctcaatcatgtactgaaatcctggaattgagtccttcaagtgtctgtgtagggggtaagtgtttagagtttaaaaataccatgtaagaaattatttttctttttcccctagccgaaagatatgatttgaaactcatgttggaaggagaatagcaaaattaacttttttggcatcttttttttggtgtaagaatttttaaataattccttgaaatatttctattttaaattcaaatttttaagattcaaatgttattttaaataatgagcatattgtgtgacaggcttttagaatgttctgtatattcagttcatgtttgagaccttttctatggcaaataaaataaaatatagaagcctttatctgattgggtgatatttggaactgcagagctctatgctctaatgacctggccatgttatcctgtctgcaagctccaggctcatagggaaatgacttaggggcagagtgcaggaaggaagcaggcgacttcatcagctgcttctcaaagcaggttcaggttcccacctcccagacatccttgcccaggcagtctgcttctccccagccgactttcctcttcaagttgacctagagttctttttagcacaactttttttagaaaaggagaaaagaagtcccatcctgaataaggagaaggggaatatatcatatgtaaattatcacagaacatcgtggttaccggatggatgtgctgtctagccctgcatcccttagctccctaatacatgatcatcgagacagggagcaggaaacatgcacggggacattccagagcagtggggtcttttctaaggatggagagcattagttttctaggaaaaacataggcaagtaggtggaaactacattatgataatagcttgtctttattacatcccttcttgagccttccaaaccatgttccttgaatctacagttttacctagtcactttaacattgctcttcaggagttgtatagtccaagtttgcagatggagaaagtgaggcagaggcaggtttggagattcagtatatgtgagtcattgtcctttagatccttgtccatctgacaacagtgtctatgctcttactgaattacatgttaggtatgcctgcacattgttagaacatatgagtacttctcttttgatgacgcagtgaatggagagtggccggtaggctttgctttggtagctggtgacagtgtgtcaggcttggtggtaggagggagaagtccagaaagatagagggtgttagggtgaattaacctgaaggaactctgagtataaaggtccatttcggcatcacaagtgattttgcctggtttgtaaacttcaacaaaatctgagctatatatttaatacacgttgaaaaataagaacaaaaccccaaaaccccagatcttcagttcaaccaacatatttatactattaaactaggaactttcccacaagatagatctatgatgtgaatgtgtgtgagtgtacacatatgtgtgtacacttgcatttttcctatgttatttctagaagagccttgctgattttttttggtggggctcccaaactccctttgctgcccaattcctaaattgtaatttactcagatcaactctgtaacatttctcttacttcagtttgcctttgggacaagaggccatcaccattgggattgctaacatattcgattgtagtcacacagcacgtcttctctacccattgagagattgggtctgccaatttttcttctagcatattctttcatattcattccttttctaaaattcagtgtctttagacattgtagatagggagacagtaaagcaggttcctctagtccctgtcacggctgccagtaatccaaacagcagaacgtctgttgtactgtaagacaaaacaggttgacaagttgtttgttttatttacttcctgaacttagtgactgagagagaaaagagaaagagcacattctttcttgaaaagcctataagaatagaattgggggaacagaaataagccaggtaattattgctatattttaattctaatacctgggttactactggaaaacactctaataaaaaccaaagtagaagcttcgtgcgacaatgaatgccatctccactatctctacctagagcgtctaaaggaagcaagcttggctggagtcgtaaagtcacggttattggtggagaggatcgagtgcggaaatatgtgctgaggctcccgaaactgtggctgatcttaaaaaaaaaaaccattggttacaggctcacctttttctttctttctttctttctctttttcttttttatctctagagaaatttcaagttgttctgactggaagagcagtcacgtcgatcagtcacgatggcagtgtcctctgtacattcactgcaaacagcacatatacaaagagtaagtccccaggaatgccagtgtcacctaaaggtctttgttgcgcataatcttgaggatgttttcttctttaaaaagcatttatttttattttatgtgtgtgagtgtttcgcctatacatgtttgtgcctagtgtctgcagagaccagaagaagacatgttatagatggttgtaaactgttatgtgggtgctagggctcaaacccacctccactggaaaagcagcaagtgcttttagcctctgagccatctctgtaacctaaaatattctttctttctttctttctttctttctttctttctttctttctttctttctttctttctttctttctttcttttccttccttccttccttcctttcttccttccttcctttcttttttctcattcaattaaaatcagctatgctacagtttttcattagagaaaaaaataaagcttctataataataatatgaataacaataattatttcatagaggtaatacttgctcatgacttaataaacactagaccctgttctcagtaatctcattattcagaagatggtctttgatgtatgaattaccatcctgtggtgaaacagctaataacaggcagagatgaacgtttaaaaaaacaaacaaacaaacaaaaagccaggcagtggtggcgcacgcctttaatcccagcacttgggagacagaggcaggtggatttctgagttagaggccagcctggtcttcaaagtgagttccaggacagccagggctatacagagaaaccctgtctcgaaaaaaacccaaaaaccaacaaccaaaaaaaaaaaaaaaaaaaaaaaaaaagaaaaaaaaaagaaaaaagaaaagaaaagaaagttaaaatatctgaatctgtttggactaacttcatcagtcatgtgatcaaattgccctttgtccagacttatattttgctactcttggcttaaaatgcaattgtgtcagacaacttcactacctgttgccttagtgttattgttgggttttgccatcccttctcaatacttaatatcaagtaacttttcagtttcttgaagaattgcttgtgttgtcatttggtttgatttttgtgctgttggccttttatacctccagggttctctagaactgagttgagtggtagtctgcccatcagtgggtcttactttcctgtgtatgttagttcaatagtaaaatggtcttttcaatcaatgggtattttggcctctaaaatcaatgaactctggtagagctgttttaaagagatgaatctataactctgctgtttgtttgatggtattagcatagttttggccacacagcaaattgtcagtatgtgcttgttagattaaagtggtgagcatctcagcttagtgaatatgggcagcaatctcttttctctgtatgaggaacaccatttgttaaggcaaaatgatacttgtaaaatatgcataacaaattacacagttgagaagcctaactttatttctgttcagtagttattagtatgaaagtgctgggtttatatgactctttttgattgcacatttggcttgattataatatagacattggtaagattcagtttattgaattcagttctcaaatacatggaggtgaaagagtattttcattattcacattctgagatgatccatttgtatatgtaaatttcttcaatagttccactccttgatgaattttcacacatactgttaaaactctaagggagtttaagcaactagcttgataaggtgtacttatatgttatagagacagctatcttatcaaatttatttatacttaagtcctagtcttcctttgttcattcatcctaaattttgtctcttagatataatatctaatttgcccttgagtggcttaggtatttgaaacattcaggataaaaagttatatttataattgtatatcttagcgaagaaatctaatttttgatttaccataattttgtatcaagattttgtaactcttcattttttgattttctttttcttttgcctttttagccatactttaaatatgtgtgtgtgtatatatatatatatgtatatatatacctttctcatattcaccacctgagttcttattgtagaatgtgtggttctttaaaaatgagactgtgttagtgatgtgcatcttgttattaaccaaatgatattctacattttaggtgagaagccagtgagcattcagccaagttccatcctttgtcctgcacctgtcctgaacaaagatggagagtaagtgcattgacaaagacaactcaaaatggattcctggctcctgagtgactggtgactgctctgctctgtgaggggctctctctctctctctctctctctctctctctctcgtgtgtgttaccacataaaagcctttcttcacttaaaaacaaatagcaaccaaataaaaaccaaacataaaacatgcaacagattcccataaaacagcaattgcacactggtaattttgtttccttcttgtgtcttttgagtacaaggtgtcatatagcccaggctggcctcaaacttactcagtggcctgcacataaccagggtcactcacccgttaatttgacctttatagtagtgaatgtatacacacaaacacctaggaaacctaggtgttccaaagtaagattttaaatatttgctatggaattgaataaatattaaatataaaagcaagtggaatgaggctcatggtacatattaatttgtgctttattttgcatttcagtcaatcctacgctccctcttccttttctgtgacagtagaccatgaagaacaaagactcttacttaaaccatcaatgcaaaaataattttaatagtcacggtatttctctctgatttttcttatagtctttagtatgcagcaaatatttctaaaaagttgagatgttctctactttgatattaatgagtgcagttgtttgtagtgctgacgcacctgatggaattatttaatgctgatattttccataaagcataaacatagtaaacactaaacgcataatctcaagtcaaaagcagtgttcacacagtgaagattatcttttccttcatggaatgaaacagaatagtttttgtattttgcagtctgcatgagaacttgttttttgtgaaagtattcaatatagctattggacagcatttccagtagctaaaacaatctaacagtttcatttttgtgttttaaatagatcaaatgggctatattatcttacttcagaacttagactatattcagtgtgtgtgtgtgtgtgtgtgtgtgtgtgtgtgttatgcctgataatctagcatcagtaatgacctgcccataacttacttagacaggcattgggctttatgatagtttggtttttcatgacatcatcttgccccaagtatacagtagaattcagtgatcttgtattaggcatgtcaaaccactcaagtttggacttatttaattgaacttggagtttcatgttggttgctggtcttcatgtcacttggctcagtttgtccctaagttatattttatagtcttcacattgatcataacatcttttttgtcattcagataaaaaactctttgaattataattgattcattcttatttcatgcacagtttatcttgaactcactcagcactaattttggaccataacattcaacatcagcttgctccatctgggcaaagtcctcattatctcttgccaacatcattaatctctttgttggtctttatgtttctactttggcttcagtgatcctactggaatagatagattgtgttagttgcccctccaggtaggattgttgggactaatttcctcatcccacacaaaggtaaaggagagctgacagttttcctatgtttctctaggacccaaaccctcactcctcagacctcctctcttcattgcttctctgctcagctatggccacaccactgccttttttttttttctgtctcttaactcaacagcttatacttcctccttgctagtccctctacatggaataatgttctcttatctcaagtcttgttccaatgtcacctttgtacttactattacccagaagcctcctcagtctctttacatgttcttgattttcccccaaatccttaatggttattgctaggataaatgctgtaagtctcatttcctgtagacgcccttgcatggcccagtgcctgccttagtgcaaactcactcagtactgattgattgctgaaaggtggttaacttttcctcaaagaaaaaaaagttaaccaataaatacaaaaagttaaaggagatcattctattcctgatgaaagaggcctttagcagctaggagaaaatggtcagaattttattttagggggacataacattggcaagaacataaaatcacgaaaccttaaaataagtggatactaaaggagagagtttactcttctatgtagttacaaagtgaaattatacatattatatgccatatattagttaaattttaaaaaatatttactttgacttttgcttacctctgtatgcatgtatactgtgcatatgtgtccatatgtgcctgctatgttcatgtggaggtcataggatggattttggcttcccctttatgatgagtatcccagggatcagactcaagtcctcaggctcagcagcaggcacatctacctgctctctcccaggtgcctccttttgaataatgtaacatagtaactatttacattctttaatgctttgcagacaggataaatacttcagatacatgagttttacaaacctcacacataatgataaatgttgggtacaaaaaaaaccagtcatttatttagcttttggtattgatattttgcttgtaggtagaaaatgtttggggatggagactcatccaaaagaattgcttttgtactattttgttttattttggtatctgactctagctaatcaccaaggcaaagtttcagagaagtttgtaaatatgctggctgctgggaaataccattgtattctctacttcctatgctgcacatcatttagactattttctttgccttgacttctcttccgatcctttttgtacgtggccagttcttacagggttgaattaaaatcagcagaaccaagacagtttagccttgtaaggcggctgatacttaatatgtttgcctaattaccttttggctaaagattcaaacccattaaatagctagttagtctgtgtttcaaatgaacacatctggcccatcagtgaagggaggcttgtcctgtgtgagggtgacagatgtggtgatgggtccccctcttctctcacctaaataattaacaactcactagtgaagtagttctagacagagagcctcacaggcagatgcatggtctcagagctgacccccacacacgcgcctcagctcattagcctgctccgttactccttctctcctctttgtgatgcattttttaaaatgtgcttatggattttgatttaaatgagggctaagatggatgttttctgggaggtgggactaagagcctgcctcatcagaatagctaagatgtcttatattcaaatattgatattacaaagtaaaaacaggttacaaaaactcaaatgtgggaaagggatgtgtggtgttgacgggggagagaaagaatgatcaggatgcattcgaagtaaggatgaattggtcagattgcaaatttaattaatgaacaagtttcaaaacagagaaattgaaagtgcccaatgcagctcctagctaggaataaccctgctgattggttttgagcagcttctttgaaatagatcagtgtttaccaaatttactcgatagagattttggataagatgagcaatgtcttaggataatgggaaataaagtaaatgtgaaagtacttgggtttttccaactcttctcattggatataatttcttttataaaaacttcatatacttaagaaaattaccttagcaatttttttgtagattatttagtttatttgtgtcagttgcttatctatagtaagatgccttctttgagtttaaatatgactggtccctatcctagatctcaggctccaggtatgctatgcaatcattacacatgcttgcatcacagaggttgacctctgaccttgtgctccgggagacagcaacaatagcacggctgctctggaatacttgagatttcaaacctgtaatttgacaaaaagaacagaataaattgggtaaacatacataaacacattgtgaagaaagaaaaacagaacagaacacgaggcagagccctaatctacagcttgcttgataaggatgacttaaggaggcatatggtatagtttaatgcgctcgcaaaaacattggccagaatcttctggcaaatatgaaataaatatctaaatcaagtgaaagtgatagcattatttttcttacaaggcagtgtgggaagccacagacagagtccttgaagatagagatggtagatgcgggtcatttcaacgatctgatacaggatctttgggatgtgcagtgacttggtggtgagggctgggcttgaaaatttgttaaaaatttttttcctgaacgttgttacttttcaatattaagcctaatttgtctggcatccaattgactaatttgatttatttttttcttagttggctgaattttgctttttaccaagcttctctttctttgcaaaaacatacccacatatgtgtgtgtatctatatctgtgcagtccctagatcctttgtgttggcagcaggtgatacaaacattattgattcaatctgttctttcttgtaaagaatgagacttgatgatttaatttgccatcctggataccaggacatcagttatgcctttatttggattatacccattagaatcttgatgaaggaagttaaactgaagatcttttttgttactctaatcttctcccatcatgggatgttctcctttttttcatagcatagtgtcttctgagtataccaattggcatgttatgttatatttacttggtcagcattgtatctctttcccgagtatctgatatagctacaggcattgtcatttaacacatgtatgtctgtctctcaagacattgtccaattgagaacgttaaatcacatgctttcaagtctgagtgaaggcgtggctcctgagtgatggccacttggcctcatcaagcatcaggaggtctatcatgggaaggatttgacttattcttttctactacaaagaaaggagaaggaaagactagcaggtaaagagaagcactttccatcatattgtaaggaagatattttcaaaagctgaaatggctttagtgcgtgcgttgaaaactagaaaatgatgacgaacaggaaatatttcaagtatgcacttagagcttcctgcatacttgcttacaaaacttaccttatcaatttaatgatgacagaaatgtgacatttaaaaaaatgcttaaaggggattattaatatctacatatatacatacatatgtgcacatgtaaacacacatatacatatatgtacacacatatatacatatatacccatacatatatatgtgtatacatttaatgttttattaagattcaccagcttattaaaaaggagttgttgctaatgcaacattagaggcatttacagtgtgccttacatgggaacgttcatacgatactggatatgcattggcttctcctcaaagctgtcagtcttgctggctgtaattttgttttggtcaaatacatatgtaactgtaaaataaaaagaaattatttaattcctttaatccctttaatatttttaatgaacataattagacagaacgttaacttacacctgtgcccgtaacttgcagtggcttatttggacggctcacaaatccaagaccacccttttcaacttgaaatctgcatcattttcaaagctactgcaaagaacgctctgcagaggattcaatggcagtgcttgcttcagaatatctgaagtgaccccaattttaataactctttgagtggttgccagtttaattttcagtgtgtgcaaattggaggtaaattatttagggcttccagtgaaagtctttaacattttcacttactttttaaaaaattctctttaatggattgtaaaacggaaatctttcccagaagctatgcatctgtctactgtctatctgtctgtctgtctgtttgtctgtctgttgggaacaaattcacctatttcaactaggttactgtaggtttaaatattaaccatatttcgtgacatatgatacttcttagatcagagcgcctctaacagcatggagccctctccctcctattttggattactcatatatctgcaggtgcactaaggcaccgtgactctcaggactaattgattttatttagtcaacaataagtcagagcactatttactaatttctcctgtaaaagaatttaactttatcagctattaattgagtaccagggaccatgaaaatataattcaaaaatctttgtactgtgataatgttttaaaggtttctttgtcttttactttgaaaatctattttaagtgtggtatggacaacatattgagatgcccggaaaaagtacaaaccttctagttgatgttttgctgacaacaagcctcagttatttgtgcctcaattgcatagaatacctgtgctcatgtctgtttcacatgacctcagtcacattccattgtaaagttttgtgtgtattcccttcagttacactgtgatgcattttgttattcacattatattaagcatctcccagtttggctgagctccttttattattggtgccttagtcaattcaaacgccattgttgctttaattagtaaaagacagagagattgatattagcaaacattcatcaaccagtttggagtatgattttagtatatacatggatatatggatatataaacaaaagtcaataaagaaatctgcaatattgggtttaataagatgttttataacaggaaatagaactgcaaactttctttatataagaaaggttttttatagtctacatgaaattagattggagtaatttttgacactttagctactatatttttatgtcagtagactagtaattcttaagggaaagatcttgtatgtatgtttgcttctatattctatttaattctatagtctatattgtctatgctgttttttcaagtggctttaataagattataaaaacacattgatgctttgaaaatccttctattatcaggtattataagacttcatagagctcctgagttatacacactacaaggaacatccctgtatgttgtcaatctcttccgtggagaaactctgacatagatacaactccccacttttacaggctaggggtggaatattaagactagattgacacaagttcaagtttggggctctagattctccaacatgttttattaatatgcctgctttttcaaatcatgtgcacatttgggacaaataaagatgaactgtgcctttgcagcccatttgtgtcctgaactacataaatacaatatttatttaatgttatagaccataatttgatctcataactgagaatttggattccattgccagatgcatactaattggaagtagaagtgatagagggataggattgaaccgtgtattggagttgagagaaaggacataactaacatgtgacaaaaaaaaaaaaaacacctactatgtacattgcaatcttgggacaagtgacgctccaagtatcagctttaggctggagggtaacctttaactacctttgtgcttggggccatcaatggcttcatgacaatgccataccataccaggaatttaaggattccctctacaggaacaatagaattcataagtggaaacaactgtgcttttcatgtttgcaacaattttgaaattcttttctaaaaattataactattcataattatatattcaagaacaagtatcccatttatagaaaaaagttactgtagttaagcatgaaaattatgattataaaaaaaaatctggataaggactcttaggctaatgtttatgatgttaatttaactataagtccctaaaacatgtgtggaggactaagattaggtatgttggctaagaggaggttcttggatcgcagagtcagagcttctggtgagctacctttggaaacttcgctttcttgacttgcacaatggaaacagtgccaatggacttcgtgagaatgaactaatgtttctggatgattggaaaaactcagttcatgactgctgttgttgaccgtttggcctggatcctgctgctaatgtgtattttgttatttcagtgaggaatgttggcatttcgtgtaggcttcaccccacagttacctagtaacagtcaggtgtgcctgactaactataaaaggagcttcttgccccctcctcactctcttgttctcttctcttctactcttgctcccttaccctttctttccccattcccttcccccctcttttcatgtggtcatggctgggctctcctctcttttctctcctctcctctnnnnnnnnnnnnnnnnnnnnnnnnnnnnnnnnnnnnnnnnnnnnnnnnnnnnnnnnnnnnnnnnnnnnnnnnnnnnnnnnnnnnnnnnnnnnnnnnnnnnnnnnnnnnnnnnnnntctctcctacccccttaacttccctctattctatactgtatcatccggtggctggtaccttggggattggctgagcatgggctcgcagaggcacccccttctcccacacttggtttagtgtgcctaaaccaagcatatccctggcttctctctatctttttataacacaacaaagatcgtatatattaaaaaagcttatggatattttcttatctgtgtaccttgtttccactttatcgagtcttggtcatattatactagaattttgtttgtggataaatagttatttggataactaaggtctcaacatgtgtttcttctatgagaagacataatcataattttcaaacttcatcttgggctcttatctcactctaagtgctaaaattgtgaatcttttgctggactctaagtctgcattatgaacatttccagccagtttctgttcatctcttaaagaagagtggatgagattaccctgacaagaatatattagaatgaataaaaataatcctttctccaaatagaactgtgtctatcatctgacttctcatgtaaaagcatgggacttgaaaattaggaaagtttattctggattcagttatgcttagtcatgaaaacagaacaaaacaaacaccaagttctgcagaataagcaatttgatttaacaacaacaaaaggccattttggcattctgttttgaaatagtgcaaaaattcagttaaattcaaaagtcctcttttctggtttacactgttttcttcttaagaaagtttttgaagtgggtatgttagaagaaatatttttaacaggaatattcatgagttttgagtaagatcttaacttgagcttaaacaatgttacctttctctgtgactctgttcctgtgcagatctgagcaaagttaccacatggagggaacaggcaccataagaatgttcatggtgtcatttcctcttgcctcagtggtgatagaacaggttcgaaatcaggtagaatcctagatccatgacttttgccaaagcaatttgccttgagtctgctgtgaaactatgaaagttctgattgctttaaaaagctgtggtaaagattaagaagtcttcacttccagcatcttctagctgacttaattattgcttcttcactcctcttgtagaactcttgaagtttcaatcagctataatgatgggaagtctgctgtctcaagatccttaacaatcacagccacagaatgtgtgagtaaaaagctaattacctttaaaaagagttttatcatgagataaatcctagagtttcattaaacatggaagctacaaaccatgagaaacaacacgacaacaaaacatttgtagaatttatcttcatttttttctgtttttatcacttttaaaggctatctaatatacattagattttataaaatcccccaaagtcatactttagatttaaaaaagtaagaaaatagaaatgaagcattatttttaggaggttaaatatggaagtattttttctattatgaagattagaatttagtaaccaaaatgttaatcaagttttgaaattactggtgagcttcaacaggtgacattttcattttgtctatgtagactcagtctgtgctttctaatgtaaaaaatctcattctgagagcttgtagtagtgaaatttgaaactatatttcagttgggttgtttctttgcatcacccagaattcagtgttttgaaacataaacgccattgaggcagttccccccacctccccatggtagttaattttgtatattgacagaaagttttgatgttggtttgttgagctcagaaacaggacactctaaactagattagactgattgcccatctattattcaatatgtatatagaataatacatgtatatgtatatgtatagaatatatgtatatgtatttgtaagatgcaaataaaggaacaccaagaaattctcttttcctccaaaagtctaaagtagcaagcttaagattttcccatatcatgctttaatgcactgattcaggagacacacaatgttgccccttcagggttttctgtttgctacagtaagacaatgttgtaggaaatgaagattccacacaggcttttgagccttttaagctctctgggtaattttattaacatttctttctgctttgtgaatagcaattcttttttgcaacgtctaggttttgtggatgttgtaatgttttggtttttctcctctcaggatgtggttgatcgaggttaacaaatatttgtactatgaggttagttgctcagggcttagctccctaaaatgacactctttctccatccttctcaccctccttcacacccttcccccttttaaaaatctttcttcctggaaggcaggaaaacaggtatttgtttctgtcttgtagtcaagagctagttcagttagatgtgtagagactctgaaatagaatggctcatctgggatggatgtatacagccaacttatccgagcctggcgagctctaaggagaattattcatattctaaagagtaaattgaattaaaagaaattgaattaaataatttaattgaattgaattaaaataatcaataatttgattgaattaaaataaagaattgttgaagaataaattgtttagaaagtgaactctggtatgtcagaagtggggactagctggagatggaatattacacattgagtaagggatcaagttgagccttggtgagttgatgatttttgagtcaaggctggaaaggtgacgaggtgagctctcaagaccgtgagtgacaggaaggtctgtgcagaaaggctggtcggccagagcctgaggtgagacggcttctaaagaagagtggaaacatggcagggaaagtggggtcttgatgaggaagactctgtggtgggaggtcggtaggatatttgatcccgtgtgagctactgtgagccttgagactttcttcccagttacaggaagaagctcgaacagagacacacacttaatgcttacaaggatccttctagccactgtgtgaaaaggaacaaaatgaaaatattgacaccaagtcttgtagcattcctgtagtctaagaagcgtgggaaagaaggagtccccctgggttgggtggtggtggtggagatgactgagattaaatttcaatagatttttaaagttttagccctttgtctaaagagcttaaatgtaattcatgggagtaagaaggagatttagaatagttccttttttttttccttgaggtgtgggaaggatgatcagttatgaggtagaatatgaagagttcccttttggtaccatttgatgacagatgtgtctgagtgacagtggtccctccgtggtgatgttataaaagcttctgcctctataaatgttagtactttctttgcaaagtgattgtgggagtcacccccacccaacccaaatcccatgtgatgtttactagagaactggactcagccttccagaggtttctgtttgccttcttgggtcccttcaggtagcattcactctctcagactctatgctccctccacagtggcttctttcttttgtgaaaggcctttcattgagactacacagttccctcacctgctcatccttcctcaagcattgcctgccaggttcccccatgtgtctattgggtctccttcctcagacttcatagtgtcattatttgtttgagttccatctctattacacattggctacaggagtgcatattcagtatgtggccttggcacctgtttaacagtcttgcctttggtattggcttctcaggtatggtttagatgaatgggaaagcatttttagatgtctgtcacatatatcgaatccatctaattcaagaaaaaaaatgacaatcatgagttgaatatttttgaggatttttcaactggaggtctgtgtactgacaacatttctaagtaaaagccggacacttttagtttgtgatcgtgacacagctctaggagtgacaagacctactttcatgttcttcctcatctggcttcaggtccacaccttggcgtcagctcataggactcttgttttcattcttcgtctttccttaatttgtttataaagttatgtgaacaatgaaattacttccttcatcacactgatcgctccatgctctgatgttagctctgataatgaaaacaagggaaatggggaagctggggttcatacacagtgagcacagctagtgtttgggataagtacaaacagactcagagcaaggtcaggtagctttaaatcattgcttcctcccaactgattttccatcatgcttggctgagacaaagggaagtgagatctgtagttctttagaatttatgtaatctagttttacattttgcagaaagtctttggaatctatggatagtgtcaccacactatacatctatttcctttgtggagacacattgttttttgtcagtcttactaatagaggcccttgattttgagggaaaaaaatcaagaattttaagtgcttatctacttaatatttatttcaaaagtctgcataggtttgtgagtttcttgttcattgaatatgcgtaggaagaacaaatcggccacagtttttgctgactcgtggccttcatttgcatttcctcgtctgtgaaaaggatataaatgtgaaaaaagggagatctggatgttcacagagttctccctgaaggtgtacagcacatccacactgagagtatattgctgagttgccaggcctaagtaagggttgaggatctccacaagatcctgtcgctgaaagtaagaccaagaatgcatagggttctcccagagtccactgcagtttctcttctaggaagtgcttgtcctgcatattcctgccttcctagtgcggtacttactgtaactgcctgtgggggtggtgtggtttgtatcttaagtcttcaacgtgtggggaaagaggacgggcttcctgttctttcccaatctatactcacttgtcttctgttcgccttaagaagacggtatttagatgcttgtctaaagttctcgatagagtatttcttcctctttgtttttccttcctgagttctttccttcttaaaaacaaacaaatccaacaaaagacaaccaactaaaatggctttcctgggagtcccagagacgttgggcttggaagagacactgttttcatgtaaaatcagtgcccagttctgtgtatgaaatgaaagtgtggatgtccgtttcgacacctgtgtcatcacgtggagtcttgttgatttggagttcactttcttggtatgtagcttgcaaatgtcaagcaaggagcatcaagtggtaaagctgatgggtaaatggccttggaattcctaggagatgcacagtcaggacagaaaaatggaattaaatcatccaaaggtcatagttaattcctttgtaaaagcactgccgttaacatgtaggaggattctgtctaaatgtgtcgcctgatcccgtggggcatttgtagctctggactcttaggaagggttcctactggaaacagttagcctgaggcctgaaggatgactcagtggttgctacagtgccgcttacaggctggacccagagcaggtgcccaaagggtagaggagctcagtggacagacagtggagaaacataagtgtaggtcttgcctgcgtcagatgtgaccagaaggcagtgagaggaaggacttatcagactgaagtttcactgagacacaggcattgttttcttatcaacctgcattttatatctacctcaccctccaagtacataaagtaattgctgttgtatcaccataaaacctggggaaactttgcctggaagaaattggacttgaaacaacgtaattgttgcctaagcacaaaagtccctaagggaccatttgtttaatcctcaaaagttgtggctctcacgttcttttaagacatatttaaatcagtctgcagcatgttgggagatgcggcatgtcttgttaaccatcttcgcatgacataacatgctataagtgagatacaaaaaactttacaattagaaaaatacattcataacatttaaaagagtgcaacagaatctcggtctgatattgtctggccattttcacccagtgtgggcttcttacaaaggataaagagcttgtgggttttgatcttaaacttcacttttgattctttattttcttcctctacagaccaatgggattgcagccatcgtagctattttggtgttgttgctgctcttgggtgctgccttgatgtggtggttttggcccctttgctgcaaagtggtaagaagaattttcaactcttattaatttttttcaaagcactacgatacaaagtaaggcctggtatatgaatcaatgtcacatggtcccgcaaattaattagggaatggattaatccagcaattacaacagcaacgttttaattggcaacttgaatctccattattttataactatagtaaatcttagaaaatacttgctaatacttgtagcataaagcccacctcaaagacaatttggagctcaggttggtggacagaagtgtcaggagattggaggtagatgggatgaaagtcatttccactcaagctcaaggatagttctgataaatggatgctgctttccaccaccatcaggagaaccacaggttctgtggctgttttaaaggctcatatctttgaaggtctattacacacgatgttcttatatcttacaactgtaacgtgttttagaggtaagtccaatgccaacttaggctatcagttaaacaggtccttttagagacagacaaacagcttatgccattttaacgtttacagaaagcacatgcaaaagtctggactgtggaactccctctgttttcctaataggtcactacccatatgacttacaaaagaacctcgaatctttatctagtggttaatccactacagtgcttacatagggcttgctgggctgatgggcttccctggggacccatgcctctccaaagctctggggcagagtctgttttccttatcacttcctgtttaaagaggaagcctcattccttgccttgtgatgtctttcatcacgccagagtcagtccctctgtgtcatatccccctgacttacagatctctccaactgaatccaagtgggaaggctacccgatgttaaagacctgtagatcccagatgggcccattatctcagggctgttaatcatcacaaccccttaaccatgtaaggtactttattcacagtaccagggattaggttacaggcatccctacagaggcattattcagccttctacataatagtgcataacacacacacacacacacacacacacacacacacatttatgtatgtatttttacttaatcccttttatctagattttatcatagaaaagattatcccaggaaaatctgtcagtgtgttccgtgtatttcttgttttgagagtgttacttacgtgagcacactttcattatctcatcacacaaaagactgactgtttttctcctttccctttgctaagtgatttcaacttctcacagtatcaggcaatggtttatattctggctatgtttcttaccacctgtactgcagtctgctttcctgaggcagccttaggatcccttacctcaaggtagctggcccacagaggaggcaaggcattaactcagacatcaggagggacgagacgcttcctgtctctttgctgaactcatcaagttgctgccacagcagtttatgctcaaaaagtttcccccatataatcttgattaccttagacacggctattttggggtggatggcattcttgagtctcaaattaaaaagcaaaaaggtgccctaatgtgatttgtgctccttgcatttttaatttaaatttcacggtggcagattcctcccttcattaggtagtaatttcatttactattggtcacagggtgcaaaagtgtccaagtgtgtcactgttcccttaaagatacataaaaaaaaaaaactgatatggaccattttcaggaagttgttattattctgaaatgtagctttagaacataaatttggatattataaaggaaattctagcatcagcttgtgaaacaggtccgttctaacctgagaccctgcagataataaaccaggaacctgtgttatgcaaggcattgagaagtcccttcaggcacattataggatttcaggaggagttcctagctgcagaaatagcatggcgtcccatcagtactgaaatgtgttggccagatcagccacttttgctttgcacttggaaacagaatgaaaagcagcaggccctgagtgtgaacttgtagtcccacctgggtgggatgtgaactgtagcaaatgtgctctaatgaggcttaaaagctggggtacggggcaggcaagatccttccttcagcctttgatgaccatgtgttgaccatgtagaaggtggcaactactgtgctaggagctggagactcatatatgccttcaatatgatatgaaacttcatattttaatatggaagcaagaaatgtgggctagacatgtaaatgaaggaccgtaagtacccaatagcaacatgtgaagggcaacaatgtcagaggcacctgactgtgtctatgatcacaaatatgttttgaagaagaaagaaaatatgcagttaataaagagcatttcaggggtgtgtgtgtgagtgtgtgtgagtgtgtttgtgagtgtgtgtgtgtgtgtgtgtgtgtgtgcgcatgcctgtgtgtgtgcctgcatgtgtgtgtgtgtgcctgtgtgtgttactgcatgtgtgtgtaagtgtgtgtgtgtgtgagtatgtgtgtgcatgcctgcgtgtgtgcctgcatgtgtgtgtgtgtatgtgagtgtgtgtgtatgtatgtgcatgcctttgtgtgtgcctgcgtgtgtgtttgtgtgtgtgttgtggtatgctttgaaaagtgctaagctgagacctacggtagaagacagtttggattttaattagaccctcattcaaaagggcgtcctgtgtcttttagaagtttgcactcactcgagagacttgaggtgctttgaggacagaatgatttaggcttttgcaatagagacgttgtcttgaatggtttagttgggctctgtatgtaaccacaacccttatgagtaaaaccagaaagagggaagacagtgcaacggagacagattgtactgaggcagacatcaagccaaggaacactgacatgagcagaagctgggagagcaaggggcagtctcccctgcagcctgcagaaggaagccactagccaacagccaacttttaactccattacactcaattcaaactcttgactccaggagtgaatggacacaaatctttagtgttttaaaccacatgtgttttgatgactcttggttgcagcaataagaaaaaattgtatctttagactgattctgatattcccaagttggaaatgactcgttggggctatagattttggaaagcaggaggtatggtgtagggataaaggcactcgccaacaagcctgatgaaatgagttcaatagctggaagaacccaacatgtggaaagacatagctggctccccaaagttgttctctgacttccatattcctattatggtactaaataaatgtaataaaataaaaatagaataaagcatttttggttcattatggttaactgtcaaagagcatgtataatgctttacgtactgaatagacttcctgtctcagagtgagatcaaaacagtgtcaggttataattcgtagaaatgtctaaggcatatgtattactagcatcatcagaaagcaggatccatggacaggttcttcaggatgacactacctgtaagaagtgactaacaaatttcattgtggtgctgtgactcttccagaaagctagagattggtgttttgcccggcagagactagcaggcatgggacatttagataaacacggtatctatgaagctagcatatggccgttaactgtacggcttcattccaggacacaaggaacaaatgagaatcagaagcttcacttctgcactatttcatactgagtctagtcacaatgcatagggtgaaatagtacattttattgacgatgtgtaagcaaatgtctaaataagcaaatagttagtatgattatttatttaaactttatcttccataatagctcagcaagttcatgaaaacaggcactgtgattgttattcattataaatatgcccagtggtatcaacataaccaaataacaaataaatgttcagtaaatacttcttctggggcatcttcttgaacaatgtcatcacagactctgagagatgtagtgtctgtatctacccacatcagctttaaaatagctctgttgctcgctgtaaaataagtcctgttggctgtggaaacatattgggctggaaggaatttgtagttgtttcccagcgtgcctggttctttcattttccctgaaaacttgtctcttataaatgaacacacaatagaaaacacacatttagtacttccatcaaattggaatgcatcattgtaataaaatctgaagtagactcagtttagctcttatggagttgccactgcatgcaacccacagggcattttctaacagagggattatgaatctgtatggaaaatcagtctttgtacctactagtagtggaaatctatcatttgccttcattactggcttatggtccttggaagtcctaggagttctgaagactgtcaccactagaaaactcagtttctataacacatctgtagttcaggtaattctaaaatgtattttacatgcatccctactgcactggctggtttggtgtgtcaacttgacacaagctggagttatcatggagataggagcctcacttgagggaatgcctccatgagatccagctgtaagtcattttctcaattagtgattaagggggaagggcccattgtgggtgatgccacccctgggctggtagccctgggttctataagagagcaagctgagcaagccaggggaagcaagccagtaagcagcaccttccacagcctctgcatcagctcctgcctccaagttcctgccctgtgtgagttcctgtcctgacatcatttggtagtgcacagcaacgtggaagtataagctgaataaaccctttcttccctaacttacttcttggtcatgatgtttggtgcaggaatagaaactctgactaagacatctacttcatatgtatgataggtactgtgtcagttacttggtctcgttatttagtaagttaataaaaagcacgtctgttcctgcaaacagacttttaatagatttgacaaatgaatatatatttacaactataatataattttaatattattgaagtactccaaatcccaggcatttgagtttttctttgttagtatgagaatgtttctgtagattcaccaggctgttaaagcagagtatcagaaacaaaagaaaaggcagaggagtctcttaaaaactagccactcaagatgcctttactgtgactgtttatacttttctgtcttgccattcgttttaagaatgagagggaagggtgatggtgactgaaaatgccacaggtagtgccctctgcatgcctggctctcatacagaatcagaaacaggagacaatttggcccaggaggttttatctattgatattttagcaagagagctctaacaagaagctggatgaccaggcctaccattcgtcatctgtagattgtgtggtgtttgtgaacagctccagcagggcaataagctatcagaaaatgtagatgttttcatttctgtttagcttagaggacacgttgtgtttctggcagatttgtttcactaaacaggacagcagaaaagacagccagatagtagcatcatttgggatagccaaacactccacagaattacagatgtaaggctaatgaggtggcaaacagaggctttctggattattgtcaacgagcatggtacacagctgcaaataaggttgattatgctggaaacaatgtagtcgggtgttagcctagtgtccttagccaaagttctccattctcaaggaaacactgttacattcattcattgtgtctttagggcacttaggatgttacagaaagggtttgtgactcttaaattagaaaacaacttaaaagtgtccttttgaaagaacaatttacttacaagttaaacttcatggtcatgtttccgaccagagctctatagaataattttcttagccagcaacagctgtgctgttccctttacaagtaataacacttctatattgcacttgcattttattgttgaggagggctcctggtacttttattgagttactttcagagaagcctgattttgggaggaatgcgcaataaaacagaagtaatttaaattttaatatgccttccttgcaccattaattaaaatgatttatgttcagttgcctcatacagtgtgatagatgctaggatgtattgcttccacggtgatattttccaacagcattattttagaaacagtatcaaattcttcttagtctatgtatgacagcagcatcttttgcaactgcgggcaggatacacatttatagtgttcgtctcatgttccatgtgacttttataggttgtatttactgtgtagatttctgacttctggttttttggttcaaggtaagactctctgaagactactgaatttgctaagagagaaaagaagggtgagataactggatagggactttctaggtacaaatctaagggaacctagggtttaagtagtctagaatgaaaaaaaaaaaagcgcactgcccttgatccatagttttatcaaggagaaaagagaaaataatttacatattttattatatatattatatatatgtgcatatatatatttaaaatcctgtaaatactcagagtgttttccacgttgtctgcaggcttgtagctcttagatggttttcttgtagttactggcaaaaattacttctgaaacactacttatccacagtcattatactgtatcttattttaaaactccaaagcagttcaatgttgacagttctttcactattttttttctgagtatcagaacatatgattgcatcaagctggctgcaggctcccgtgctgacatttcctcgcgcaaagaatgcccacatcactcgaacatttgaaaagtgttaatgagccgatcaaaaggactgttgcctgaagcagctaactttttttttttttaatttttaagaaatcggctctcctccaaactgaaatcttcattctagcagctaaggagacgagatgtaatccccccccccaccaccccgatgatgataataacaaacggaaaaaaaattggaggagactcaaattctccatatggttcataaagtggtggaagtgttttccagaattttcaatacagagctgaaggatgctaagtggaaaaaaatcctggcaactaggcaatattatgccttttaaaacctgcacattctcatgaaatatggtgcacatggatacattcttctctggagtgaatgtgctcttgtgctatttaatgtaagagtgagtttctcacgactgttatttttaatgcttttggaccacactaagttttcctttctttcccacaaactaattttactggcatgcagggttactgcttccatgtagactcctgtcaatttttggctttagggacaatttgcaacgcattcttttcttttttttttcccccttttgttgcttaggaggccacatggtagcgtggagaggaatattctgaaatgtaagagaactagtttatttcttgtcctgagatttctaagtggtgctgggtctaaaggcagacgtgcaatgctctgaaatggtgtaaacctcatctctagcacacacttcatgaaactaattttctagcatgtatgatttcccagtaacactgcttagaaaacaactggtataccacagacttttccttggtcttccaacctttcctttgaatgtatcgcatatagtggaactaaactcagtgtttggaggtagatttttttaagcgatagacctgaattttaaatttgtcttttttctttgtatatacttgtggggggattgttgaaattagagctttctatttggctatgcttaaaatgggcatcagcagagtagtcttacaggctcatgaacatgacagaggacagaatgtctaccacatgacaacacaaggaaaggatagacactgttagtaagagaacatggtcccaccctggttctgggggttctgggtcctgtcctgaagcttcctaccgtttgttgtgatgaagggtgtgtctctttactcactagactgaggcttgactgaagcagaacataaggccccattttcattattaagcatgtgtactttcagactttagcatatctctacatttaaaaattggtcatacacatcaacattttcatattgcctgaagaaataacctctgataggatcttttctggaatgagatgaatacaaggtgcatgctcacacattgatatgtaattatacaaagtcacagaaacaagaaatattgtgatgtatgtattcttagtttcttataaccatcttcatgttggagaggacctaatattaatccagtttattccaagatgttgaaaattgggatgattgtatggatctcttactcctgttaaatccactggttctctagccttattggttaacagagaaaaaaatgatgactattgaaattggcagtattttattatgatggagctctttctgtataatttcatatttttatcagtatttcacttgaaacttgatcatgacctaaaacactaatgtccatatattttaaaggattagggggattatcaatctggttggagtaagatccatagagagagaatattgaggcagagcattgtggatactgattaccaatcacactgagaccttagaactctgacaagagtactgttgggtcatatagatctactccaaagaggcttggaaattccataatatggatttcgaaacgtaaaagcttcccagtaaaacagaaacacacaaaagtacctcttgtcctggctaagtttgatagaagtgaccacataaagaatttctaaatataaaattattttacgtgtgtgcatgtgtgtgtgcatgtgtgtgtacatgtgtgtgtgcatgtgtgtgtgcatgtgtgtgtgcgcatgtgtgtgtgcatgtgtgtgtgcatgtgtgcttgagtatatgcattgtgctacatgaacaaaagagtttacagagatcaaaagagggcgttggttcccctggacctagagttctgggtggttgtgagccaccacatgagttctggcaaatgagtctgggtttctgcaagagcagtaattgctcttaattctgcatcctcacagaaggatcttaatttgaaactcaatttttcctctattagtgggcatctaggaaataaaaagggagagttagtggtgggattgggcagtgatcttcaggatggtatgatcaagctaaaggttctacttatattaaattatatttgcccttgcaagaggcacatgctataacagtatatttcaaatctttactatgaaacgaaagtggtctcagatatattcggtgttagtgggagagaagggtatattttgatctttctctggtgagagaactccagagaacatgtgacaaaccaagagagatgcaaattccaaagcctttcaataaattccaatactttttatttgagctatgtgcattggaactttgaattcattttgactgggggcgggggggataattgaataagctcctgttagaagaacacagattagaatgaagacttgctaaagggacctaagggtgctagttgtttaatttttaccacaagaatttcacgtaaccattggtgaaaatgtattgtaatgatagactaccaagagcaaggctattagtaattatattttcctgctatggccttttactttttgagaaagtcatacatgcttatgatatgtttgatgaaatctctcacctctgatccctcccctccaatttcttctctctctctcttaccagatccccctaccaatcttgtgtgttctttttttgaaacccatcaattaaaacactgagaagaatcaaggaagcatgaggctccaactactttggcccaaaacaccattgaatataaccattcagccatatttaaaaatgttattttagcttaagggaactgtagttatgatatcaactcatgaatatatatactaaacaaaatgaacagaataacccaggtagcacataaccattttattaaaaatgagttatgtatttagctcccaaataaaaatgcagtaaatattctagcctctaaaaccaagcatttctttccgttaggaagtaaaagtgtgtgtgtgtgtgtgtgtgtgtgtgttgtgtcatgtatatgtgcctgtgtgcacacattttccagactccaagaccagggctgaagtgtggaaactgttagaaagagaagttttggctttgtgtggggaaaaaactttcaaatgatgagtttcttgccagttaaatgatgttttatgaagcagtgaatttctctattgcagctgtccaaacataattggaaccactactaggtagggaatttttagaatattgaagttttggtttgtgtgtactttgcatgagttgaaaaatgtgtttgacatctttaaagttcatggaattctaagtccttgattttgagttgtgacagcgagaacagaataaaaaaatcttttcttatttctttatctttcctctttctgtggttcctccctccttctctctgtttcctccctcattcctgtttcccttccttcctttccttttcctcctcattttctttaatctttccaccccattcacccccctttacctctgactttcccctttgtcttctgccctaaatccttaaaagaatattttataccaatctcaccctgataaatcatgggaacacagagggaaggcaaggctcacatgaaactcgaattggcatgtccaaggagatttttttttctaaagctagataaaatcaagaactctgatatatcttgggaaggaagacagaggtatctgtgaatatcataaaaattataatcctctttgagaagacagaaattcatggcagagagagggtagagaaatatttcaaggaatttattgaacctgggaagattttggagaaggttctagaaagaagaaagggtttgttgattcttcctccgtttgtagtctgcttttggaaagagtgaacactggaagggaacattgggaagaaatttgggttggctttgatcttactgagtaaaatgctaccaatagtgtttcctctggatgtgcaggttggtaaagataaaaatactcccttcttaataaaggggctatagacttcataactttaagtcagcttcatttgactaacattttgtcgtaaatcttaaccccgtctctggagttgccacagtagccattattttgtacactcttacttttccttatgcaatggaaccttttacattttattttgttctattttgtgacaggttatcaaggaccctcccccaccaccttctgcaccaatggaggtaagcgaatgcctggtaaagggatacaggggctgttttatttttatatataagtagcattccaaaattagaccaattctatttttgtgacagccaagtatgtactttttgatttgtgataaaccaactgcaactttttatcttatgatttctagatactaggtactagaggaatcggcccttcatgggtagacatagacagactggttataggatcgaaagtacatgaggatttaatacggttttataatcatgtattaatggtcctgatgacacgtctctaaaattgttaaaatatccaatctggctgttgaaaggtgtcattgctttcttcagagtgataattgctattgtatcactctgttcgctgtcatcgtactagcaacataaaggaagggatgttttggtattgtgtgttttcagggcttctttaatgtttgtcttttcattataaattttatacttcaaagttacatatatactgaaacatgaagcaattgaaatgtggccccacgttgaataatcctttcaagtttgaattgatgagcatacttgctttagacacacaatgctcagttcaaaaggcaacgtctgttagttactgggtgatgctgagagaatcggatgaaggggaagatcaaccataccttgtagaacagtacttgaattgttgtgtgaaattataaacacactgtatatcccatgtataatttttttcattttccataacaattgaataatttaaaacatctcattgtgacccacctctgactaagcaatattttaataaattaattagatccacttctaaaaactgtgtctccataggaggaggaggaggatcctttgcccaacaagaagtggccgactgtggacgcttcctactacggaggtcgaggtgttggaggaattaaaaggatggaggttggtctcttaaaggaagagaaatcactgatctaaagtatacatttgtaggattctccagccacagacaccatgctttttataattgcatccctctttagtcagcactgggtcctctctgtgcacattgcttctccggggaaacatcctaaccatgtccagagctggtgaagaacagcaggctccatcaatcaaaggactgcattgataagatttatgaatgctaaggataaaaatagttatgggtttcctcactgctttggaaaaaaaaccctggaacatcaactttaaaaatgtcagtcatttacagttgcaacaatgctcttctttgaaaagaactaacagttagttactatttgagagaattctcttttgcaatagtcaacaccatgaatatgactttatcacaaatacagaagaggcacatttaaaaatttaacagctcttacttactagttaccagctatcccagttaatacttcaggtatttattatgttgaactattttttttttgttagtccagtatttcaaagatggagattctttctaaagaaaagagtaacatgagcctgcgaatggatcctgagcagaaggatccattgggagtttctgtattagtaggtttgtgttacaaacactttagataaaccaacttacaaagaaggaattttattttggcttggagttctaacctagggtacataagctttcctggttctggccctgtgtccaggctgaccatgggcaggtaagaagcaagaggaaaaatgtcctgctatcaccccctacaggcccaacctatgaaggcctcagacctccttctgggcacacttcttacaggtgctgtcaccttccgaaagagccttcctgatgaccaagacgttaatacatgtgtccttaggggactttccatatccaaactgcagcagtttctttatgctcgagaaagagcatgcatgcttcccagaaccctgtaacccaaagttcaagagtccttgaattccagagtgtgaaattgcatcacctgggctcccttttcagttgcggaaaaatttttgaaaaagaacgagccaactttcattgagtctgtgtccatgaatcttgtacagtttggccacatcactgcactattctattgatgcaatgataaagtggatgataacagattttaaaaagataaaaaacaaaaaccaccccaccaatatttacaatgaaattcaatataaaaatacacaaaataaactgaattgagaattaagtattattaaaatttatccaatgtgaatttaaaatcagagtgggaaaatcaagtccgtaatgcttgtatcagctcccccagtcaaacctgccaagtgctcaagctggagaaagtaaattaatttagaaggtctgagatggtctgaattgcaggacaaaacttcagcactcaggttctagtcagtcaaatctgatacttgttgttgttgttgcttctccagaccccagtcttttaaatcaaatgcttatttaaaccttctggggttggagtttgcagaaagccagagctgagctttttgatatctgttagcacaacagacacacttactacaattcctaataacttcacatgggtgtttctgccagtttctcctgaaactgactttttatttttttttaaattatgaacctgctccttaattatctagactcttagtggtgcaagtgtactctggaagttatgaaactcactgctgaggacggaagccaagtgtgaggggaggaagtcatctctgaagtttgtggttacacatctcccctgtaataaatgaggccacaggatacccactctgccaagaccttctctagcaactgatttttgttcttctttctcccttacttttaggccacctcaatgtgttcaactcaaaatattaaagatttatacgtgtgtgtgcatgtgcgcacatacacgcactaattcctttgtggagttggaagaaacttctacgaggagccttctggtttttagagcctaagattaagcgtttggggatgattgattataactcagaagctccttcatgaggcaaagacagcaaacttcttaaatctctctaggcctccattcctgagggccatgtgtgcagtcatcagagcctgggcatgctatgttggatgaaatccagtttaaccagcttttctttcttttcttttcttttcttttcttttattttcttttcttttctttctttctttctttctttctttctttctttctttctttctttcttttttttggttgcagtgatatttgattctaattatcacaaggtctatggtttcatctgtgaaggctaggcttaggagcgatttttctgaatgactctaaattttatctacttactgctccattctagattgtttctctgagttgtgttcactaaacaatcttgtctcctgttttctcttgttttactacattaagttgtgaagttacagctgcatgaaatgcatacgcattttagagttttaaattcagttagttatgtccaaagattttattcccagtgttagcttatctagggaaggacttatttgaaaaaaaaaaaaagattttttccctttgttttttttattagattttttcatttacatttctattagatattttcttcatttaaatttcaaatgctacccccaaagccccctatacccttcccccaccctgctccccaacacacccactcctgcttcctggccctggcattcccctgtactggggtatataatcttcacaagaccaaggaccttctttgatttctttcttcagagacttgaagttcttatcatacagatcttttacttccttagttagagtcacgccaaggtattttatattatttgtgactattgtgaagggtgttgttttcctaatttccttctcagcctgtttatccttttgtgtagagaaaggccattgacttgcttgagttaattttatatccagctacttcactgaagctgtttatcaggtttaggagttctctggtggtatttctagggtcacttatatatactatcatatcatctgcaaatagtgatattttgacttcttcctttccaatttgtattcccttttgtccttttgttgtctaattgctgtggctaggaatttgagtagtatgtggaataggtagggagaaagtgggtagccttgtctagtccctgatttcagtgggattgcttcgagtttttctccatttagtttgatgttggctagtggtttgctgtatactgcttttaatatgtttaggtatgggccttgaattcctgatcttcccaagacttttatcatgaatgagtgttggattttgtcaaatgccttctcagcatctaacgagatgatcatgtggtttttgtctttgagtttgtttatatagtggattatgttgatggatttctgtatattaaaccatccctgcatccctgggatgaagcctacttgatcatgatggatgatcgttttgatgcattcttggattccgttagagagaattttattatttttgcattgatattaataagggaaattggtctgaagttctcttcctttgttgggtctttatgtggtttaggtatcagagtaattgtggcttcatagaatgaattgggtagagtaccttctgtttctattttgtggaatagtttgaggactattggaattaggtcttctttgaaggtctgatagaactctgcattaaacccatctggtcctgggctttttgtggttgggagatgattaatgactgcttctatttctttagagggaatgggactgtttagatcattaatctaatcctgatttaattttggtatctcctatctgtctaggaagttatccttttcatccaggttttccagttttgtggagtatagccttttgtggtaggatctgatgatgttttggatttcctcagattctgttgttatgtctcccttctcatttctgattttgttaattaggatactgcccctgtgccctctagttagtctgactaagggtttatctatcttgttgattttcacaaagaaccagctcctggtttgattgattatttgaatagttctttttgtttccacttgattgatttcagccccaagtttgataatttcctgcagtctactcctcttaggtgaatttacttccttttcttctagagtttttaggtatgttgtcaagctgctagtgtgtgctctctctagtttctttttggaggcactcagctgtgagttttcctcttaggactgccttcattgtgtcccataagtttgggtatgttgttgcttcattttcattaaactctaaaaagtctttaatttctttctttatttcttctttgaccaagttatcattgagtagaatgttgttcagcttccacatgaatgttggctttctattatttatgttgttattgaagatcagccttagtctatggtggtctgataggatgcatgggacaatttcaacatttttgtatcagttgaggcctgttttgtgactgattatatggtcaattttggagaaggtgccatgaggtgctgggaagacattatatacttttgttttaggataaaattttctgtagatatctgttaaacccatttgttttataacttctgttagtttcaatgtgtctctgtttagtttttgtttccaggatctgtccattgatgagagtgggttgctgaagtttcccactattattgtgtgaggtgaaatgtgtgctttgagctttactatagtttctttaatgaatgtggatacccttgtatttggagcatagatattcagaattgagagttcatcttggaagattttacctttgatgagtatgaagtgcctctccttgtcttttttgataactttggattggattcgattttattcgatattagaatggctactccagcttgtttcttgggactatttgcttggaaaattgctttccagcctttcactctgaggtagtgtttgtccttttccctgaggtgagttacttgtaagcatcaaaaagttgggtccaatttatgtagccagtctgttagtctatgtcttttatttgggaattgagcccattgatattaagagatactaaggaaaagtaattgatgctttctgttatttttgttgttagcgttggcattctgttcttgcgattgtcttcttttaggtttgttgaaggattactttcttgctttttctttttttttttttttcttcttctttttttttttttttttagtaatagaggacttttttattagctagtgcccaaacaatgcagccaccaattacattgcaaagattcctttgtaaaagtagtagtagctcctaacttctgagtctcctctccagaccccagaagaaattttggtgccccaaatcttataactacagacattttatgtttttaattgaaatttattttaattgtttttcttgctttttctatggtgtagtttctgtccttgtgttggtgttttccctttattatcctttgaagggctggattcttggaaagatattgtgtgaatttggttttgtcatggaatactttagtttctccatctatggtaattgagagttttgctggtcatagtagcctgggctggcatttgtgttctcttagtgtctgtataacatctgtccaggatcttctggctttcatagtctctggtgagaagtctggtgtaattttaataggtctgtctttatatgttacttgacctttaagtatttctacctgtttagcagttttctcctgtatttctttaagtgaattattaatacccttcttaaaactctaccagcctcatgagatatgattttaaatctgaatcttgcttttagggtgtgttggggtatccaggacttgctgtggtgggcatactgggttctgatgatgccgagtagtcttggtttctgatagtaacattctttagtttgcctttcatcatctggtaatcttcagtgttagatattctagctgtctctggctggagcttgttcctcctgtgattctttagactctgtcagcactcctgggagaccaactctctgctgtgtcccagtgtttagcacactctcttcagggaagctctcctcttgcagggaaggtgcacagaagtcaggagctcagatccacatcctgagtcctggggtcagagccctccctggaggtggactctcctctggcagggaaggtatccaggggtatgggtctcagctctgcctgttggctgaggatgaaggccagaagagaccctgtctgtccaagaagctctgttgcctctgccccccatgtgctcttctgtgtagactggtctcagtgatcccaagattctgggtgtgctagggcctgcctttgacctttgtccctgttcatgctagcacaagaccgtctgggttccttggaacagatgttgtgttccacccaccagtgatcgcaggatcctgggtgtgctagggcgcctgcagcatggagagtcctctggggaccttgggaccctccatcgagttccaaagtttcttttttttgttgttttgttttgttttgtattgttttgttttttttttgtttttgttttgtattgttttgtttgtttgttttgtttttgttttgttttttatcatgatcttatactttcttttttttctttttttttaattgggtatttatttcatttacatttccaatgctatcccaaaagtcccccacacgctttccccacaaccccccccacccctcccacttcttggccctgttgttcccctatactgaggcatataaagtttgcacgactaatgggcctctctttccactgatggccgactaggccattttctgattcatatgcagctagagacatgagctccaagggggggggggtactggttagttcatattgttgttccacctataggattgcagatccctttagctccttgggtactttctctagctcctccattgggagccctgtgatccatccattagctgactgtgagcatccacttctgtgtttgctaggccccggcatagtctcacaagagacagctctatctgggtcctttcagcaaaatcttgctagtgtatgcaatggtgtcagcgtttggaagctgattatgggatggatcccaggatatggcagtctctagatggtccatccttttgtctcagctccaaactttgtctctgtaactccttccatgggtgttttgttcccaattctaagaaggggcaaagtgtccacactttggtcttcgttcttcttgagttttgtttttgttttttaaggaagaaagccctacaaggaagctccactatctagctctaaaggtttaatatgtttcaaagaaatttaacaatctcataacaaacattcttgtcattggtcatactgaaagatacaaatatattttaataactcaactggatccacttgaaataaaaaaaaactagtctacaagtgtaataaacaaggggtggcagtggttaaaatgtctaaatggctttatcaaaaacttgtgcataattccttctatgaaagtagccttccatcttcctactcctcagttcagcttagcagctttggacaccttctttccctggcacagactcgtcttagtttctcttcatattctctgcttgttgtttcctctttgtaatgtcctgggattctcccactgctcctgcttggataaactcctccagagaccacttcccagtcatatattgttggtctcttatttgcctcttctgtttactgaaaagtcaagaaaagtaacaacccaaatccccatggttttggtcaataacaagagttctcagagaataaaactacctaaaatttgtgggattccataatggtctgtgtttttcccatgccaaatcctttcctccccaacttgcttcttggtcatgatgttttgtccaggaatagaatccctgactaagacatcatgtttctcagttaagaatttgcttattacacagggtccccaatgaaggagctagagaaaggacccaaggagctgaaggggtttgcagccccctaggaagaacaacatgaactaaccagtaaccccagagctccctgggactaaaccaccaaccaaagaaaacacattggtgggactcatggctctaactgcatatgtatcagagaatggcctagtaggtcatcaatgggaggagagacccttggtcctatgaaggttctatgccccagtataggggaatgccagggccaggaagcaggagtggacaggttggggagcaaggagagggggaaaggataggggattttcacaggggaaaccaggaaaggggataacatttaaaatgcaaataaagaaaatatttattaataaaacagaaaaaaagaatttgcttattaaattactatattcagatgagcaaaagaaccaaagacagaatgctacgttgacaagtaaaatgttgtaactggaaatttatactttgtaaatcatccaaatattataaaaaagaattttaaagagtacttatcttatataatataatttcatacaactcaaaaatcatgttaaacttcttcactcatttctaattgcttacatccaaatccttacccttgccagtacacactgtggtggctttgagcacattgcttaacttatgccacaattcaatcatctggaaggaaaacacataatatatatttctttgcaattttttatggattaaataaacatgaacacagtgaataaatgctaccattagcaccttagatccctcatggtggaattgaaccctatagtcttgcattttctacataagccacaaattgcctccatatttgaagtggtttgaaggcttttgccccagatttaactgatgtcatatttttgaagttatcttgcattagggaggagaggcccttggtcttgcgaagattatatgctccagtacaggggaatgccagggccaggaagcgggagggggtggtttggggaacagggcagagagagagtataggggactttcggataggaaactaggaaaggggctagcatttgaaatgtaaatgaagaaaatatgcaataaaaattaacataaaaaagaactacaaaaagaaaatacacatgcattctttatattcaaataagagaaagagagagcaagagagagaaagagagagagagagagagagagagagagagagagagagagagagagagagaagagaatggtgaggaaacaggcaggaagatgtctggactgtcctgtccagccatcccagtctaatgggctagcttcaggtctctatgagagaccttgtctcaaaatccaggatggagggaacctgaagaattgaaacctgaggttgatctttggcatccacacatgtatgtctacacttgaacatgcacatatataaccaaacatacaggaaaaataataatgatgagtggtaaggaacccattaaagctcaggagaaaagtaactggagttagtatactaatttatctttttacaccggactggtgaatcaaaggactgtgggcagcataagagcttggtactctgggatgatttgattgacagcaatgcctccttcattttaaaggtccgctggggagataaaggatctacagaggaaggtgcaaggctagagaaagcaaaaaatgctgtggtgatggtccctgaagaagagatccccatcccatccagaccacctcgacccagacccacacaccaggcacctcagacaaagtggtacacgccaatcaaggtacgtgtctgtgttttgtgtgctatagctgaaacctaatggggacttcacttttacagtctctcctgtcccccgagaaagactaaggtccataaaatagtagacaatccatttttatgctttagcaactgtatattttcttagcacaagtctttaagtttttctatttatttacctgcttagttgattaacaaaaatgaagcaatccaggtttacaagtccaatatctctttagggtcgtttggatgcactctgggctttgatcatgaagcagtatgaccgggtgtccttgatgagaccccaggaaggtgatgaggtatgtgatttcttgagaaaggtggctgggggcagggcatgtaatgaaagtaacttaaaacttcctgtgggcatgcaggattgaattgatgctgaccgctgcacgttcatgttacatagggtgcttgttaagttctgtgttttcagaatgcatttttcaagccaatttcataccactgcctttccagataattaattaaagtcgtaagtctgctcattgcttcggtatttgactttgaaggcatgtgttctgagttattttccttcggaagaaacagactgggaattagcatctgaagtctttttcttctagcatttgtggcagtgagatctggggaaaccacctcagaactgtttctttaggtataaacctgttacctgcctttaatagtggtagcggtcacagtctggtttctgaaatatgtcaaggtgtcctgaaggcttgaagtactgcagaaatctgtaatagtggtgtttagatgcatatccttaaaagtgtgctgtatgcctgtcttttccttatcaaggactccacttcaagctctcattttagaaatctgccaagaattattctgctcttagtatttttcctaataacgtgcaccatttcctagtgctacaattttagaaaagttgttcagagcctcctcatatgcaccagtggtggctctggttaagagacccagtgctgttcatgatgctctcgtgctctcatggtgtgagtacaggccttcctttcctactgaggagaacaccatgcacacctcagaggagtttggctttcacatttaggcctggcatgctgctcttgaaaactttggagtcatccatcaaattagcatttgtgctgtgaagccaagatgcacttagcattagctagttttaacttggtgtttaaagtgtaaaagaattttagatttgtttattaattttttgttgttgttttacttctatcaatttaggaacatttcagaaatatctgaggccagccagttagggtacacaacttgagaatatatagctgaactttccagcgggaggccagtgtgctctgctaagaccactgggagagagagctatgtgtgtctaggtagcagcctctcctattaccaggtcatcggcacattagcgatagaaacttcctttatatggaaattcatgcatcataaattcaagtgtgggcttgtgctctgtttctgggtctgcttgtaacctttctccttctcaagactgctggagtctcactcacttcgttcattacaatgactttcaagcctcatctcagggtgttcctcaccatgttagatgttcgtttgtatggttaataatttccatcttattaagtgctggggattgagtaaatggagataattgggggaggggtggggtttcagttctcttcctaatattgtatatgctcttctagctattgtggaaaacttgggatatttgtaaaatctactcccctaaaatccacccatacctgattaaactgagttaaacattaaaccttgactaaatttacatatacatacttcatatgaatatgaactgtacttatgtgaatgagatcttcattttcatctgattatcagtttgctctaaaaatttactttccactaaactatcctattaaatgttaggaactctatataaacagtctgttttcagcataggtaagtatgttaaattccttttgaaacagtttggctatcatatcaactaactcatcggaacaagtgttatctgatattaaggtcaatttctttaaagaaaaaaaattgaaatttatcaacttgtaagttggtgttattactcattttattttcctgtgtctcctgtggtcgtcaatcttctttgaatgcacacttatacacaacatatcgttttacactggtttgtgccttttatgaggaattgggtgttgggtgcagaagcgtgcctgcacgcgtgcgtgtgagtgtgtgtgtgtgtgtgtgtgtgtgtgtgtgtgtgtgtgtgattgtaaaatagtttgctcattttagacattaggcaggcttggaacctccgggatttagatggtcgtcctcatttgcatggtcagggcataaagaatatctattctcctggataccaaacagcggcattctctgagggtggactgggaggctgactttaagctgcatgacagataataaggcacactttttctaagggtttgactaatggctccaaggaacacaaccccagtctatccagcagcttgttttgtgctttggaaaacagccttgtcatttcggtaggaacagtttattgcagattctgcctcctgagagctctgtatgataaacaaaccggagagcgagtgcagcactgcagcgagtcccgcaggtggggcagtgagcccttcacggtgcctttggagcccaggctgtgctggggcgcagtggccacggggctccctggcctagttctggcgcggccccggggtccttgatgcggaggctggagctggtgcgcgcagtatcaaagcggtcgccgggacgggcgggctccccgcgcggggctgcgggcgggcgggcgtgggctttgatgcgggcgccgggtcctgggagtcgctggtttggcggccaggtgcgagctagcaggttgtcccgacatctgctggcggccgcgctgccgattgtcagcggaggtagttgagagcggcaggaccgtttttggtcttgcgcgcgctgcctggaggccccaaactccaaaggtaggagcggggtggacacagctgcgctcccaaacttgcccgaggcacaaataggagatctaatgcagtttgactccgcggcggtggggagacaggacagagagccacttcagagacaacttaccgctgcaacatctgccgccaagtttccagggagtgacaggggacagcaggtacagatcgaagtctctgcacaaacaacctccattaagccctgaactcttttgaagggtctccatcaaacgggctggagtccgcagcaggagtttgtttggttttcaaagcagttttttttcttttcttttctttttttgtatgtgtgtgtgtgtgtgtgtgtgtgtgtgtgtgtgtgtgtattttccccctcaataacaaggtaatttataaatgatgcattaccatgcgtcctctttttatttttttcccctatgaaaagagagttagagaagcagaaaggcaaagaaaaaagaaagcacagcactaggctggagttgttccacaaaccaattaaatctctgaaggccttcttgactgtgtttgaggttatgttaaccttcaaacggctcctcactcacccgtgagtaggcagcaacttacagattcaacacaagaatcccagaatatgcctgaaacacacggatttccgcttgcatctaacgttctatagattttcttatctctgcagatgtgaagtttaaggttctcttttcaaaggaatatgggatttagctttgctggtggtagtttcttctcctcgccccctccccctgaaaataagaatatctaggaaattgaatggcacaacagtttgtttgtcaggattccatacttgtagtaccttaaaatgaggcggtgtcggcggagagaaaattcatcaattagtttaatgtttaccaaaagagttgtaaaaactcatattagtgcacaggtgtatatttatacaatggcaatgggatgggctaaaatagtagcctggcaagtaaagactacagtcatgtgattataccccatcatgcagtaaggcggctgcatgatgttgagatgagagcagtcttataaatgtatgcttaggagcaaaggattagccgaagagcagggcctggggttagacgctggagttggcagtgccatagtagtgcatgtgtatatcaaggtaaagccagacctcctatgtggagaacacttatacattatacagccgtgctccatattcctccaaatgactgaggtccacatggatagaacatcattcttccactttttaaaagttcatagcaaaaccaagacaagatgcatcacgatcttaggacgctcaagtttctttcaaagatagcatcaagagagctttgtaactgtagaggccaatggctgaagctcgcttccggtttattatccccggttgcagatttatgtccacagctgtgttcgtcctgcttctgagtcctcatagctaagcaaacaggcctgactgtctttgaatggcaccttcttcagtgaccccagcctccctaaatgtcactctctgggcttaggaatcacatggtgcacccttcagccacgccaaccgcaaactgaccaacacttccatattaggacttcccaccacctgcctctgttgtctaccatgtttgtggcataaacctctcgtgggtttcctgtagaagactgatctttcactcaaataattctgaagttacgatagtttttagcatactatgaatgacttcagactttgaaatacatttgccaaaaccttaaacttaaaaaagttttattttgtatcctcagctattatttgctgttgtcatctttttaaatgactacattcatacattttgttttaaaaaaattagtttatgtattttgtgacatatgggtgagctttataatatgttttatgggatccagaaaaacctcctattttagcccaagtcagtcctaatgaccacaaaacacttatacttttatatactattttcagtaattaaaatgaaaatatagagataagtataaaactgttgaaaaaaccctatgacatatacaattaattattgtcctttaggccaattatgatcagacaaacacttcttagagaacacttccaactctttttttttttgaaaagtccaaatctttaaaattttgattttgttttattagatatttcctctttctttctttctttctttctttctttctttctttctttcttccttccttccttccttccttatttatttatttactattatttatttatttatttatttattttttcgagacagggtttctctgtatagccctggctgtcctggaactcactttgtagaccatgctttatttacatttcaaatgttgtcccctttcctgattcccctctgaaaccccctatctcctccccctccccctgctcactaacccaccccacttccaactctgcctctcaggtaaccttagcatcttacattttcattatttctttctgtatttattttaaaacataacccgcctagtccactcagtatggcctgtgtgtacttgtgattcctacagagttctagggttagatagcctcttacgggctccttcctggaggagattgattcttcctttctcagtagccattggtcacttagagctcttcatccaagtttggggccttgtgagatgctcctcatgtacactggcatttcagctggtgctgccatggtgcaggtcttgctcaggtgaacatagagctgaaattttatgggtacagcttccctgtccaacctttaactcaggacatcttttaaagtgccatttcttcctctctcttttttctttaaaatatttgtaatgtgtctgcaggttttccctgcatgtatatttatgtgctacatttgtgcagtgcaggtaaaggtacgaacaggacatcagatcacccagaagttgagttaaagatagttttaagccatgatgtaggtgctgggaataacacctgggtcatctggaagagcagccagtgttcttaactgctgagccatctcttcagacccaactaactacctttggctgatacatgataaaatttctactagaataatccagatcatgagcatgtctcgaccccattgactgctacaggggtgtgtgactgtatagatggatgtacgtttacactgtagttatagaaatgtttgcagtactgtagaccgtacttgatctttataaaagtcttcaaccaatgtctcttgcactggaaatgaacattcacaaagaatgttctttggctgccatttcttagcttaaatttacctcttaactatataattaacaggtatgtgttaattcattctggtttcctaaagtgagatgaaggatatgaaagattcaattacataaattaccaagctaggccaatctgtgaaaaagaacgtatatataatacttgactatttaatgagcactttagcaattaacaaagaaaattatttataaggacagtgcccctttttagatatatacattgctttttagaaatataaattgtctttcatctataagcgtcggcacagaaaaaaaatgcaaaataaaaaaaaatgcaagtggtagtcttccccagggaagaacacaccaattggctgttcaattccaaatagtcagctcttaaaacatatatacaatggactgagcaggttatatttaggaatacatacaggagtatattcaggagtatatagaggaatatatatatatatatatatatatatatatatacacacacacacacatacatttatatatatataaatatagtatatttataaagtataatatatatactttgtatatactatatatattatactatatttatatttatatagtataatatatatagtatatacaggaatatatatatatgtgtatatatatatatatacatatatatatatatagacacacgcatacatatacatttaaatctttacctgtatgcatgctatagcagttgactttttaaaaggccattaatatgtaaaaaggtctgggtttatatgaaaggatttgaaagagaatgagaaatgtaattatattatgttgtcaaaaacaaagcaaaaacattttttataaaaggccaaaagttgacctcagtttttcagggctgagcacattgtttttctaagctcagtgtgcgcttacatgggatcgtgttgaggccatgaacacgtcagctctctggggacagaataaccgcacagatttgcattttaagatttccctctgcctttaaaatactaaatagaatcttttaaaacaggatttgtttattttacctatatgtacatgtgcatgtatgtgtgtgtattgtgtgtgtgtgttgtgtgtgtatctgtgtgtatctgtgtgtatttgtgtgtgcgtgtgtgtctgtgtgcgcttctgaatgtatgtatatgcatcattcatgcacgtgtctttagagaccagaagtaatcagtaaattccctataactggagttccctgcaggtgtgagctgccatgggaactagatgaggctcctcttcaagagcaaaaagtgcttttaactgctgagtgattgctctagttctgtttaatcttaatataatatttattataaaggagaaaatatacctctactctgtcacttcacaaactttataaactttataaatttgtatttttattatgttcaatatttgatttttaatttgcggctcagagtgcaatctaaagaggaagaaaatattttgaaataggttaatattttaaaaaaatgttttatggttataccttgaggtctgccagatgcccaattgtaagtttaatgtaaaagatttctcagctccttccgggaagtttctttgagtagaaagcgtttattgctctgtcctttgcttttctttcccaagggcagaatctttccttgtaggtatggaatgattgcactcactatgtaggtcctgaacacgcaggcatcctcctgcttcagtctcctggatgctggattacaagtgctgtgccagcactcgtaggtatattttgatcctaaaaaaaaaaaaaaaaacaacaacaacacacacacaccaaacaaacaaacaaacaaacaaacaaaaaacaacaaaaacaacaacaacaacaaaaaaaccaaaaaccaaagtgtgctcatttaagttcattctataaacacatgcttttagggttttgtttaatttggtaaatactttgttctttctttatctttgagattctattatgattacagtctccatttccattgtctctttccaaatcttcccacatgctccttttgctctttcaaattcatggcttcttttccattaattgttacttgcatacacacatgcatacatagacatatattcatatacatccccaaatgtaaatctgttcagtctgcatagtggtacttgtatgaatggttccagtacttagcacttggtagtgtatgctttgtactgatcacttggtactgtgtgcttttccctggggaagggtgtttctctcactccttatttgcctgtagttcttgctaaatgtcttctctttcactgttatttataaataaaatataagatctcttataatgtatacatataatctgttagtaatttcacctttaaaaattctgtcacatttacatttacactaattttaccttgaataaaattagaacatctaatagttattttgaaactgataagattttcatatgtaaagtaaataaaatttacttttcaaactgagaaaatagcaaacacacacatacacacatacatgcacacacacatactcacatacacacaaacacaccacacacacatacaccccaataccctttaatttggttacaatttcatgttttcttgttttgaaataatatctaattccttttaaatgattgtatgaaattatctttatttcttcttatgcctttcaaaaacaatgaaattggatagtttattcaaactcaattcaagttaattttattctttgatgtataccgtatatttctgtatatagattaatcacaatacttggcagaaataatactttcctaccctttaaattcacatgatgtttcttagcaagctggttaatgtactggatgctaaatatgtatcttacaaatatatatttcatagacatacacacacctacatgaaatttatacttcataatttggttgattactaagcatattttgttttaaataaaaattacagatttgaaacaggcttttaaaataaagctgctcccttcttaaaataaatgttctactaaagcgcttcctgacaggaatgatttcttagcagtttattataaattcactgtattttataccataagtttaaagtctacccaagagaggatcagacactcaaataaatcctcctcatatttaattgcctaacagagttagtaagtctgcagagcattgcagtagaatattcatatagcatgtttatgtacacagcatactgataagtattttagagtaaaagctgctttgtttcctgcagggccctctttcccttcaaccccttcacagttcctataaccttgctgtgttcctaagttcgaatccttggtctatctctctgccctctcacctttctccagagagcacagagaaaccccatgatttgttatcaccattaggagtactgttcacaattttgccatccctcccgacttccacctgcatgtccgagagcttatgtgattttccacttggatgcccagttgtcactacattatctgtgtttaactgaacttaaccatgtgactcatggaggctttcagattttgcttatataattctctcagtcattagctctatcctttaaggcacatctaaggagagacccactagacacaaccccacttctgtggttcctatgacgttagtaaggaacccaagcttttgacattctcagtcttggtacagagtcctaagactctgttatatgtatgagagagatccaatgcacagaattctttatacaaatgctacttctggttttgctatactatataaaaataaatgattggggaatgtatgtgctagaccctagtgatgtgtgagaaatacatcatttgactttgtagatttaaatgtttctatggtcattacttcgtattttactgtcccccactttcctgaaaatcagcttctgtgaatgttatatcgaagcaattctaatatttgacaagtttgaataatttcttattaaggtatggcagggaatagcagtacataaaatgttattttatggaggtaagatttgttgattttgtacgatggtcaattttaagttataattaactctactaagcatttccctgaattatacaagtatgacacaataatttccctttaggttgaattctgcatagatgaagattagttatttttttattaattccttttatcacagtatggctttcttttatgcttaaagtagcatttcttcctctttttttcctattgaatccaagaaaagtttttagtgattgaaatttttctagctctgtattagtccctgcctaaccgtgtagactcttgtcaatctccgtgttccttaatcacgcacctagctggccagcacatagcttatgttagctccgtgtctcattgttttggtttacagaattactggctcttcatggtgagaaagttcacagtctaattcggatcctactgtccagaaaaatggcttcaattgtcctccaaatccagctttatgaactagtcctagaccctaactaatagccttttctattaactgctaagtgaggcagctgtctgagctgctggttgtaaatttgctcatgtctatttctctaactctgctgcaaaacgcagcagagaacaggatcacagttcccgaacctctattttcacagcccaaactgagccccaaagggctgatgggaaaagtttgaagaggtgcaaggaagcatttgttaccttgggggaaaagggatggctcttgccattaatcttaattaattgccaagaattttaaatctgagttattaatactgatgttgagcccttaatttgccattcgtgccttggtatcaagtagtgttttatgagataagaattttaggaggcagagaagtgtgtgtgtgtgtgtgtgtgtgtgtgtgtgtgtgtgtgcgtgcatacactctcatgagtgtaccttatataatttttttcatttatatctttccagtattaacttaggttaatattcaggccttcaccttttgacagttgctgtgagcatgcagaaatgatgagcaagtaacaataaacccaaataaaaactctagatacagcagaagcagtaagtctgagtaatgttactttcatggttacctgaatactaaatagctcactgatgtcagggtagatgccagattgtggggtgacagaaggctgaggatcagagctagagtaaggaagaggaaaaagacagaagaaagcagatgaagaaagaagaaatattatttctctgaacactatttaagaaatcaggacatgacaggcttgtttcgataaaagacaacaaatgatgcatttttaacttttgcagtcctgatcatatctgaagtaaataaacttattcttaaaatcccctctcccttccttctgaaacttactgttaacttttacctcttaccctttacgtttgtggcagcgttctgtgttacttttcaatgacaagttataactaacaacttatgatatttattagcatttctggctgccaaaaatggcatgtaaatcttcaagggaagatctttcaaaactagataggactatgaacttctgagataatttttcaggattgttctccatgtgtttggattaaaaaaaaaaaacagtggcaatatatatacacgaatggcaaattaagggctcaacatcagtattaataactcatatatatatatatgtaatttatggaataattgtagctctcctacatagaccttgagctgatagaagtgacttaaacttcagaagtatggtttgttctggggtgggggtaggggggcaggcattgttgatggtgaacagatttagagccacaaattggatgttgaagtagatggtattattttgcagtgttttatttctttttatgagtgctttacatagaacatagaaaaaatacagaaatgaaatattctattcattcatctcctggcttaatttatatacagtaactattgcagatgtaaaagccctctgatgccaacagtgtagatttaatttataggctctgaagagcccacaaaagtttcgaatggtcagtgatcacacactacaaaggaggttaggactctgctctcggaagcctctcagattgaggtgtgcagaggaaatggttttttctttttttcctcagcctctactgatgggttctgcattcatcagtaatcattcattatgagttagtactagcaagtaagcctgtggtactgcagctctgttggtttaagacatcagcagatgcttgtagaagacagcaagtgatataggtctttttagaacaccagtttggtttaggaactgagactattatggatccacagttgcacacgtttttttgtttttttgtttttttttttttgttttttttgtttttttttttttggtgtttagaggcctctttccttgtttcttgggaatgtttgagtgaatcactaaggctcagaatttctggattcccagctgcttgagtggctgggtggctgggtagctagtgtagagaagcaggggttgcagttcctgagggagtttatggctctttccagaggaaggatttagagccccacttcagccaggagctaagtatctatgccatctttggtttatctaatattctatctcatttttgtctcaatagtctcagcgttaagcatcatatcagtaccatttaggtatggaaataaggagatgctgatattcactacgttcttcagcgtctcactgttggaaagtagtcaggcctagactgcttaaattcaggttctttgatttctcattcaacaagtatgatgtacttccatactaattttatttgtttgtttgtttttgttttgttttgtttcagttttgttgttatcgctgtataatcctgaacttgcagcaatcctcctgcctcagccctcctaggattataagtctatgccgccccatccagttccaagctgtcattttacagaacatttggtattttgaacaactacctgaatgaggaccattctataggtggggaggtgcttttaaactttaggaatttttttttgaatttgattctcctgccaactaaatcatcattactgaggaactgcatttgtcatgcatgcagaatgcatgcatgttactctaggatatacatatatactttatttaatttgtgtgcattgattaataaaattgaatgaatcaatttgcaacccaggggcaatggattccacaggaagttcataaggtagaataaggaataattgaaccaagatggagcttagcagttgtgtgatttaatgcctttgactatagtttgacccatacttttaattcccataggagacaaagagctagtgcacacaggaagcacaagctcttttctatgtgggcacagaaaacaaggagtcgggaaggagtcttgttagaagaaggcaaaattaatgcacctctaataccatatgcaactagaaagactacttcctgggagcctggggatccgtgatttctacacggtcactgatttgtgtcagtctagcacaagtttctaatccggctgtcccttggggttttcatttgtgtagagtctgaaaagatcacacacacacacacacacacacacacacacaccacataaatatatgcgcacatacgcacacatacacctctcttttggatgtggatgtgaacttgccttcttattttatattttaatatgaaaactaaacaagacaactctatgcaaaggaccttgtcctgttttgctcctggtggggatccctggaccctattcatcacctctcagaaaggaagcttttaagagaatttatattggcaaaaatgtagtttgctatcaaagtagcacatatttactcatagtaataaaaattttcctaggctatccatggttagaaaaaaataaacatttttccataacatataagcctgaaaaatggcatgcgctccccataatatgcagaaatctgctaagtgactctcacaaagccacaattctagctccatggtggcctttatgtgccactgttaggctttaagataaattgaaaatagctacatatggaaggaagttaaggggatgaagatttaagagacccatatagctaattgtaagctaacgttctatttttataacatcgctccttcttcatgattttcctaaaaaaaaaaacacccttaatatgtgatattggattattatcacagtcatttgataggttgtgatttgctactgtgtgtctgaaaaacacaagctttccctttatgtaatagttgttcacaaaagggcactaacatgtccctgtcattaaatatatatagatacatggagctactctcccgttgggtcacactaaaattgatttttccaagcagggctaacaatactagacaaatgttaaatgaaaatcaatcactgtgatttaaattagataaatacactccttttattaagtggtctttccccatacagctaactggatgacagataacattcattgcagagtttgacctctaggcccaggtttcaataaagctctaaggagaacggcttgcttgtgattttattctttatcatgcttaccttactcttgatcaattagatgaaacatgttttttttttagattgtttataagttgaaaaatactaattaactatatttccctaggcacttaatattaaatacatgtaatgcttcattaagaataggacactaggctagttttatcagggcaaaactttagttttaaacaagtaaacaatctaaaatccagaagttaccatgacattaagtgcagtgagtgataatcatatttatgtagaggcactgtgaaagcagagttcagaggtcaaaacctgaagaaagcactcaggaagtccaaggacacgttctaaggacattaacaaacacagccatcgtgactattgtcactgtcaatgccaagaataaaggaagtcaatcttaggagtttggtgtgccagacagacactcttctagggaccttacatatattaattcttaaaaacaactcattgtgaaggatcttatccctattttaaagctaaaacagccaaggcagaggaaagtcaggtgagttaccaaagtcttgccaatgggtgaaatgagtgaattggacttcacatgggttgtaaaatgtaaaaaaaaaaaaaaaaaaaaaaaaaaaaaaaaaggaataaatttttatttatactttaaaatttattgattgcctatacataaatgaccagtggttttgaacccagtggcttgcttcctggtattggcccatggattcaattggaagagtatagtgaagtgaaatttaacaattaacaaatgaagggtaggtagcagtgaactgtttcaataaagtaggatgccccaccaccaaatatgagacatttgaagcagaaactctgagtgtcttaatatgttactcagctgtaaatatttgggtaaaaatattaattgtagactttggaattacctatggatatcataaaggggccaggaataacgataaggcctatgtacttacttctttaaaaggaatagaatatagtaaaagaaaaggttactcttaatatggaactatcaaaatagatgatttgttcccaatctagaactgcagaggaagaaggaagaactccacttgaaggtttggctttccatcccagttatagttttcaaatagcaaagctctcgttctcacttataggaaaatcataagtttccgtttggatattgattagtgccatcatataacttaccacttgtgattctttcttgaaatctgcttgtcagagtatttccccatcatctgagacctcagttaaatttatattgagtttgtagcttatttgcaaggccattctttctacaaacgtgggctctcattttgacctatggcataactgactgcacccgtcaaaggtaactccttatctgtctgatagtggcatgcccaccatcctcctacatcctacaaagctctaagtctgagatggttactaaaatgtcctttcattttcatgaaaattgaggcaagcatactgtcagtttctcttttaaagatgtatgtaggagttcatgcttaaacataggaattctggcctcctcgtgggaggttcattggtacacagcaagtgcagagccctgcagtgagcaggctgcctcatgtttctcatagtccatgggtggccaaggatacccactaatggtattcttccagaaccagtgttgttaagcacacactttgaaagattttcatggcatggtgtggtaatgctattaattattgatgctattaattttgctaagaaaatgcctttgtactgacttgcagaaaacagagaattcccttgcttcaaggatgccattcttggtatatcttgcatagacacaattgtattagtttatccaaagcaatgataagactattcaatcatagacataagaaaaagatttatgacaggcatggtggctcattcctgtaatcccagaactaaggaggcggaggtagaaggatcgtcttgggttcatggtctggttggattactcgaagattactcaatgcttaagagcactggctgctcttgcacaggacctgggttctctcagcacccacatggcagctcacaatccatagctgtctggaactttagttccagggaatctaacacttttttcctggtctttctgggcaccaggcatttaagtgctgtacatatgcacacacaggcagacatctctccatgaaaaaaaaaaaaagacagaagaaaagaaaaatatgtaatttacatcttaaaaactcaagttatttatagtaagtactttttttttcttttcacttacataatctgctattttgtttctttctctagttctcttcatattacttttgagagtaaacctgaagctcaccaacttaacaaggctagctgtccagaaagtgcaggaaccacccaattgcctccccaggtctggagtaatggagagaccttccatctccctccctagctccggggtgatggaggaacctcccatctgccttcttagcactgcgatgatggaaggacctcctgtctcccagtgcctgggtgatggaaagatctcccatctgcctcccctgcgctggggtgatggagggagcaccaatctgcctccccagcactggagatggagcgtgcaccacttggctctgctctgcttcttatgaagacatgtggggctaaaactcaggactgtaagcctgtgtagaaaccactttaccacctgagatgccttcccagccagggctagaagttcatttggtttggtttgtttgtttgttttattttagtgtaatggaaacagtaaggtttactaacagaaagcaatctaggtctcgccttggccatctttcccaggaaagagcttggtttaggagaggatggaaatttgtttcacacctggctgctccttattccttctctcaccagagcctcatgaggtgtaggttagaaatgacccaacagccagcaggtggcaaaggctaccatcagcctgccccacatagcaaagctttcctttatatgcttataattcaccaaggagcagtcttgaggcatcgaggatgctgattgtctgtgtctgtgcacagcatctgccatttatatttttaggatacactgtacttttccagggagtaccctctaaggattgtcgtagacactgacaaccagctgacctcagtcagtgacagctactgcagttgaatccagctcttgtcaccatcgatgacttccatcggacactgtatcccggccatctttgcttagtggacacatatgttcattagagtaactcctgcctctcaccatctccttaatagatagctcctacgtgttgcagacatgtaactgtcgtggaacaatgcaccacgcccatgtgatttgctcttctcctgctgcttatgagcagtcctgtctgctctcttgtctcctttctcacgacgttgaaatacatttcacagctaaattgatgaattttcattatgccactcctcagtttcaaaggagatgatcttccttagtttcaaagtcatagcctgacatttattaaggagtaatattttctgaacataaagcatggccagtggatttgagtctctcttttttttttgtcctgctataacatcctggagagctagaggagaaatcagagaaccagcagtagtgctgacacaggagatcctgactgtaaatcacccgcagaaccttaacgtctatatccaacctttgctctaagccaaccgtctccctttcatctcctttcttcttctgccttatcactccacctctcccttcatcacttctcttccactcaactgagctgctgaagtggaagtggaagagatctccttggtggttttaaactttaaatctagagttgtcatgatagtgtgtgttattgaatgcattgatcagttcctttgctacagatattggcatctgatacatctgactgttttatttttgttggttttttattattatttttattaggtattttcttcatttacatttccaatgctaccccaaaaagtcccccataccttcccccccacactcccctacctacccactcccacttcttggccctggcgttcccctgtactgaggcatataaagtttgcaagaccaatgggcctctctttccactgatggctgactaggccatcttctgatacatatgcagctagagacacgagctccagggggtactggttagttcatattgttgttccacctatagggttgcagatccctttagctccttgggtactttctcttgctcctccattgggggccctgtgatccatccaatagctgactgtgagcatccacttctgtgtttgctaggccctggcatagcctcacaagggaccctgatatagacatctgactattttgagttttgcctaagaccctttttgttgatatctgttatggttcctcctttcccggcttaggagacttatctaaacttaaaaaaaacaaactaacaaacaaacatatagttagttcgtgtgtgtgcatgtgcgtgcatgcctgtgtgggtgtgagtgtgagtgtatgtgcgcatatgtgctcctcccacattcccaagtgccacagtgtgaatggggagggcagaagacaacatttcagagttagctctctccttcagccccgtgggctctagggatggttgtcaggcgtggcagcaggcacatttgacctctgaaccatcttacaggctccaggacagcaaatccaaagtgaacttttgaattttttttttttttggtgtcttaacctgacactttaagaaaaccaagtgtgatgcctgaagtttagaacagcgtggtttttgaatgtgccgtggttcaccctagctttatcgtcagaagcacagagtcaaacgctgccttcctgatttactggtgattggcctggggcaacatagatctttgttttagaacagactttgtcaactgaagctccatcatctttgaaccccagaagagaggcaatgttctaagagattcttcttggttttctcagagatgccacacggccagtccaaggcctgcttgagagggtggtttctatgcagaccacacatctttgagcatccagtcttcatgctctcaggaacctggcttagacaggctgatggggacaaatttaattttctaccatattctttctaccactacttttttctcataaattgaaaaaaagattcagtcttacaatatagaaacaaatgcagagaagtggtattttcttattttttaattcccccattagtatcaaatgacaaggtgtttcctatgaagctaaaattattttctcaaatgcctattttctataagaacttttttttgtattcataatgaatagggcagagctattttaacttagactgactcctaactgtatttgtgaaattaagctcctggctacattatgcttggggagagagtctttttctgagttttggagtatctgcaggcaaggtttttgaaagccgatcctggttattgtgcatgcctggacattccccttaaattgtatcctcactcagaaatgaccttgttaggtgaggaggaatggcaagagagacacgccgtgcctcatgagagccaagtggagccatgcgtatcaggagcagacactaacgatttattgtctgtggcaaaggaaacacagctctcggcccgtgcggtaagtgtttctgacaccacccgtagcaaaggatgatggaagctgtgggctagaaaacgttctgctaggcataataataaacactcttgtttggttttgtatataataagtgcgtcttaatgtttagtctttgtaacactttaagcggagatgatgacataccaaatctttattacttagggaaccaaccgtgctacccagttgactagcagggtaatcctattgggctaaagtttatgaatagatctggcctatttctaagagaaggtagaaatatacagaggagtgtaactttcttccagtctcatactttacttataaaaactttctttccttcttcataggaactagtttaaaggaaaaaaaaaactgtggatgatttagccacaatatggagaagggaaggtggttataatgcaagaactgcaaatctggggcagctacacagagaatcttagaacagctctatcacactgggaagtgcagactctgttagctgttttagtggggtttgtatttgcttctgtctagaagcagccaatagcttatacaccagacagactcaaagtaatttgcaagatgatctccatggacacttgggtaagaaaaaaatgaaacattgtgacttttgttttctgttgtatgcagacactaaaggtttagaatataaaatataaacactatcacactatggtatctttctttttctgtcttcgggtggtagtagtcaccataatcgaatgcaggcctccactgaggggaaaataaacaaatgtatagaggcctgtttttactcataacctaatccaccatgtacttacctattttagtaagttggatacttcattagcaatatgaggaaactaagtgtcctatgatttcaacaagagcaaaattagtagatttaaggtagtgtcttgttgcaagccattggttctcatgacacctttggggatcaaatgaccttttcacaagagtcccatatcaaagatcctgcatatcagatattcataactagcaaaattacagttatgaagtagcaatgaaaataattttatggttgggggcgtcaccacaacatgaggaattttctaaaagtcttgcagcattgggaaggttaagggccactgtaataggcctatggccaggttaaaacaatctgctccgctatgttgctatacctggtttccaatcctgattctattacctcggttctataggcaaattcccaatctcccccaagtttattttcttctttgtaattcttgaaatgagatttaaaaaaatatatactagcagttatctcagagggttgctgggagattgactgaagtgggcaaggttgtactgctgtaactcaagctcagaaagctttaaataaatactttatacttttactaacaaacttttattatgtttatttccgttcccttcaaacttggcatctctgtttctcagcttcacacctcacggtttgtattttccactctggaagtgtttattcatttagacctcacctttattctttccctcttttcaaaccatcttaacatatgctgggaacatatctagggtctgaatttatgtatagagcagctatgttaatgtacagcatacacatttgtgtaggccaatcaagtttgatgtagggtctgttggttcagcccagctcctttggactgcataggatgtcttcattcattttcatcgcatcataggtgagacacctaaatgtactggaagaagatgccagatggacacaagaaaccccagcagctggaatactgaattatgtaacaacaacaacaaaaatatatcttggtcctatcctacaccgaggatttcaaattaggggatgatgtgtttataaagacagaaaacctaaaattgtcttcccagctttattttgtgttatatcaatacccagcttcactttttgttgaggactaaatgagttaagacactcgactcactgtgagcattgccagacctggaataaacacgctcagtgattgtagccatgttagcctttggggctgatacacaggcagagaaagcagatgctgactcaagactctggaagctggaatgatgcgaattttgaggcatgagctttccccatactcgagttaaatattgctatctaatgatgcgttgtgagagtatcctcctaaaagtggaatatacacactggtcatattttgtgcaatgcttagtgtactgagtggtcttctgtcaggcagcagatctccatagatctcccttcattagtacctgcagtgggcagctcttcttgggtgtggcatgaaggggaaggcttttgctcctggccaagcttgctctggtgtcaaagaaactgtttgcagtaaatagcttgaaatgaagacgagattaaacaaacatgctttaaatcaacacatgtctgtttctaatatatttctacttgattatttattggaatatgcaagaatacaatgttgtgaaatcactgaatggctgagagtataatttctaattcaatttcttcatcttgctgttggcagttgttcctcgggctctggggatgaaacattgaactataaccgagaatcagaagggcagaaggatctgccagcagtggtggacatgcttaatgtatttaaaggattaatgggctattcaaattaaaacccccaacaacagtgtgcaatgctagctctctaatgcatgcatggcaaccacatgggctgcagcactagcccttgccttacttatgtattgcagggggcacaatagagataggattttttcttagatcttgaaggctgaaaatgcactttggattatcccacaaattagaaatgtacatgtagtacaagatttcatgtttctattcttacctcaagtagtataatatatatggtttgtgtgtgtgtgcatgtgtgtgtgtgcatgtgtgtatgtatggttccagagtagaatatagtaaatatatatatatatgaacatttttctcctactacagcagttttaaatggtctcatgatttaatggtttttaatgagggcagcagtagcaattatttctatatgtaatgcaatatattagcctctccagatagcaaagtagcagttcttaaggtaatatatgacttttccagtattatttaatttttcctgtatggccagcattagtaattgagagtgtgatgtgaaaatgcaccagcactctggatacattcctcaggcgggaaccctatagccctttctctcccttcctttagtcagtgctctgcagttcataaacatattctctggtgctgtgtttctcaacattcctgctgccacaaccctttaagacagctcctcatgctgtgttgagacccagccatgagattatttcattgctacatgtaaccataattttactactgggatgaatcaaaatgaacatatctgatgtacaggatatctgatatgtgactccaaaggaattgcagcccacaggttgaaaactactgctctagaggtttctgtgttgtaaaccctatgggtagcaacctctggcaagatctacctagggcagaaacaagtctatctagaatcatcaagagaacctgctgactcaggccattcgctagtcttgtgacagtggctgtctaaatacgaaggtctacagtcatacccacgatgagtcatttgggatgaatgaatagatgaaaagaggaaccagacctcaaaatagtatttgttgattttagcttacaaccaatgcattatggggtaccactacatgattaaaagcaaacaaaaacaaaaacaagacaaaactgacacctcagtgtttagtactaactggaactcagcctgcgctttatcacactcgttgttacttaacaacaaagaacatttcatagtctctttatttctagtaacaaacattaaaataaaaaaatgtattccagtgattggatgatcaaattcttccctttaagtacttgcacctagcaccatccagtagtttgaaaaagtaataaacataattagatcttacctatatttgatactgggtagaaaagtctgtagatttataaagactgttacttttcatggtgttaataactggcaagagcttaaagtgaattcgcctaaggttgtacaatgatcttaagtcaactgcttttgaattattctctgtgttacttttttccttcatctgatgttttaggcttgcattctttgcccagtcgttaaattttaactatttcactaatgacttccatcaacagttatatgtgaaggttttatggcaaaataaattatcttcgaaggaaaagaaggtcttatagaattaggtaggaaccatgacgacattatggtagtgtctttatctttgggcagtcaggttcagaatcacttgtgggcaacaactaagctgagtgctgtggtatcgccactactttcagtgctggttgtgaacgggcagtgatcatgttaacagtggccacaacctgatgacagaggtctaaaataagactgttacatatcacctaaaaatcaatcggcatagagaatagttgagtcccataaaaagccactgtgcctaagtagctatgtcatttgtggcacacaggtattttttgagaataaagtagacgtttattccatataattttagttcagatgtagagaagaaagagaaggtaataatgaatacattgcaagttacacactgtttgaaaaggtactggaactgatgaagttgcaaaagcaatccaggaagctcaggcaggacgtcatcacacatagtaaaagtacagaagaacctacagaaggaggcatcaactggtgcgagggtaaaggagacacactcaggtggagaggtgcttacattgaaggcctctgctgtgcagtaaccgaaggtcagaggatcattgcttattgacttcaatttgccaatagaaaatatattctaattatcctcaagcagcatatatattttttaataatagcagagaaatagaagttagctgtttatcatgacatatttgtagtgaaataattttaaagtgtgggcttcagatagaaggaaagcagaatattcgagaattggtaaattgcacagaagatggccaacacaagagtgaacgcaagacaaggaggctttgctaaataatattctcaatgagtccagcatctttattttataaatgtaggcaatgatgtaaggaaatctgactcattttctcagcattatataatcattgactagcagggagagatttatagttaagaatagagacttgtatatataccctgtgatcaagtctctgcatgtctaaattaaggactaaatgaatggactaattgaaaatataaaatccatttgagagaaccagtaagcaaaagattatcagagaaaccattaggatctgagattcaaagacccagcaccgaactacctaggtgagagaactggtgtaagtaagtcttttaatatttctgaccctagcttcatttctgcaacatgggggaattgaataatatctgtgtcctgtgctgaagttattgtaaagagaaactgcagaatggcttcaggagcagacagaacaaataacagtagctcaaaccttctatgtgctgaatgcatgtgaccttcccagttcagagttggaaattttctttcccagctaatggtattaagaggtgggctctttatggaagttctgtgggacaaagatggagccttcattaatgaggtcaacaattctgtggaggaggatccataggcttggcttcttctgccaaataaatatgcatcaaaaagaaaaaaaatgaggatggccttgttggtcatcaatgggaagagaggcccttggtcctgggaaggctggatgtcccagtgtaggggaatgctagagtggggaggcaggagtgggtgggtgggtgaatatcctcatagaagcagggggagggaggatgggagagagagtttctagaggggaaactgggaaagggaataaaatttgaaatgtaaataaataaaatatctaataaaaaataaatcagaaaccttttagcatccatcaaatcttctgacaccatgaaccctgattgcccacctccatgatgttgaggagtaaattctctaatttatagatacacagtaactggtcttttgtgatagctacctcaaggggcttagacacagtgtttctcctactcatcattcaccacacatgggcactggaagagccagataggaaaggctggtaccatgggcaagagcagcaaccctctgcaaagaaacgactctctgtttctcttctcataggtgtctgcctaagtatctatctatctatctatctatctatctatctatctatcatctatctatctatctatctatctatctatctatctatctatctatctatttttacttattcacgttacaccccactcactagtccctttctggtcaccccttcccacaatccttcccctatgccccccccccccttctcctctgaacaggtggggacctcctgggtatccctctaccctggtacatcaagtctgtgaggctaggcacacatttaacatggatgatggaaatgtctgatacactgcaattcaaccctgtgttcccaccaagctagagcgtgaggggttttgttctggtggcgaaattgctacttttgcttttttgctcactccatacacctccccttctctcctcaacctgttctcatgcctctgcttttctctcttctctctctctctcttctctctctctatttttcttttaaaaaaacaaaacagattcataaaaatgtcaagctttccctgttataacttaagaggtgtgctgcatacacatctaaattttcattactacttatttctgtcttagtagaatgaagaggtgaattcttccaaagtaggattttttttttacagaggagtgtgcgtctttcaggaaggggctgctgaacagatgtttcttcttttttttcttttcttttttttttttttcagcttcacttccgcagccttttccagtttcagctctcccatctactttgatgtttcctttgaaaataagtttatgtatcaaagtatttcaagtgtgttgagaggacacagtagtgtaacacatggcatttcagtgttcactcttcatgggcgttgagtatcacatgcatttccacgcttacccgagtaaccttgtgaggtgggcgcacactcttccacgtcgtataaatgaaggctaggtggagaagagagatatggttttacagagaagctatatcattgattactcttgtcatcatattccaaagtgtaggcagtcatccatgcatattggtcccatagcttcttttactctttccgtgtggaaagtttaataataaaatgcagcttttttgtttgtttgttcatttttttgagaaaaatacctcaaaactacaaatttgattccataacattatgcttcaaaaataaggagtgtgaggggaatctggtaagaaggattggtgggtaaaggggctgtctgctaaacccaagggtctgtgtttgatctgccaccacgtggcacagggagagaagtggcccctgcaagttgtcctctgacctcccaaggtgcactgtcacattaacgtacatgcaattactcatgcacaaaaggaatatgaggggaaacgtaacataaccattggctatgtgttgtatgtgtgttccctgtgtagtatatggcaaacaccttttcttttacttattagaaaataacaatgttttaaaggggaaattataagtgtcagaacgagtaagacaaaaaaatatcctctaccaatctacaaagaattaaataattatcatatttttttctctcaggctattttaaaaatctgctttagactatgctacatgaataccaatttcgtttctgtttgtgaactgtatgattgcagcatagtacacacacacacacacacacacacacacacacacacacacacaggtttcacagtgaattccatcacaatatgcataactaaatggaataaaaacaaagtatacttttttatttattttacaaggcatttgcaaccaccatgttgcatttactaagcatgtctgtgattgttcttttgtctgtactctgaatattttatatttttttcatattagggatgggatctttatatacaaagcagcaattttttaaggcttccttcttatttaaggtttcctttccaccaattcagctattggaagtcaactgtactcttcaagtattaaatggaggccttcaggaggaaacatttaaatgttgaatttcctaacttttctgagggatgatatcatgggtgttgctgtgtctgccacggacggacatgcaccattcttctgtgcagtggatccacaccgtatatgcgacctccctgttcctcagctggcatgccatcagattggcaaccactgtgcttgtggtcagttgaccttattttatgtgatgatggccctagggcacaagtgaaagtctctaaggtgctttttaaaattgaaaatgttcgagttcttctcttcaggaagggcagttgtatgccagggatgctaaggtctgccatcaaaatgacccttctgtccactaactgctgagatagaaataaatcattgttatttctgccgcgatactgcagaggcagagtagtcaacatactcctgagcgtacggtgctgcttagacaagatggaaacacatcctctgtgtgcatacacacaggaaaacgttagcaccttattgttcagtgccactcatggctagacgctggtggccatttagaacttggccatttcacattcgaggtaaagatttgagagtaaaactcatgggtttacaacgaaatgaaagcgaaatctctttttttttttttcaagccacatagatcacttttatccagttaaagctaatgagggcattatagttaattgtcctggaaagtcttcctgcactgctgttctgttcttaccctccctgtcctttctcctccccacccccacccagctctatacatcacctgtcttcctagtttcccagactaggtattctgctgaatttatctccctatgtatgtatgtatgtatgtatgtatgtatgtatgtatgtatttatttatttttgcagcagtcttcaagaacagggaaaagcaagactcttaaacaaatttagccctgttattcttttgcttgtatttaacatttaacaaaatataaatgttaaaggtatggttgcattttcctagacaatggatagctggtgggaattccatgcttagagaagaggagagagagagggcaagagagagagaataagacaaagagtgaactaagtatccttgtccttggtttgcaatagtttcccgtgagtatccaaatgatgctaaataagagtatgagtttcttcattttttgatttcatttaatatgtatccactgtatgatttattacaaaggagtggaggaattaatgaacaagattcacattgaatttttcttcttatggatttaattgctagctcataaggcagacagtaggtaaatattcaaaattagtatgagacattgccccatgaatgaggatattcgtgaaggtaactgaaggagttatactctgacatgtccataggtaaactataacagtctcagtgagtactatgaagaaaaaaacaactcaatatatggatgtgttcagacaatagcaaagatcatagtatctttatttaatggtttttcttattagcacatgcccacttgtaagacagctactatacaaactgaggcaggaggaatgtgtctgtgtgctttgtgtgtgcaccttggtatttctaaggatatatcctttctgtaaatgagtgcacttgtggcacatacatgagatatgctcatctccttgagactttctagtgctgctctgggaacaaacagtgagccctcactgtcgcggcgttaaccttgccaatcacagacttcctgtaagtgcactgcagttacttggaaccttttatggcttggcgttggcgttcttttgctagattacatttatgcattagtaccatctgtgcctgctgcaccttctgtgagttagccctgtccaaatgactggcatttatctggaaacagaggggagagaaagagagagagagagagagagagagagagagagagagagagagagagagagagagagagagagagagagactgtcagcataagcgaaatttggtgagggagacatatagagccatctctattgattcattgtctcttggaaaatcaaatataataattatttttttagcctctgaaatgcaaaagaagttacaaccagtatttaaataagggaatacaacaaagcacacattttgctaggttttcaagtcgagagaagttatatgcagtttgaatacgagggtgcttctcatgtgatagtgaatatacataatacgggttttggtgtggctgagcagatatggtagatactcgaactgagttctattttgatcaatgtgttgaagtgtagacttaatttcacaattttatttaggaaacgatagctctatattcgacatataaatcagattgctgaattattccatagactctctccaagacattattattttaagccatatggtattgccacagttctcatacctccaacacaccctaagctgtgagtggaaatagatgaatcgtttttctcatcagtaaaaatagatgccgaaaagtttcagctcatttacgccgtttatttttaaattgtgcctattttcggatgcttgatcatctggtttccattcttggggcagttcagaggtggtgaactagggtcagagggggcccctaggggaagataaaacacagtgaagagaggtggcagcctcagaaagaggagggaaggagcagacagagaggggactcagaaaagcactatagaaacagctccctgaggacactcctgagccctagagaacaggaaccattggttctagcagttacagccacttgagcacaaggaccattcacacagctcaatctaggaagattaacatgcgaatatgttcttcagaagactcaacaccaaatggagatcatataaaatcttagggcgtaatgagcataactattccacgtgctaccctgtgttacactataggctcaaagagaaattcagactgagtctcaccacagagcactgcctggccgagaactcacatatagacaaggttagactcaaacatgtatcaatccccctgcagctgtctctcccaatgctgagatgacagaaatgtatcacactgcccaccctcaaattttactctcaaatgacgcttgccactggcagttccaatttactattctctggatattcagcatcgttggcgtggaaaaaatcttgatggcagttcctctgttagcttaaggagaagaggccccatagaatcgctcgaagatcctggcccatcatggtgttgatgggaagttagtggttgcagctacatcataaacagctaagcacagcagtactcattcaatcacaagtgctgggctcttcactgattgtttttcctgatggcctagtctatgagcctggttgtgttcaccttcatttgccagatggttggcaacagcaaaagccctcgaatcttctactcactgactgggggcaggcgtaggatgggcaggaaaccagccttccaccccctcctctctcaactgttagggtaagtgctttagtttcaatcatggattttgtagctattatgcagaataaatagttttccaactccattaagcatcctatttaaatcaagtcagtaatatttctaccatattattcttagtagacttgtaaactggtatgcattttcttgaatatttgcattgtgaaaacacatattaaacattagtatgtacatgccatcaacagttttgttacatgatagggaatcaactgcatgataaataaaacaaacatggtcatatttataaataatcatataataatttgtaattgaaggtcatcatattttaaaaagttaattggggagttaattttttaaaaaagttttatttttttacagccaaagtctcagtaactatagagaaattaattcttttgattcaattttttattatattcataacaatatgttttgctttgataatttgaaaaaatatattttttcattgcactgtcttatgctttctcccctgttgaaccctttcttcacctgtatatcttaaattcatttcatcgctgaattctataatcacatttcagttacttaaaaatgatatatatatatgtatatataataacaatattttattttgttaaattgtacattacacaaaagttattatgctactcattttaaaatgtaccatttggtagcatcaaatccattcatattttacagccatgacttttatacattcccagaagttttatcattagcacaaccaaaatttcatacctgccaaagaacagtccttcaccttctgcacggccccagtagccactgtgtcatctctccttgtgtgtgtagcagttttatgtttacccatgtgtggcatccctcttctatgattggttatttcagtggtatgacttgttctaagtgcaaccatgttatagcatggaatgttagaattttattcccttttcttgaagttaaagttttatctttttgaagttcatacacacataactatatttatatcatatcattatagccttattattattgttactgtcacacacacacacacacacacacatgcacatggtgggctcacttaatgtttcaccaatgtgatcaagattagatgcttgggtttggacaaaataacaggaggctcatcccttggagatgactttctagaaggcagcagatatcctggtcttcctgctctttccaaaccccatcttccctggtgtcaggtataggagttgtctgtatcatgggtctataatttggggttggctgttattctttgaattttgaccattatggatgtctgtggtagtctctagttgttgcaaaggaaactctgttgatgtgaggtgagagccacatttatctctccatgtaagtaaggataagtatatagaatgcacctgcacggagaaattttattggccggggaaggtgggagtcgtagactcgtgttttggaggatgaatagaatagtacactctatccatagatctaactttaaaactgattgatccctgaatagacactcctgttctgctcgtttattttctgcttcttgtgaataatggatgtaggatttcttggtccccggtcctttagagccacatcagaaagagcatttctggttcactctgcatttctgtggttatttttccggatacttccagaaagaccacatacatttttatttcctattagccacttacacggatttgaattttctatatccactccaaactgctatttcttcatttttaaaaatgatgatagccatcccaaagggtgaatgattggataatgatagtttttttaagcttctatttcttccttactttttaatttataaataatttatagttcttattttaatatatttgttatatatgtgattaaaatgatttatatataataaaataactactaaaatcaaacacatattcaccctcttctatagcaaactttctttctttctttctttctttctttctttctttctttctttcttgctttttttttcttggtttttcgagacagggtttttctgtatagccctggctcactttgtagaccaggctggcctcgaactcagaaattcacctgcctctggctcccaagtgctgggattaaaggcgtgcaccaccacgcctggctgcaaactttcttttttattgttttttatttatttacatttcagatgttctctcccttccctgtctcccctccaacccccccatcctatcccccctccttttgcctctaaaagagtgctccttcactcacccacccacttccccttcgctggggcatcaagcctccacaggaccaaggacctctcctcccattgaagccggacaaggcaatcctctgctacatatgcagcaggagccatgggtccctccatgtgtactctttggttagtggtttagtccctgggagcgctggagggtctggttggttgatattgttgttcctcctatttcttcatatgtgtgtgggggagggcggcagcaccaaacatatttttagctcatatcttgcaggtaatgtagtattactagttacaacctccacactgtatgtcttgaaacacctttttaagtgagaatttgtatccttcaacctactttatcatttccctctgcctttctgtccttcagcattcattgcttgccatcacctaattgctctgtctgacttttaagaaaatattttgtttctgagtgtgatcatcttgtccttatctttctgtgttcagcttctgtgactttgcccaatgtcatcctgattcaattatgttgttttgtttgtttgtttgttttttaatttctcccccacacctctccctcttgctccagccccacttgctctggcccataggtttgtttgtttgtttgtttgtttgtttgttttgtttctcattacagatggttgtaagccaccatgtggttgctggaatttgaactcatttgagcagtcagtgctcttaaccgctgagccatctcaccagccagcttttttccccccagtgcccccaattatgttgtatatgaccaaatattctttttaaatgatgaataacatcttttgtatataccacatatatttttttcttttcctttaaaattatgttcattttaaagaaataagttgtataaaaatgtttttcttactttttttttttaagtctactagtagacacaggttgcttctgtactttggttactgtgaatatttctgccagtatttctgtacacacaagagtgctgtttttcccctcccaggcatttggactggcatgggatacaaatacaaaggctttatgttgggtgagatagaataacttcacaacagattttctatagaagaaatgtaatcggacatcttagttcatttaaaaatatctatagacgtgctatgtgcagctgtctcgtttgatgaagctgatgtatttttgcaatgaaatagatactttagcttgcaactctttaacagagctttataaatcctcctttcccttttcagcttgaagccagaactcatcctttgcgtcagtgtggcaatttctcctcttcctgacttgttagcacacatgaccttctgcctgtgttgttgacatgtagtttgtgagaaggtggggccaaaactgagagctcttgagattgagttgggtatattagaaatgtgatatagaaaattgttttgtgtaggtagaggtggttggcttgttctattttgataaaataaaacttcttgctaacccattaactaaaacccttaaaactgtaacagagacatgagactggttaggttgtctatgcttaaggtgctgtatgcaatttctcatctataaatatttgttacttaactgagttgtatagcaatcagcattgatctcataatcttgatagttggtacagccattgttttaaatattaatttttaacctctccaaattaaaaaaacagtaggacatttatttaaggcacctactacctaagcccatttgctcttagacataaattgtctcttcccatacaaatgcagagcaataagagaaaaaaactccttccaaaagtctctttgtctggagaattgggaaatgatgctgaattgtatgctagacttcggctccgaggggctttcctgttcatagacactacctgatccaactgccaggcagacgtagtagttacccgatgctgcctgccagctgcagcagctactcacagactggtttagatgtgtcctttattgctgatcagtgaaagctgatcttagccatatatgcaaagctctgatataatccctttgactgtggaggtgaggttcacgtcccccaaagactgggatgttacctatagacgttgtgagtccctgggggatggtaagattatagaaaaccattgtgcttccattggtgtctagttttcttgatacacatgattcgagatcactataaaagcaataggtttgcatggtgttatcttttaaaccaatatttgtgcctggaattcagatttgctttttcttatttccatatgctctgttttaaacatatgttaagatgttatttaaaactagaagcactgaaaaaaaacccacataaaatatgttttcttcattatccgaggcttcggtgccatcatcgtttggagtgggaacgagaatgttaagttatgtctgtaaaacagatttcaacagcaccaaatagaatgcacagctggctgtcattctcccaggtgcactggtgttctcggaagagactgtttgaaaatgcggatataattggccattcttggggggtgccaacgccataatgttcactgagtgctttccaagttccaaagattagtgttgattttgctggaaaaaatgtgattaaaaaaacatacattccacatttcaatctaaaacctacactgttgctgttgggtttccatataggtaccattcaaataaaaggatactgtcatttcacagcctttctgtctgtcgtggcaggctgtttggtggtatatggcccctcagcaacagctttacagttacattgtaagactacatgatatttaatacctgatttatttgcttcagtcatcaaaggggtattttcaagtgacaagttgtgtgtgtacatgtgtgtgtgtatgtgtgtacatttgcatatctgttgagaccataggtagatcttgaagtgtctttcctcaagaaccatgagtattaaaatgagactgggtttctcactagcttggggctcacaaatgaggctgggatagttgaatagtgaatggccctgaaccacctgtgtcttcctccctaggactgtgatcataaatgcataccacaaggccaggcttttgtttttatgtggattcttgggctcaaactcagattcttttcctcgtgcaaacactatacaaactgtgtcacacccccaaattctttacatgataaggctttgaagttcaatccacggagcacaaactttacaaacattagaatttatatcatcaccatcctttattgaagttacagctttctcatctttcgtgttcccaactccagagcatgcctgtgttctgttcttgctatagactactacttactttagtctttcacctcaggaagaatagtgccattaatgaaacacagatgactttcctcattcactgttaacaaggaatggtaattaaagttagtttattaagtttcattactaatttttaattaattgtgtatatgtgtgcgtgcatgcatatgtgcctgctctgagtgtatttgtgtataccaggtgtgtgggaggctgtggcattaagaagaggcatgcaaccacctgtaactgtagtttcaggtggttttgagctaccatgtgggtgctgggaacagagcctgagtcctatgcaagagtagtaggtgcctcgatctattaacccatctctccagctccaggtttcattattttaagaatatttgtgttatttttttaatccaaaattaacaaatgtttataagtttttaaaaattactgccaactttgagcactttttaaaaacactggtttcagaaaaaaatctgtaccaagtgttctacattctcattttcatatttaatgacatgaatgagaaatccctgatttggtttggttgctggaattttcacaacatatgcggcagggctatgcttcttgtgtgaaggagcatctttcaaagactgattaaataacatggacagagaggggaataaatgctcatgttaactgcacccatttaagcctctgcatcctgctgtgaacagtggcggggctgttcctcccttgcccaggtagggtgtatgtggaattaagaattgctgtgtaactggcatatctacttccctccattgtctctgtctgctggtggcttccaccatgaaacagacccaacctcctgccatctgctgtgtgttcaggactgacatcaaggtcagcttctctaggatgcctgctgttgcccggtttagaacgtttccagcccgcgatctgtccacttctctgctgtgtcagttgctgggctgcatttgaaaatccatatgacaaaggaaagcaggaggactcttgcccaaggggtggtggtagctactgattaattacaaggcaagttagtgggcagtggcatgtaggtctgtagacatgatgttaggcaagccaaccactgcgttttgctttataggtcactaatcagtgtgttgttaaactgaagtttcaatatccctactaaaaaaatcatttataggagtcagagaatattgcctatatagtttaaatttcaaaactgattcaatatttctttttccttttaatttttagaaatatatatatatacatatatatatatatatttacttacatttttgtttattgagattgggtctgtctgtgtagcccttgctgtcctagaactcacagaactcactatgtagactaggctgtctgagaactcacagagatccacctgcctctgcctctagagtgctgagatcaaaagtgtgtatcaccatgccagtctgtgattgtacacttcagcaataactcattcatctggtattttatcagttgtactgtaggatgatctctgaattagtatttacaagacagtaatgagaacaaaccaaaacaaaaatatacaaacaaacagaatgaaactggggaaaaatgtcacgaggtttgtagtatatgaaacagaatgatgggctggaaacaaattcccaagcctggatggctaagaacaagaaaaaaaaactgaggcaaggagacacttgccatagaagcatgaaatactgacttcatatccccagggcccatgcaaaaggaggacacggatagctgctcctgaagacccaacattgcaggagacagagagaggaggttctcagagtcctaaaggccaccagcctaggtccaggttcagtgagagtcactgtctttagggaacaaggcagaagacggagcaggacatctaacacacatgtagatcacacatacactctctctctttctctctctctctctctctctctctctctctctctctctctctctcataatataaatgcacatactggaagagctagtataatgttgaactcactgtactagcatctaattatgttttctgtttgttttcagagaatgtaataaattagtaaattacattattactaaaaatcatgttttcttagaatagcagatgtatttctctacactaaccttatattcatatcctatttgtcttgctattttctatctatctatctatctatctatctatctatctatctatctaactatctacctacctacctatctgtatctatatatgtatctatgtgtctatatatctatatagctatgtatgtatgtatgtatgtatgtatgtatgtatctatctatctatctatctatctatctatctatctatctatccacacatacatacacacatctacctgtgtatccatgaatctcatgatacatcattagttttacacaacgtttgacttgcagatagacttgaacctcagggtctggctttgtgacatgcatgattacactgaagtgtaacaccatagtcaaatgtgtgctgcgttgttacaaccagtcaccttttataacttgactttaatctcttttattgttgtttctggtgacattttttagttcttcgcagatacaaaactattctttgtacataaaatgactcaatacacttaatatttaatcagccattattttgaagcatccttgttaccatgtctctagttatatgaatgtacctgtatactatataaactctttaaaggttgaacatttatacttttcattttgttgagattaattgtatctcctgaaatgtttactgttttcataatcattttaaaatttactttttataatgaatagaaactatgtaaattagtaacaaccttgtcaattaaagggcaatattaatgcatatttagtttctttccaaactgtaacatgaaattcccattgaatgccattgtgcagtcactgctcagtgaaatgacacatgtgccacagtgtctgccatcttcccttgcaagaaaacctccatggcttatcttcaaagcatatttgaaacctaaagctgttttgcatatagaatcatcatagtcttcatgtgttactagatttaagttggtgtacatgaaatatttaatgtattgtttggaattatcttctctatgatctcaacttagcaacaaatgcagtcgtttgttgctctaagaatttagaccatattaatctgcataaaatcaaaactaaaccctgattttggaaatgtggataattaattattaaacataaaaaataaacagcagttatttaaacatgtttctcaagtgtgctgaaaatattaaatgcacacatttgtggactcataattgaatttcctttacatgtcctattacacggcacatcttgaagatatttactgagacttttctagacagaaagcaaacagaatcacagcagctaattttcctgttaaagttttagaaagatctttcacaaaatcatgactagagagatgtttcagcagcttagagcgcttacatacctgataacatgagctgtgctctgtgctcccttctgtgagtcccatttggggtggctcacagcttgcgaatttggttctagaagctctgatgtttttctagtctctagaggtatccacagctatctacatacactcacaaatggacctgcacacatacttaaactatgttggtaatccttcacaaagttatccacaactattcttcagactgaagttttttttttaattaatattttttattacatattttcctcaattacatttccaatgctataccaaaagtcccccataccctccccccccacttccctacccacccattcccattttttttggccctggcgttcccctgtactggggcatataaagtttgcgtgtccaatgggcctctctttccagtgatggccgactaggccatcttttgatacatatggagctagagtcaagagctccggggtactggttagttcataatgttgttccacctatagggttgcagatccctttagctccttgggtactttctctagctcctccattgggagccctgtgatccatccaatagctgactgtgagcatccacttctgtgtttgctaggccccggcatagtctcacaagaaacagctacatctgggtcctttcagcaaaatcttgctagtgtatgcaatggtgtcagtgtttggaagctgattatggggtggatccctggatatggcagtctctagatggtccatcctttcgtctcagctccaaactttgtctctgtaactccttccacgggtgttttgtcagactgaagttttacggttccatacacttctatagcattctttagtggttattactcatgaggcatggtttcaaacctgcgtaaattttcatttgaataccctgttaaataatcagtaagattccaaaactgggtagagatttggttgtgtgataaatagctaaaaagagctgattactcttggaaaaattattcttgtagagaagccggcagtcctggagatcctgggacgatgtttccctgctaatcctgtagagaaagtgagcagagggtacagaaggagcagcaaatgctgaagacagcagggtgtgaggccagagaaaggacactggccttcagggccgcagaggctcttagccatgggaaagcttacagaacactaactacttatgtccttgttaaaagcaaaggtgcttcacacagagtgacgtcaccctcccttcaaatcgatgtagcatgttaagtaacttagattaaaaaaaaaaaaacagcaacaataaacaatgaagaatgagtacaggccttaacagactaaaacacccaaactccaggcatagtctgttaaagtcagtttccactcaccttctcagacatttttattttacttacttttctataaatatgtaaattatagttgatttttaaaagttagtagaatgttccattgtcaggcgccccacattgctttgaggaaaagtcagctgttgctgctctcattatgaccttgcctgtatttcataggatgagcggaaaggaaagcaggcagagaagctttgatgatctactcacatgctctgaaattttgctgtctgtttcctgcatttctgtgtatttatttcatctggaccccatgagcttccttgagttttaaacttaggttgttcactgatcctcgtggacctatgcaattattttcccagtctcttcacatttattccccatggagcagtggtttctcagaggacaattgtcacatgtctcagagatcttgcattcgttcttattttaccttgcttttcaacatgaaaagatgaaatttcaaaatcagtaagcctttcactgtgcccgatttacatgaacatcagtcaaatataccaattttcatataggttattatttgaaacttatatttcatttgaaattgtcaatacacgtgctatcaaaattggtagattttgaaatatctttaccatagctattgtttgtccttgtatgttaggttgtattgtaagccacctgtactggctatgttttctgttgactaagggacctattttctatttctttataactatcgttatttatcattttatactagacattgtgaatatataatatatgtaatatatgtatatgtgtatatatattataacataatgtatataatttatatctctgtgtacgtgcatgtctatcctcttaaatttatatatattttttacttattcactttacatcccactcactgcccccctcacactcactccttcccataatcattcgcatctctaccctctccttctcctctgagtgagttgggccccctgagtctccccccaccctcacagttcaagtctctacaaggctaggtgcttcctctcctactgaggccagacaaggcaacccaactaatagaacatatcctaaatacaggcaacagcttttgggatattctgcactccagttattcaggactcccatgaaggtcaggctgcacatctgctacatatgttcagggaggcctaggtccagcccatgtgtgttctttggttggtggttcagactctgagaaccctaagggtccaggttagttgactctgttggtctttctatctcctttggagcctgcaatccttcctcagttagactgataactatcttaatttgaggtagacatatgtacttgcacatatatagagagaaatatataacacttcctctctcattgttgataagtctcttctctgggctgcatttcactggtttcaagagtgaactatacagtagggttaaagtttttcttcagtagttcttttaaatctctctctctctctctctctctctctctctctctctctctctctctctctctctctctctctctctctctctccctccctggtaaggaagcagggaagcaaggaagcaggggaagcgagttcatcacctaggcttgagcagattaattcctgtctctggagtgaagttatttggccttttagtgacactgttgctgttttgtttgtaaaatgtttattgttattaagtaactctacttccaaatatttaaatgtttgcatttggtatcacataataaaaagtgtatccctgtcatttgctaaacacattttggaggcaattattctcttttaaaaatatagccatatattaatccaaatatattttgctttttataacataaaagttaatagataacatgtcatctagacgagtgaatggaatttattttaataaactctgaccatctttctacagtggccttctttagaataatattattctcctattgcctacatattagtttattaatttccccatgatgatagacatttggattattttatatttttgtttacatttttgtcctacattacttttttatttttctctgtttgtttctccctgttacatctgagtgtatagagggtgtctttagggctcttgctcaattactgtccacctcagttttagagtcagtctctcactcaaactgtagctcatcatttgactagactaactgcctagtgagctcaagagagttacttgttcgtgtcccctgacacctatcccacgacccccagctgataaaatgcagtaccatatatgtatatatatatatatatatatatatatatatatatatatatatatacatacatacatatatagatagatagatatgtgtgtgtatgtattctattgttttagagatgccatttttaatattacctaagacataatctacaatctaactaagattaggaaagttaaaattattgatatactgcctatgatataactaataaataaatattaagcaaaagtaaaatacataaaaatctgttttgactgtgtatgtatgtagtgtgtcttttgggtatctacttcccactacaatttattatgaagcacagcaggagtttgccaataatgatttccagaaaactgtcaaaattatatctatatctacatgcaaacacatacactcactcacatatagattcattctctctctctctctctctctctctctctcacacacacacacacacacatacacacacacacagagacacacacaccttgtgttacaattacttccttagaaggatcatctcatctcttattatgaccaatggtttagatgttccattctctgccaactatatgcttaaatttcaaaagtgtcaataaacaaactattttcaaagtaagttttacttatatttatagagctacaaaaattttggaggtaccatgacagcatgaagagacaactctgaagttgaattttaggcaaactcagcaattccttgagtaatatagaattatggtctatattagatggacatttataggttgaatttcatttagaaaactgtgtagaattgtatttcagctcaaaatcagttttaggcaaagtcatctctatttcagattctctataaatggggaaggtgtatattgctttcctcagtgttgtatcaccagttaatttaggaaattgacattcgaaaggcttcttgtgttctctggtcccctaacaatagtgccttcctgaacttcccggcgatgatctctatgtccatatgtctgggtatttgtggttttgtttgtttgtttgtttgtttttcatcatttgagatggtgtttactattgcactgtgcatagagatctagggaagtctttttagaaatggagataaaaataaatcaactccctgtgtttgaaaagtctcaactaaagtgcggttgtttgcgttggcttgtcaatggatgtttatgaggcaaacataatcctgttatggttacagcagtgaaatacatcctgtgcagatagctagtaacggcccatgtgagcactgatgctagtggaattttaatgctttagagataggaaacatggtgtctgctcttgttaatgctgctgttactgaccacagtaaaagtagaggtggaatcaggttttaaatactgtgatagaaccgtatctcccacaacagacacaccgggtctcgctgctctcctgttttcctctgtttctttagttcactgtagaacggtcatgtttctgatatctttcctttagatttcttatttattgtgaagtccaagagaagggccattgctaataatgatttcttggaaagtgtcaataagatagatcctcactcaggagatttctagttattgcctgaaatatcacttgagtgtagttaaagctgtcagatctgactgtgagtttagcctggttaccatttgttatcattggtattttattcacagtaattcttgcttgatacattctgttccttcttatggtaaaaatttgtaatagaataaaactttatgtggactctgctttaaagggaaagttgagaatgttaatgctgttaacgctgtagaactggtgtatctgatgctgaccttgaactcttggatctttctgctctacctccaggttctggattgcaagtgtacatcacaagcctagctatatttttagcttatgatgatttgtatggggcatactgtttcctagaattcagtaaaatcttcagaaccagcggatttatttttcacagaatagcgtggcttcagaatttcccatgtctaaatgtcaaggtcacattatctgtttttttccctttctttcttttcttttctttctttttcttttttttcttttttcttttttttctttttctttttttttttttttgtaattcaggttcagttcaaataagtcctcatttggcatctacatagtcctatctgtttggtacttcactaaaacacttccagaataaacaaggaaaagtagatgtgccggggcctcttgtgcaagtcagaggctgaagagaactgttggtggagggttgtggaggttagcatgcatttgaatatgccttatgagtgggaagtgtaagaatgcgaaagtgggcactcatttatatttgcctaaccttacactacttctaaagaagtattgaaaaaaaaatacactaaagcttcagcagagtaaaaataggagcacaattatgagccaatttcaacttcaattatatcagaaagtgcactgtcatgataacttgttattttaaattacccagcccaggaaaagctccctacaacctaggcagaaagtgaaaaagactaagttatagagttgtcattgtgtaacaaaagggatacatgtgagcttagcctaaccttttccccagctccaagtgaactgatttgttaatattatcatcataaacagtaattatcctaagcacagccccccttcttcttcttcttcttcttcttcttcttcttcttcttcttcttcttcttcttcttcttcttcttcttcttcttcttcttcttcttcttcttcttcctccctnnnnnnnnnnnnnnnnnnnnnnnnnnnnnnnnnnnnnnnnnnnnnnnnnnnnnnnnnnnnnnnnnnnnnnnnnnnnnnnnnnnnnnnnnnnnnnnnnnnnnnnnnnnnnnnnnnccctcctccctcctctttctcctcctcctcctttttttgagacagggtttctcagtatagccctggctatcctggaactcacattgtagaccagcctggcctcaaagtcagaaatccgcctgcctctgcctcccaagtgctgggattaaaggcatgtgccaccaccgctcagccacagtcttcttcttatatgcccaatggtcacacagactctttatgttatgaaaaactatagagataatattggagatctttgaagacatttataagatctataaaaataaaataacataaggtctggttaaatttctgtattatgagtcatcaaagtaaagttttagtacaggaagaaaaatcttatggtatggacttacaattttcaagccttgggtggaatttgtttgagaccttcacatcaaccatccaaacccaggtggcttctgggtatgtggagattccacagtagttcaggaaccacagaacaagaacaccactgatggaaagaaatagtttcacttagtcctcctcctcaaagagagttttgtcagttgtatataaagaaaggattcttaagctattttactatgtacctttggatagtttgcaatattagttgaacagagaaacacataccttatctagcaatgtggctagaatatttgatgcgtaaaaattgcagtcttcctcttccagttaaacataatgaagtactgaatatgtgagcagtatccagtataattagggttaccatgtatttacatacacatgaacaagcatattttaaaaattagccaacaataatctttctagatgcctgcactgcctttttttatcaagactcctgatatttattactttaaaaatgaagaaaagaagactctagattgtagagattacagtgatagctatagattatacatttacagaaaatgctgagtgtagattccaagatttacttgtcaatcagctgatccatacacttgcacccttgagcagatcttcaattctgacggattcacctggatgtcaattgtcaggtgcaacccagggaagagaaaaaaatccaccaaatgttggcaatctctgacagagcagttaacagtggctcccaaaagtaaaacatgaatagatgtttggggtgactttgaacaacctataaacgaatagtattgtaaagaattttatttgtaagggaacttatttgggggcattggatttattctttgaaagttaatatttcttttaagtggttaaatatgcaagtgaacagaaagtgtaataatgaaaggtaagatgttgtggacagtcccactcctcccagatggctggtactctgtctgctagtcttttactttccagccatatttacacagttatgatcatgtatatatatgaaaaaatggcattctcttttcactaccatttttcttcatctttaaaaggtttttatttatttgccacatggaattgtgttaggtgaattataatttgttttctggattattgagcagaaatataaattgataatatagtttttctattataaaattctatggtgaatattttagcacctggtttgtcattttattgttttggaatcccagcatgagattagaggagtggtggtagttgtcccgagataagaaagtagggtttgctgcctttcttgcatagtagcttgctgtatagattttgccaatttatactgccacttaaatggcatgtgagttgtctccttgccatagactctcagtaattagctaatgtgttcaacataaggtagcataaaatagtatgctttaaaagagtggcagtttaatcctttttaattataccttttcttagatgaacaatgctgacctaggaaggctgtataatatgatgttagttacccacatagaaacacctttcttacatgctaggaaacatttattttaggttggttgggaataatctggtttggaattaatttacctaattgattttagtttatggagaaaggtcaacagcttaatatctgaattaccacattgaatttataatacaacatttgaattatcacaatgaatttataatggagtatactgtaaaatacttgcatattggcctacagtcactagtaaacttctgtttgttctccctagatttagtttctttaaatatttagaaaattctaccttttaatattttcccatgcaaaattaataaattaaatcatatttcccttgcattcaagaagttgtacatccccaatgcaaagaaggaagtgtattcataattcatgttgaaagtaatgaggtgttatgatattgatctaactcaatttttattgatgaatgttgttatcactcaaacctgacccagttatttgtatatcatcaaattcaagttagttgtattaatgcataaatattcaatgtgggtattgtccaaggcatcatcactgtgatttgtgatacatgctatgtattagtatctaagacttatgccacctgattcagatgctaggcacaaactaataaaattagtatttgtagaaatattgttgcttccaaaattatgtaggagacaaaacttggatggataattgccttttagcagacgttgttaaaaactctagttctttttggtctttatggttatctgttttcaaaaaggtacaaaatccctaaatttgttgagcagttgtgttccaaaacaaaatggacaaaaaccaacctctatgttctaacttctcttcttccacaatattttttaagttttttgaattttcccctgttccgtgtatttcaaataagcgctcacattacaggaaactctaacatgaggagcttttgagagcagatgtaatagcaaatggaagtcttaattgcatgataattctggcctaaactaggagaaagtgggctagatttggccagtggaggactctggacacaagtcatgtgtcacaagtcaacagtattataggaaagggggaagggagagtctttatcaacaatgggaaattttgttttcagataattattgggttagtgattattctatgaatcaatatatctacacaaccttcactaaattgtttaggaactggactgaaaaaatactctctaaaaatatgtaattgaagtaaattgtcttaatttgggaaaacaggatctataatagtggtgttagaagtgggtcagcaatctaggatgtgatgtagaataaagtacagcacaaagaaagcatctctatccagtctcgggtttccttgtccttggttttaacgacctctttaatatagtcctcgtaagcacatttttagaatcactcaattgcataagaaaattcatccatttttacttcgtcatagaaatgtatacggtgatgttattgagagtttgattttatgacagcggcgccacacttcagacagcacttacaaagttttaatcccatgttgatttttttttctacatggactttagcataccatcaaataagcaaattttctgtacacaataaataaaatcaaatgaaataagatctgagccatgttgtcttgagccagggaaaatgatgacttaatgactaatggggacattgttctgagctttggtatcattagttacatcttgctatggaaagtagatgctccttgactttttaacaactgcttccttatttcaccatggatatctttcttccctcagggccgatgcataaacttctcccgggttccacatcaataagacgggagaacaaagaatgagaagataagaagacagtgtgacagtgtatcttcatgatgctgatttccaacagaaccgacagtccggtgcatctcagaagttcttgggacaacagcccattttctctctgtcaggaaatgtttcctctgccttctgctttctgtgcactaaacattttccaacacttgttctgccatcgacatgagaggtgatgaaagtcatcggcgatagcccatgattcacgacactgaaaatcccgaggaatgttagtttgcatgctagggtttatgcaaagctcgttttgactatgtaagaggacaaagcagacacatcgatgatgtaatgataccaaagctaggactgcaaatccaccagccacagaggtttgcaatggagactggtgattctgccatgaatgtgtggcccctgtgcttttgtttggcaagatctttagctacaagcaaaacatgaagtttcctcccaggctaaacagataatggagtccactgccttgtagctatgtcagatagcaaagcctttccaagtcctccattactttgtgccttacaggaaatttctgactagaaaatcttgtcactgttacactgaaagtgcacacgcatgacaaaatgtagacgagacgcctcaaggtactggatgcaagcaggatttttgccctttagttttccaagacacctttctttcattatgcacttgagacaagagaattaatagagcgttaattcaacaggaagaccgcctccaaccaaagacctggagcgcagcataaggacttgtgatttgagacgttgtccccagcctggtagatccccctttctcagcatttgggatttagcagtgcataaagcattaatatctgtaaaaacacctagatgtttgtttggcttttaatttaaggaagctgcaaccacaaagcttccgctcagggttttttcttccttcaagtctccaagggctcttcagcgtcacaagccagcaactctctttgcatgaaaatttcaaagtttaattaatataattaaaggcaacagcaagcagcagcctgtgaagattttgctcatcttttttatgccttttgacattgagtgacctatcactgtatgcatgttacttagaaattgaggagcaccacaccttggttgtggttcagcctgggaaagagacctccttccttctgtttataaattaaaatcaggaggggcgccatcagaaagcatggacaatatacatactataaatttttagaaatatcaccatcgtgtcacgtcaacgatgccaaattatgttagtgtgagcagaaacccggtgggggaggaaggcggcagcagccgaaggaaatagctcagataatctagtcactttcgatactgtacttcagatgcgaaatggatattcgactggaaacctgacaaagcgcgcctgctttgatgtgaactgttatagacaatgaccagtggccgggtcagtgggatgtctctctgcgagcacaaaggcttatcaaatgacactaaaaataagttcaacaaccatcactttggaagggagaaggcgaacatttcatgtttggcgggcatgtgagtgcaggagatggaaagagccatttagagcatcctcatataattgcccgcattgtactcttcatggaaatttcaaaggacggcagtgatatttttcattggtgtccacgtttgtggcactgctccaagaagccttatgcacacatacaaatatacaaatgcacacacctacactctctagctttaatctttttgctcaaccttatttatatcactgactggctggatccaaagtcacacctccacatattagtgaataaaaaatttttacctgtgtctctgttatcagtttctttaagttcacatggagcttacactttgtagggttggacacacaactgctctggttagtaacaagatggaattctattccattgtaaaatatccaacatgttcacagttgattcatggttgatgttacgggtataatctgtgtgtgcacatagaaggctggtaagtacacctaactcttcctgtgatggtctttgtagacgtttgttctgtgtctgcctctaaaacaggacctatggccacttccccaaaaggcatttcatttctgatgcaggcacacacccattcgtgatattttaagagcatcaaaaatactacagaagctctggctatgtttctttggtaaccacttcaaattttcacagaatcctgtagcatgtttgcaccacgagggatgtaaataaacctctgccttttaatggcaaaatagcttccttgagatttgttgcactggctggaggatgtgtcataaaaatacaacaaagagctgtaaatgaagagggtgagtcaggagtctacacatagactgggaaaggatcattcataaggttcaaagacagatggaattccattgcccttaaagttatgaaccagattaatgttatgctttaatcgcagatcttagcagaaatgagaatttgtttttaaaattaatcttcttggcagaggacattgcgaatctttatgtgacacttttcatacatagcaatagctcccgtgtgattgatctggacacgatgtcagtcgagatctcctcctttgtacaaacaaatgagtcttgtccatcatccatttgtgttacataaggttgcaaaagcaattaagtgggaaatgactcctaacttatgtgtctcctctgcctagaaagaaagttttgaaggcatctatatatatttcataacaatgtctgttctttatggatttgatccataaatatttatctatctgaaaacttagatacttggaatgttttccgtaaagcatttggtgctccaagaagaaacatttggtgctaagagttgcagctctgatgccttcccccaagttaattctattttaaaaatttatatttccttcccaatgagatgcagagtaaaacttgagagtctccattgactagggagcagcatctgtcatctatggttaattactattttgttaagaatataaaaggtttaaaaccttatatttcaagttgttgagaagtttttcttttatttccaatgaactttgtcctaatcacttaaaaaatccttatcagatataagatatgagtgtctctgtgaactgaatttcattatctgaatgtctctgacctgtatttactgttcagaggtagactaatttctttaagattgaagcactatctgtattgaggagcaagttgatggagacatttctagttggtggttttacagatattatgtttggaaattctaaagacaaaatataataaggttataatacaagtattagaaaccattgtaatttcttttttatattctggttaacctttattagattttcctttctattatattaacaaatttattagaatttaattactatgctcgaagtgttgtatatatacacacaggggaaatgtgtgttgcacacacacacacacacacacacacacacactctaaatgcttagactaattggagcatctgttgtatagttaaaggaagcagtaggctcatgaagctaggaagtgctgtctgtagtcagtgtagctatagtgaagtctcattatattagtgttgtctagtcaatttctatggaatattctgagaacattttaattttagtatatttctatatttactagaattttattcagtcaattgggtaaaagaatgaataaatttattgaaaacccataatgtaacaggcttcttgctgttttgtaaaatatattttttgtactcctgccaaaagaatattataatgtgaaagaacaaggtatagaacatacatctctatatacatgttcatatataagttgctttcctcatttatcaggatgggaagcaggaagggatgttctgtgtggacacctagtgagcaggtggctggctggcttgagaggccaacacttcagtcataccaaaagttcctcccagttctgatgtttgcatgaaaatgatgaaatcagagattttagtgtttatttcaaatttgtcatgagtgccttcttccttgtaaagtttgatagtattagctctgcaaactgccagtttagttacagaaaagacattgaactctaacatataagttgacaattagtcataatggtgtaatttcttagtcaatgttttacagaagaatttgttagagcaacaggtactatagtcatatatgaccaaaacctctcttaagataagcaaaacattagaaaaggtatttagagtttgttctggtcttccagtctcactgggtgtcttaaattttcatatacagaggcaaaagaaaatccctattctgaagtagttatgaaatcatttatacattatagaaatttaaaatgtatacttcccccagtcaacactagacaaaaggaaaatcaaaacaaacgaaaagcccacttgattaacaacaactatgcctgtgttatgttgtccatagcacatagtcaacgagaactcttttgttgagtgatttagtgtttagcatctggagtttattcacagaatgagccttgcacagacttaccctggtcttaatgtagatgactactggaagaatcctataccccccaaatcctaaattttatctcctaatcgttaaaaagttatttatatctctgataagttatctttgcaagattgcaaatgttagtcataaatagagcaaattttagacatgactagaatgtatatttaaatatgttcaacctaagtagaagtattagaaactatttcccagagggcagaccattaacaataaacacatctctttcatgaaggcaaaggcgggggtgggggtgggggttgatgggaaacaatagatgtgaatggaagggctgagcacattcaaagccacagttgataaaggaagctgttgcatcctgtgctcaattagggacaaatctaaatctcttggcaagctcatggattccaccatctgatttgtaaaagcaactggagaaaaactcaaaatgggaaacaaaactgaccagttctagcagatgacgcctataaatggaattttgacttgaatttctgatgtgaaaccagacaatgacgatgatgacactcaagttctcttcaagttattttacttttaaaaacatctttttaattctaaaagtttctgctaattaaacagagcaatgacagaccttcgttttctttaaatactttgtttgtgtgaggctgtcacacagaaggaaggattatattttaaacaatatgctcaagtgtaaaaatcttcaacaaattcttaatgtttttttataggagaaattttgaggagttttgtaatgagcatcttgagccttctctaaggagaaagatatttcaggaaattggaaagaattgtaaataatttaaagaagctactggggactgcaccatgacctacagcgtacctttgaggagattcagtcacatatatcacaacactaaatgcaaacttagtgcagcatcatggtggcttaataactcagtgtactgccactgcccaggaactactaaccagatgcatttctaacactaaaccaatcctttcaaaagttcttatcaaatgacagagaaaagctgattcctcgggcttcccggagacatacagtgcatgtctcaagttcctcaaacaggccttatgaacaggctgggggtcaattttctttaaaaaatatttcccataacttcaaaaatcagtgtgatatatctcacctcaaggttataatcacatatgttcataatttcttgctttgagaaacttttaataccaacgaaattgaagagagatagtttatttccctttcccatggctatgatgaagctctacatatttagtgttccaaacgtaacacaaatttattttctccctgatttcttttctttgccttcttcagcttctattgccgcctacaatctttagcttcatctgcctccaacgcaccacacaccaaccttcaacagtcttcacagcagcagttgcctttggtctccggctgccatataaagaccattgcgactgtcctgtgtttattcccataattcagcaggaacattgcctgaaggttccctttctccatatagagtaacaatcattagttcaagggaggaagacacgaatgttgcaagggtctttatttagctcacgcaaacctgtgagttcccttttttaaatagctactttttttttttaacctatcaccataagagacctacaagctaggctcagctctccgtgttaaatccacccctgtgggaattcattatcttgatatgccatgactggagccgggagagaccctccatttgctccattcttttgtgctgtgtgttttgtactgtacttaagacttcacacaatgaactgagctaagggttacactgctggaagatgtttgccagatgaaagatcacccaggagatggaagcatgtggtcagagttttgtttcctccaaagcatttgtgcagaaggccatacgttaactaagttattcctggaaagctttctgctgtcattctgaaaaacatttaagaaggtatttaaatatcaccagagactatgggcaaaaatacactgatattctaatgctaacatcagtaatagacatatggacttcaacagaacttcctcccacctgttaactgtttttcacccataattaagaatgttctcataagaacttgttttaaaattgaagcaaatctcacatatatattaaagattggtaagcagcaattataaagatagtcataggtgtgataaagtataaaatgataaagatgagttaaagtctaggtagattgaattggtagaaaaattattaattttgatccaggaggtaggagacatttttgtatgtttcagattctatatcagtacttacacactctttttaaaaagtacatttacatatttaacaatattatgaactacttaggacataaacctttatatgctttgtgaacctaagacttggcctgtatctatagagtatctgagagttttaaaaaatgtctttatgcatacatcattccttttttttttttttttttttttttttggtcaaaaggtatattctaagtgcatactaagtgtagcaagctaattttgctagaacctatggaaatgttaatttgcatttttaaaacatgcttagaaggtggaagggccttctgatgatactcagttgaaaaagttattctggcatgaatcctgagtggtccatttaaaacataaaccggatcatgtacaatgagatttcatgctcagtgggacctgttttatgtggccaagcatagataaactctgttccacggtacctcattttgccaccacacaatttccagtgtatatgaagtcttagtgatgaatcatgaggcctgtaaaccattccatttgttgcaaaatattacgtttgcttaacttacaggaaagttaaaccacataaatttaatatcctctaggagagacaaggctggtgtgcctgccagggcaaagtggtgcttctggagtgcactgtgtttaggacacttgaagactgttggtctaacatcattcagaagcagttactattggatagaaaaacaaatagaacccaaaacacttaagggataattaattcagaatcttaactttaatttctgaggaatgtggggtgaagtagctcttcacaatggaaaaccaagaaagatgactatatttgtttttaccttgtgataacactatgttccaagtatatattctagtctgtattcaatacttctctttctgacccacagggagaagaacagtggtatttcagggaaaccaggaaatgccctcttagaatgtccccagcactcaggtcttcatagtgcctacagaatgatagaaacagttttggggccagagtcctgagggcatacaaagttgactgggcttcattccagagataaaaaggactatttgaaagatgaaaggattagaagtcaatgagtttcctttcatcatgaagagaaaggagcccaaagtttcccaagaagaatccagccaattctgcactgctgcagaacacaggatgtggagcaatcttggcagaaaatctcaagaggaaaggaagtgtcttgaggttaagctcttgtctgcttcctaatgttagcagatgcctatcttgtgccagtctcagcagaagacaatgggatactgcagacaatccagtgtctgcaatctgactgtcagatggagacaggaatggaacaatagagtttttcaaagaggtaagaaagtgtgctatagtcatgcaagaggaagggactgacctagcctgaggcaagttgtgtagtgtttgctgatcttgggagaagtggcaagtggtcttctttccaagggaacccccttgagatggaacacagccagaaagataagtatatattatcttccctcgagctggtaattaataacagattaccaacacagagcatttcagaaaggctcccttaacatgtgccctgcacgtacagcatccccacctgtgacacgcatgtttccttgctgtcaccatcatcatctcttttttgagatgagctttggtttctttctgttatgcctgttgcagcatgtatcagcggttcattttatttttattaccaagtcatatttcattgtacagtcatacaagagacaattcatttggtgacctgtggataggaatttgggtgactttccgcaatcatgatgtatctaaaattatttgtatagagatatttggacgtctatgcatccataaaccacatgcatcttgcttgctcaaatatttaggagctactgatgacagctgtgcgtttaactttatagggactggatatttatatacagcccttctactgtagcattttacatttatatattgacaacttctgaattttaaccttttagtaattccagtttgcctagtatgttaggaaattcaagaaattagcatgacaggtatgtccgtcaaattcatagaaatggggaataggaatagttaattaaattaagaataaaggatatgaataactcatacatcatgagtttcctttgtttggttttgagacccgggcaactggctttgtaaggaagaatgaggaaaggacaagaaagccacagatatggatgaactctccacatggaaggtctaaagtggcagatgggtgttgtcacagatgcaaggtagtttggagttagcactacacgcagtctacaagaccactctggtgaacagattgctacaaatcactaacctataccttccccttagattcacagtgaggttgaattcctaagcatgagtgagttacagatgatgttcaaacatacatgtgacaaagtatttgctatagcgtggaattctcttgtgtaatttgaacctgaggtctttgtagcttgatcacctactactcacaatctatatccaagtcaaacacaaagcactgtgtgcttagaattatgcaacatttaagttttttcactgcttttaaaaacttttgcaaatctatttgtgcacattttcctggttctttttctttttctgaataaagcagagaagttaggagtccctcttcaaaagagtacctagcaagtgctgtatgtaagatctttctttttaactgttttgacttaatcttctgattttatgcaaacataagtggaattcaggtccacagataatagactagattttggaggccatattactgcagtgatattcttccctttgttgttcaataattttcccaatcaagtaaaatgagattaaaaaattgcattggaagagtccaactctgtcattcctacagtttaatatagataataacaaagaatcaaaaaatttcagcagggttgacttgcatttttaatctagccagaagacaaagcctaattgatgtgtcctattcatctactaacacctggtaaggccaagtaacgctaataatgtataactatctgggtatcaatgaatttgtttatttatttaactaatagacatgtactgattactggctctgtatttagaacaaaggttggtcacttattcatggcaatgagaaagataaacacaatccttacttaacagaattgatccctaatcctagttcttttttgtagctgccaaaatgagttactggaataggtgtagtatcttaaaacataaagtattctcttataattctgacaaccagatttaaagctttaggggagaatctgtttccctaaaatagttggcccttgttaggtattctccttctggttgtcacctgggaccatctttagttactagggctatcacatctctccatcataactctctgacaacaacatcagccacgacaagcctagacattcttccttttcgtctctttatctgactcttgcaagctgaagtgtatgatggatatgtgtctaaagaaagcaggtatgtgtgtacagtcaggaattaatcttgaaggtattcttgccatttataagaatatagataaactcataagacattatggtaagagaaacaatctagttacacaagggcaagatccttgggatagtcaagctcaatgaagacttactagccaaaagaatggtggacaagggactggtgagatgggagggtgcgatgtggaatccttttctaatgtgtaaaaaccctttgttatatgatataaacaaactcataggtcttctggatgacacagtgtgcactgttagtatgttactgtgtgccttaaaatatccaaaacaactaccaggcctatcctatgcccatctcagaagtaaacaatgggatattacaaaggaacgggtgcctacaatttgattggctcatggaatcaaccaggtcacaaaatgaggcaaaggaagcaacagcgtatgccttactcacaccctcctgaactcagacctttcattactgtggagtcttgttttttcttatagctctgtatttggaggctcagggtctttttattgattgccttttgtttttcctggatggatcactgcatgtgcacgattagagtgttatatctttgggaagattgatgttttatcacaatataacatctctctttgcctctaacagtatgacttaattacatataagtatagctatattttgttttaaaactttttttttacagtacatgtcacctttactgttcatttatcaacagctacatgttgaccctctttccatgtctgtggcgttcatgtcttttcctctactatcatacaaagccagtcacctgggtaatgaaaccaggcgaaggaagcagtgatttgtgagttacttacatccattttctaaattcaatgaactatttctactcctcattttctctttataataacagcaaacagaatataaaaaagaacaaaatactcatggagtggttgagatgtgtatcagcttcctattggtgatgttattataggaatacagaattgcaaatatcaccaaaatgaacacatcaagtatggttattttgtcttttaattatatctccataaagtcgagtgaaaaacataccactttatattgaataaaagaaggcatcaaataatgattttttttatattcaagaacagccaatctgaaatatgaagagaaaaaaaaatcagagaatgactgaagatgagagcttgctcaggaagaagagggagtactctgagggggtgacaagtatgtctacaatcagcagctggtgacacaagctcaggaagacagttgtgcagagcaggagggctgactcctggggatagaaggttgcaggctgaagaaagctgtttca

SEQ ID NO: 270 - DNA, 1800 bp, Mus musculus
atggtggccggtcggtcccgggcgcgcagccctgggagctggctgttccctggcctgtggttgttggctgtgggcggtccggggtcgttgctgcaagcccaggagcagccctcttgcaaaaaagccttcgatttgtacttcgtactggacaagtctggcagtgtagcaaataactggattgaaatttataattttgtccaccagctgacagagagatttgtgagccctgaaatgagattgtccttcattgtgttttcttcccaagcaaccattattttgccattaactggagacaggtacaaaattggcaaaggactggaggatttaaaggccgttaagccagttggagaaacatacatccatgaaggactaaagcttgcaaacgaacaaattcaaaatgcaggaggcttaaaagcctccagtatcataattgctttgacggacggtaagctggacggcctggtaccatcttatgcagagaacgaggcaaagaagtccaggtcacttggcgctagtgtttactgcgttggggtccttgattttgaacaagctcagctggaaagaattgctgattccaaggaccaggttttccctgtcaaaggtggatttcaagctctcaaaggcatcatcaactctatattagctcaatcatgtactgaaatcctggaattgagtccttcaagtgtctgtgtagggggtgagaagccagtgagcattcagccaagttccatcctttgtcctgcacctgtcctgaacaaagatggagaaactcttgaagtttcaatcagctataatgatgggaagtctgctgtctcaagatccttaacaatcacagccacagaatgtaccaatgggattgcagccatcgtagctattttggtgttgttgctgctcttgggtgctgccttgatgtggtggttttggcccctttgctgcaaagtggttatcaaggaccctcccccaccaccttctgcaccaatggaggaggaggaggaggatcctttgcccaacaagaagtggccgactgtggacgcttcctactacggaggtcgaggtgttggaggaattaaaaggatggaggtccgctggggagataaaggatctacagaggaaggtgcaaggctagagaaagcaaaaaatgctgtggtgatggtccctgaagaagagatccccatcccatccagaccacctcgacccagacccacacaccaggcacctcagacaaagtggtacacgccaatcaagggtcgtttggatgcactctgggctttgatcatgaagcagtatgaccgggtgtccttgatgagaccccaggaaggtgatgagatgcgaaatggatattcgactggaaacctgacaaagcgcgcctgctttgatgtgaactgttatagacaatgaccagtggccgggtcagtgggatgtctctctgcgagcacaaaggcttatcaaatgacactaaaaataagttcaacaaccatcactttggaagggagaaggcgaacatttcatgtttggcgggcatgtgagtgcaggagatggaaagagccatttagagcatcctcatataattgcccgcattgtactcttcatggaaatttcaaaggacggcagtgatatttttcattggtgtccacgtttgtggcactgctccaagaagccttatgcacacatacaaatatacaaatgcacacacctacactctctagctttaatctttttgctcaaccttatttatatcactgactggctggatccaaagtcacacctccacatattagtgaataaaaaatttttacctgt

SEQ ID NO: 271 - protein, 463 aa, Mus musculus
MVAGRSRARSPGSWLFPGLWLLAVGGPGSLLQAQEQPSCKKAFDLYFVLDKSGSVANNWIEIYNFVHQLTERFVSPEMRLSFIVFSSQATIILPLTGDRYKIGKGLEDLKAVKPVGETYIHEGLKLANEQIQNAGGLKASSIIIALTDGKLDGLVPSYAENEAKKSRSLGASVYCVGVLDFEQAQLERIADSKDQVFPVKGGFQALKGIINSILAQSCTEILSPSSVCVGGEKPVSIQPSSILCPAPVLNKDGETLEVSISYNDGKSAVSRSLTITATECTNGIAAIVAILVLLLLLGAALMWWFWPLCCKVVIKDPPPPPSAPMEEEEEDPLPNKKWPTVDASYYGGRGVGGIKRMEVRWGDKGSTEEGARLEKAKNAVVMVPEEEIPIPSRPPRPRPTHQAPQTKWYTPIKGRLDALWALIMKQYDRVSLMRPQEGDEMRNGYSTGNLTKRACFDVNCYRQ

SEQ ID NO: 272 - DNA, 181946 bp, Homo sapiens
  misc_feature (1)...(181946): n = A, C, G or T/U
aaataagcatcatgtatgcccattgctgctgttgttctcagtctatctaagtagacagagctatatatctgcatatacatgtacacacacacacacacacacacacacacacatatatatactgtgtatactgtgttttacatatatacacatagcagtctctttggttttgctttttggggtttcagttatccacagtcaactgcagtctgaaaatattaaatagaaaattccagaaataacaattcatacattttaaattgaacactgttttgagtagcctgatgaagtcacacactgccctgcactatccctctcaggaggtgactcatccctttgtgtagcatatccacccggtatatactacctgcctaatggtcactcagtagctgtctcgattaccagatcaactatcctagtataggtatcataatgcttgtgttcaaggaacccttgttttatttttattacagtaaattgctgtaattattctattttatcattagttgttgttaatctcttactatgcttgatttacgaattaaagtttatcataggtatgtatgtacaggcaaaacaagtatatacaaggtttggtactatccatggttcagacaaccactgcaggacttgaaatatattttctgtagataagggggaaggactactgcatctgcacatatactcacatctatatctgtaattatatgtatgaattcacactaatatctccaattgcaagctagcaccacaggatttattctagatttttcaatttcattatttacagctttcttctctgacggtaactcccattatctatactagtttgacttaatccctcactatggtctgaaagtttatatttcccccaaaatcacatgttgaaacctaatccccaatgtcatagtatctgggctggagcctttgggaggtcatgcaggtgaagccctcatgaatgggattagtgtccttttaaaagaggtcctagagagttgctttgccccttctgccatctgaggacacagtgacaagatggctgaccatgaaccaggaagacgatcctcatcagatgtcaaatctgctcgcatcttgatcttggacttcccagcttccagaactgtgagaaataaatttctgttgtttgcaagccatgtagtttatggtattttgttagagcagcctgaaggaatgaaagcatttcctgagtgaaccaatttctcatcaccactgttgccctctccaacacagattctctcattctgcttaagttctgacatgagcaccaccttgcactttcactcaggatctggccccagtcacgagctgcttcttcctaccctgggtggacatcctcctcatcttgcttgaatctctacctgtggcctcaggcttcacataccttttccctccatgtcgaagcctttccttctctctctcaagctctgacacgctgcactaggttgccacctaggcaacccgcctgggctatgacacactatgctgggtgtcagtctgttagtcactcctttgacaagcttctctctttcctgaagccccccttaccctggttgggtttatatacctcagctgtgctctctccctgaccagaattcttcttcaaatgcttgggttcttgtaccctgtgctctgctgcaacagccctactcactcttctcatgctctggcatcctgagacagcttctgccttccagtgttgactctctctctccctgtccatcctctgacaccctgcgtggggatgaccccctgcatggaggtccatgtttgggctccaaatactccacagtgaactttcccccatgcagaagtcctcctgattttttttttttgaagtaaagggtggactttattgtttatttataggatgctgcaagataagaaattccacacagaaataagaaacccattcagaggacaagcttcctacagtatgtacagttggaactgttcaagtatagtttcagtgtaaaaagtgctacaataaccaaccacatttaaaaagagttcttagtagagaaacagtaagacaaaataccaaatatagtacacaacaaatacatacctcagctacatgatctaaaagttaaacgttccaggagtcccattctgaacttggaaggtacagccttcagagttagtttctggcacagcattttgatcttcctcttcctctaccaagaaattcttctcaattaagcttaacaaagccttatacacagactcattttcatggttttgtagagcctcaattttgtctaagcctccacattcttcaatcattatactaagtttctcagtttcacctagtttctcagcagcctgaaagatgttcgaaatggcatccaggataaccagaataaccttggtatcttttgaagttaagagattcatcaatggttttattaggccacaatgaatgaggtatacagcctgttcaactgttccaccactggtatagttggtcatggccccatacagcttccttttgtgtctttaaaatctgccttagagagaacattgtgaggaacgggactaatccatgattcacaacttgctgtatctcatcctgagggtcagctgtgatgtttgacattgtccatgtaccttccttctgaaagttagttttggagttgatgagcaggttgggaaagacagcaagagctcctgcatcgatcacaacctgagtctcttcatctgtaccagtgacaatattccctatgggtcttagtgcaggagtcacagttggcaattcagaagctcctagaagcttcacaagttggggcaaaactcctattttcaagaacatgtcagttcgtttatttggaccatcagtaaggtaggaaatagcccaacagctatctgctaatacttctggatcatcatgatgcaggagccaaactaaggtagaaagaatttgctcaacagcatctaactggggtgcaggattcttgtagcagcagaggattgaaagtgtccaggtaagatgacataagtaaccacatactaaagatgacatatcgggaactgcaagaagagccaagagtgggtcaactgcaccatacttaataaccaagtctcggaaaactaaaccatcacctgcaatgtttcctagagcccatacagcttgttcactgatgtgagcatggggagatgctaacagagaaatgaatgctgggatggcacctccatctaccacagccttggtttattctgatgtcccagaagcaatgttagcgagtgcccaagcagattcaaactgaatgggactacaatcagttctgcccaagaaggacacaaattttggaatcaaaccagcccagattatgttgcctatggggggctgtttttctctagaaagtagtttcatggcagcttgagtagcttggagctgactttccatattgttgctatttgtgcctttgacaatgtcatcaacagaccaatttacagtgccctggtttttgcggtttttctccagcggagaagcagcaacatcaggaaatgagcttgcatttctcctcttcagcatctggtcattcctcttagctttcctcagcttcacattgacttctattctgcgacacctcatttctgtactgtcttttcacttgttcttgaatctgttaagtcgggcaactggtatattagcattctcgttggtagacatggttgtgagacaaagggaggaaagctgcaaagcaggcccagggttctacaggaagcgacgcagggatcggcggctgtggggcggctacgctcaaagcgtccacttcgactcagctcaaagaagtgttgtcctcctgatcttaattagggtcagaaacgtcacctccttcccaccaccaggtaatctgctcactggcttatttctctattcctcatgctgggccaccttcccacgtagacactttcttcacccttctcagtctccaatgctccatgccaggctgtccttccctgcaccatggggacactctcctcgccctgcttggctttcggcacattgctgggactactttactgtagctctgcaccaccctagcacccagtgcttggcccacctaatggcttttgacctgaattgttcagtgagaatagaaggcaagagaaagaggagatagcatttgacacctagaacacagtatcagggaaatgtgagtacaaaacgaggtaaatccaaaagatatacttgtgcataggaggggaacagtgactcgcaaggtttctctggagcatcaagtatatgaagggactagacttgttgaggtgaggatacaaagctaagttgtaatgctattgtggagggccttccattgttaggaaaccacattccattgcagtaactaggtaggtgattaatatgattggttttatgcttcaggggactaattatattgaaatatggagaaggtataggaagaatagaatactgttagagcaattccttcgagaattgagaaactgacctgcaccagagctaagatagaaggcatgagagaagtgatgcagttacatgactttatcattctaggatgccaatccaagcctgagctgctttgtgaaggtctgacattgcacatgagataggactttcaacaaactagctgccaggtgtcttggccttttttggatattctagatgctgtggttgtaggtgctgtagttgcatcacctagattcctccttcagggctgaaacactaatttccccacagccaggattttgctgttgacagctcacaactgagtccctcctcataactgccccaagtcaaaagaagctgccattgcttaaggttatgcctttcccctgtagagtggaagcccacatttagtgagtgatccatgaggggtaacaaacactggctcccttgtctcactcaattcaggacaactatgaaaggctatcacagctccagagttacctttggtggttgcctgaagcctccttcggaattccatcatggttcaagtttctctctgacagttcctgcttccctcatcccttcgttgaggttttgctgcatgcctcaatatatctcctgcatgcaaatttctgaatctcaagtctgtttctgagaaactcaatttgagacacatttgatcccaaatgcaaatgttagtaatcattctctaacattagttagcaccccctattgtcatacatagagatattaatttagaggcaattgcaccttccaaaggcattgtattcactctcaggaactagttcagacattgacgaaatctagttctttaatgactatgcctgataaaagttgaaataagctttatcacttataggtagtgaagatttattttcttcctctgaatcactgtagatatcatataatgaatcatttcccatgtgacatgaatatgaatcattttcagtatggtactcaacttccgggagagtcacgtctgtagtcgtgtatgccacaaaagatgtctacttgcaaataatatagattatataattttttacacataaagaatacttttattgtcgttgcttatttgcctttctgttagtttatttgttggggtatggggtgatggaaataaattcacgacaggagattgaaaacgcaaactgcttgagaatagaaagtctaacatttgtgcttaaaacattacctgatacatagtaggtatcagtaaacattcattaagtataataaaagaccagtaaataagtaattaaatataatttaacgtgtagtccattggagctctgcaggtaggaaaaaaaggacaatgagaggggggtctagtgaagactttaaatcatcaagtgtcaatctcaagctattctaactgcattaaaatgaatttaacatgttttggggttcattagcatttttattaataagtttgatttatttatttattaagaagtttgatttaatacaaagaataattttcaaagagtgggggcattcatggattgtaaagccaaataattcagtggaaatacaaataatttgataaaagagacttttttagatttatttacctacataatgcagtatagagtctctttttctctctctctcttaaaaaatctgcattatccctcccattcttgatgtcagattgaaagttaagcagggtcccagcatgactgtcatggtacaaaagtcagtttgaaaccttacctggctattctccagctgatacaattcccagagtgctctcactgatgaagaagggaaagtactgctgttgctaccacttctttttcatggcttggagagattttcatgtctgcttttgctttcatcttccctcattattgcttaggaaaagaatgaccaacagttttgcttgccaggaactatcccagggactgccctagttttagcatggaaagtcccatgtccatgagactgaagacacccctcagtctgtgacaaattaggacacttggctgccccagtaattaatgatcttctgattaatttttattaaatgaaagtgatttgattagttattggtctgaggccattttttgctttgctgtagatcttacatgagcaagtcagtgagatgcaaaatgctccaggactgggatgaattctttacccaagcaaacagataaacaaaaaagtgctactatttttctggtatgtcaatattctctgccagccttgtactcaagaaagaagaactgagtgggagtactctcagaaggcctggaaattttgaggaagaatgagttttaaattgaggtattttgctttagtttgaacctaggacaagatggattcttagaccagtttgggaagtcccagaagatgagcaggtaattagtcaagactagggataaaggaaaccaacaaatgtgagtttaaaatacttccttaggaggacagagtacatggttagtatcatgtctcatatttctttgccttctgtctccttctaacatgaaaccaattgtcacttttttggggggatacattttttccccagattttattcaataacatgctgatgtggcatataatatctttgattctgtcttaagattaaagttgaaaatggaaaccagtttcaaccagcaatgaatacaaaaccttgaaagatgaacaagctgttgatacaaatttcctgaaaatgtcagcctgtttcagttctcttatgggaagtcagggagatttatgtattcaggttggaccaaaatgtgaaatgagaagtggcaacacatacctggagactggagggctgcagaagtaatcagtattttagaacctcaagaaaagatgaagccaaggaggacagaattaaggtgctttaaggactttcttaattagtctcaggactaattaaggacttgcttctagtgcttaattatttgaaaattatgaaggctgtatgtttccttcttacaaaagtaaaagttatcttccatctagctagccccttgcccctcagtatcttcctcactccatcaggtaaaaagtggcagattgatgcagttgatagtggtggaatttccatccccaagtgaccagttggcaaagagtgagaagggatgttagccaccctccattcaatgtttgacatttgtaatgagcatattttcaaaatggaggtctgccggtatatattgaagttttcatccattcataattctcaggttagttgctatagtgatgatggtccaaggtaccattttattttgcctttgttaaaatagagatgataagactgacagaatgtactctgtgttcataagacaccaaattataaacaagacctaagaccatgccaggcaaaggtcaagtcacacactcctacacttaaaaaataaactatattctaactgccaaaagggttttctttttctctagcatctaaacaaacactggcctccagataagcaatattgaaacaattgcatcttactgactgcaagacactaactaattaatcctccacccctacccctgttccacaagccataactacagctctgactggacaagagactgattttaataactctcctgataagagaccactgaccatagactggttctggctggtttacagaggctgtggcactgagtgccttcatgtcttctgtttcaccttttgacatatagggcctaattataatacatttaattgttaagtctccacctcaaagtgaacatgagacatatgcaacttgcatgtttgcttactattcatgtttgcttactaaacatgcatgttgcatatgtcccatgttcactttgatgtggaaacttaacccacctgcttcagaaatatgcatagttcatgtaccccttgcttcagaaatattcatagttcctcctataacctgttgaatatgtatacttggccaactcatttagcataaattcctgttccaccctttcctccctcaaagtgcctgctttttgtctctgccagaggctacacttcccagcctgtcaagatgtccagcctgcagctgtaaccctttataagaaatgaagttctcctttccaaatttatgaacctcaggattgtttgtcaacatgttgctactgcaatagtctcctaactgctctccctgttgtcactgttgctaactccaaattcattgtctcattgcagccagaatgatctttgaaaaacacagatcatatcaattcatctgccactccactcctgggcttaaacccctctaataacctcctgtcacactcaatattaaatatctgaattccttatctcagtaaacaaagcatcacataatctggcccttgcctatttgtcttacatcatcttacctgcaaagctccagctacacagttttttttttttcttttttgaatatgctaagctaatgtctatggacctttgcagtaactccaaatgtttccccttagagctcttggaatgactgggtcttttttgttagtcactgagtctgtcattctttatcatcacaatattttaaatttctacaggccacctttccaatatggacattttttttccttgcttatgtatttatttcttattgtctgttttcactcttcagccagactgtcagcttcatgaaagcaagggcttgttatcttgttctgtgcactaacctccacttctggaacagtgcctagcaaataataggcactcaatgaatctttgttaaagtaactaatttttatcttcaaagagctgacatatctggttgtatatcaaatataataaatgaaaagttaaatacatatggcaacaaacagaagagatgtatatgtaagtactacataaagcattgattttgttaaaaatgaaaaggtatttaggttctaaaagccagttttgactaagggagggcggaagtcacggaggtggggggaagagagaggagggagagcagaactagtagacagaggatttgtgcacaaacttgagtgcttgcacaagttttgcaaaggagacctagcttgcccaaagctgaaattctccaaaactggagcttgcagggaaatgacagtgggctgaaatattttgaggtacaactttccactcccaaagaggcctgctatcccctcccactccccactccggcctttccttggcttggctttttttaaagaaaaaaaaaaaaaaaactaagcaggtttctttagaagaaaaagaggaagttcataaagagtgtttgtggtagtaggggtggggtggagtgaggagtgaggaggccgtcacctcccatggaatccttagtcttgggtttgtgaaccacgcatgggggctgttttagcacagctgctaaaataggccaggcctgcaggacatacgggtatgtttagtttctagataacttttgtttttctaaactccttcttccctttcccaaatctggcaagcgttagtcatcttcaactcggcaggaacccacaagtgtgcatgtgtggctcggaggcttcagctggggccccgccctcgtccccaggcgcacactgacacacgcagcccagacccggcccgagcgggctcctgccctcggcgtggcttctctccagccgggagtcccagggccagctagcctcctcccctaaaggggacggcctgtcagcgcagtgccagagtccagcaccgggaggaaagtttcggagtgcggagggagttggggccgccggaggagaagagtctccactcctagtttgttctgccgtcgccgcgtcccagggaccccttgtcccgaagcgcacggcagcgggggggacttcagccctccaggcggggtgggttccaggtccgggtccgaggcgggcgctggaggctcggccccaggccggagaggaactcctttcgcgagctgtcgccgtgggcccgcattgtctgcaggaactctccggaatcgggagggggaggactggatcgcgcttccactgggattcgtcaagagttccggcggcagctgcggcggtggcggagactccctttgtcctctcaggacctccctctctccctccctgtcagctggtgggtcccgctgccgcaggcgccggcgtctcagctgctcgccgccccccaccccagagtgcgtgccgggtgactcccgccacctttgcgaccctcctgagcttaggggactgcgagcgggagggagtctcaggcccccggccgcaggatggtggcggagcggtccccggcccgcagccccgggagctggctgttccccgggctgtggctgttggtgctcagcggtcccggggggctgctgcgcgcccaggagcagccctcctgcagaagagcctttgatctctacttcgtcctggacaagtgagtgtgcgagggaggtccagggtctcctggtgagggcggcactggatcagctggggctgaggctgagatgcgtgtgcgcaccccggggagtggtgttggaaacccgcggaggggtgccctgttgctgtcttctttcaaagggcaagcgcgttcggatctgtgtgggcggagatcagccgggtcgggggtagtgattggagccccgggctacttggctctttggggagttggggtattcactgtttgccagtcttttggcctcttgggaaatgggagtgtggcctcttgcgggccacgctccatcggccacagagtccttacccacctcctcgaccctgctcgtacgcaggctaaagtttgcctggttttatcctaatcatagcgctttcattggagccaggaaaagcctagggttaacatgcccaatgtggtttgcatttcctgcgaagaaaggcttttgtgtttactctgaagagctgggttccactctaaacaattaggcaggtatttacccaccccagaaaacgggctgacttcttcttcttctttttttttttgacggagtcttgctctgggactgacttctttaactctgggtaccaccaaagtttcagctacagatacccttacttagcttgaaaaagaggccaggtgcccctatgttcgtggcattgaagaaggaaccatttcaaaatgtttacttttcagttccgtgttttgtttctctgatcagttcaatttcatctttcaggtctgggagtgtggcaaataactggattgaaatttataatttcgtacagcaacttgcggagagatttgtgaggtatctttcttactttacttttctaggcagtggagaagtagagcaaagtgtagaatttcccttttctgaaaccttttataggaaaaacttttcctgaaatgttacttttaagtgcctcaaggtcgtattgcacacatgctgttattaggacagcccttcagtccttgagggcttatttcatctggatcccagaaacttggctcagactctggggaagcatcttcaaatactattccaaatgtctttttctttccgaattttcatctgttttgaatttcagttatgctttctcataatttatcacattaaaaaaataaattttatgcgaatagtatccataatatatttttctttccacacatttcttagcattatagaggccctcattaaaacaaacaaaaagtgttggaaaacttcaaatgaacatgtgttaataacccgctaccagaaaaggcacttgtgtgtgtgtttaaagcaacgacttgtgtttacacaatgtgtgggtgtgtggttggtttaaaatttaactgttctatatatgcaataagcatcaccaggaaagactggtttcctctcctataaaaagcattactggtatgaaatccagcttactctcttatttagaggtaactaggaattagtggcatctcctatttaaaaataacctcaggacactaggcttttgaggctttttttttccttcttttttttttaaagaaaaaatgcaatgagcaaacacaagtttatcaagataatggaaaggacatgaataggaactgtatcattaaatattgcttctttcagtcttgttagcccaaatgttttctgtaaaacaggcttggatgatcaaaacattttgaaagtcatgttgcaagtaacttcaaacaatctgtagaggcctaggcaatccttgctttcagttattggcagcagtaaagttatccctataaaaatgtatgcctgtccatgttcaatcatcagtcccttgcttaagaagccaagtttaacactcatttctggacagggtctgaggtaaaactgtctaggaaagaaaaacaaacaagatcctatgtccctaaatgtcaaaggcagaacagacagttgtttataaattttctaatttaatccttcaatgtgaaaagggtgtcatgtagattttgatcaaaagcaatgaatcacatcactacaacattttaaagaagcaagctcttatcttaactcattgatctggtttttaagttggaattctataatacacagttgtctggctcaagcctagttgctcaattactaacaatacattgtaggaagtgaataaggggtgactaatgaagagactgacttttaaaatatgtataagcctttgagaggattctgattttcagtttatagattctagtttcatatcttcagttttgaatcttagtagtagttgcagagagtgtccgagaagcaagaaccgttctgtgagagacatgcctaaaacttgaaagatatagctgactggggcacttgttgccaatggaaaatagcatgtttgagacttagaaaataaaaaatgcctaagcagaaagtgatttattgtttctttcacattttccatgactctttaagtagtcttacttcaggatgacttttttatagactcatatcatagttatggtcattaagtcaaactgggtactctccacccataagtgttgataaccataatcactttgaagggcctggccacctttaaaggaaatgttgtagaaaaccaagggaagaggaattttctacgaaagaattttacatcagcttagaatttatctttccagttagtctctctctaaatgcaagtccttatgggtcatggaggagtatgtgagtgctgggaagcattgactaaatccaaaatgacttatgcaacaatgttaagcagagttcgtctatttacttagggaatgtcatttaaaagaagcctggaccattcagtgagaccaattttaaatgaacctccctaactatacatctgtatcgtatcaatatttctttttaaaaatgttttaactgcctcttttcttattttgcagccctgaaatgagattatctttcattgtgttttcttctcaagcaactattattttgccattaactggagacaggttagtgcattatcatttcactgcaggcttttagtagagatgaattttaaaggcatgattgatatttccaagtggtgattcaggcctctcagtggaatcaagcagatgcacagacaattcagttctctaatagaagggaaaggaggtatgagtaatataaaagagcagttaatctgaaaatcaatatcatttatagtggctgtggaatgtgcagtgaaatctagatccctgtcttagttgtatattcaccacttcctaccttccccggcctctctgttactgtaagtagttctacatttttcttgtttagatataatatattaatcaaccaggaatttgaagaacattgagggggagaaagatatggatccttttggataatttcctagattcagtagacatcctggatttctggtctttctctgaggtccattaatgctgaatatattcacctttataagggaacttagtatatatcaatatgtataccaatatatctctatatctatctacctatctatttaatctccttagtgttttttaaaaggtgtctttttcagaccaatgtcacagtatttcatatgaccatttctgtgtcattcaaacagtgtcaatgacaagttagaaatagtcattgatatattttatgttatttttattttttgagacagagtctctctctgttgcccaggctggagtgcagtggtgctatcttggctcactgcagcccccacctcccaggttcaagcaattctcatgcttcagcctcccgagtagctgggattataggcacatgccaccacacctggccaatttttgtatttttttagtagagacgggggtttcactgtattggccaggttgatcttgaactcctgacctcaagagatctgcctgccttgacctcccaaagttctgggattataggtgtgagccaccacaccccacctcactgacatgttttaaagaatgggatccatagtgggagggagcttttattcttcatttttatgtctactttatttaacagagtatgtaagccagtttttggtcaataaattcttgttgaatgaatgaatgagtggtttcctgttattttgaaataaaatttttctgaactgtagtttcagcaagggaagctggtgtactttgttttgcatgatatgtgaatttctgaaaagttaactgtaaaaacagttttttgtaaattaagttttcccttgaaaaggtcaagaaatcataatatctaaaggaactgggggagagaacttatttataattcacttaattgatttagaaaattatccgtataagattttaatctttgtgcttttagttttccttttcctagagaggaaaatctccctgcagatgctgagtgcagcctaggatcttgtcttcccattgatacttctcctttctttcttctttttaaatttaatttaattttaattttaagttctgggatacatgtgcagggcatgcaggtttgttacataggtaaacgtgtgccgtggtagtttgctgcatctatcaacccatcacatgcattagctatctatcctgatgctctttctcccctgcacccctcacaggccccagtgtgcgttgttcccctccctgtgttcatgtgttctcattgttcagcttccacttacaagaacatgcagtgttgggttttctgttcctgtgttagtttgctgaggataatggccctccttactttcttgtgtggatgagaatctcatcaggagccagagccatggtagtccacaacccgtgtatggcagctttctatgctcagtgatttaacagttctcgcctttatgaaaataaattttctccattgcccagcttaatttccaaagaaacagccttgtatctagccaatccagaaaaaaaagaaccattttaacatttatggcattcctatatatagaaaaacacttagcatcatgccaggcttgtagaaactctcagtcattgatagctgcaaacattgtgccaggttctttgctagacactttgcatatggttcctcagcactttgaagatgaagtgtaggtcactgggtgaccagattggtattgcttagatacgcatggaaggggtttaaatctttaacccacgttagtgattcttctttcatcattggttgaatctaataggggagacactgagataggttacagaagaggcctttctttctttcttttttttttttgtgagacagagtctcgttctgttgcccaggctggagtgcaatggcatgatcttggctcactgcaagctccacctcccaggttcacaccattctcctgcctcagcctcccgcgtagctgagactacaggcacccaccaccacgcccggctaattttttgtattttttagtagagacggggtttcaccgtgttagccgggatggtctcgatctcctgatctcctgacctcgtgatccgtctgcctcggcctcccaaagtgctaggattacaggcgtgagccactgcacctcaccagaagaggcctttctttaaagaggcagcataatgttgcagctaagagtcactagaccaaatctacctgcgtgtaaatcctggctttccaatttactagccaaatggtcaaggataagttgcttaacctctttatgcttcttcttttttcatctatataatgacggcaatgatgatgatgatgatagtaatacctaccccataaaattgttacatgaatgaaagttgatgaatgtgaagtatttagaacagagtctggtatataagttttcaagagataaaggctttatcactattattatcatctggagctaggcagtatacagtattttaatgatcagagaagaatcatgcttacataaagaaaatattgcccttcttaaaaggatttataatattccaaaaggaattttaataacactacttgcaacttgttttatacatagttggttcctctgtctcttcctaaatataaacactttaagttttaataaatttcactatttgtggcatttttaattagtttggggtggcagaaaataacactgagaatgcctaggctagagttccagttttgtcactgactgatttggaaacttggggcaaattgtataacagtgtatcagttttatgtccataaggtgcaggacataaaatcttccatatttgagtttttgtgaagatcaaaataagataatgtatataaagttcctttgtatagcataggacaacctccaataaaggacattattttcttgttctatattgctattttactaattttatttaattaaatcagtaacttctcaagtttctgtggtcctctatatttggatatagggtcacttttcctccattacacacttttaagtgtgaagaaacaatttgcatattatatgcagatcagtaaacaaatgattccacaactattgtgaatctttgtttcaaagcctagaaattggaattctgcatataaactattaaaatcttgatgttatatattacaatcacaaatagatcagagtgtgtgaggaaagcaaaggttaagcaaagaaaaccaaaggttaagcactgcaggtttcacaattttgtttctagcactcataattcttcacaatcttggtaaataagtagctctttcatgtttctcagagtgttgctgaagattcttagtagagatgaggcaagattagaaggtagtaaatacttaccgtagggctgtgtcttctgttatgctttcagcatggcatccggtactatgtaaatgcatgaataaagtaataaacatgccaaaaaatgatgttatgcattttatatactcgtaacttaaaaaccttattcttttaaatactttaatttgaaacactgccttcttttctcttgctctcatgatttttaccctccatatgtctgttagtccattcctccacctacccacccacctacctaaagacttgcttatcttatattcaatgcattgagtactgtggaacctggggtaacacaaagataagtaatctagtgtgtgtgtgagtagaggtatacacatgcacataaatagcccagggatgtattatagggttaggtaagagaaaaatgccaagtgttgattcagtatggaaatacccagcctttcaacagtagagaatttggaatcaagactaattaaaaagtatttttagttattattttgcataattggggatagtgaattaagctcagttctgttaaatattatgctaatactgtaacagagatttagttgaaaacatttattgaacaattattatgcaccaggcagtgtgcaaaatactttccatgcattgcttcacttaatcctcatatgaacttcctgtaatagatactgttattacctcgactttacaaatgaagaaatcaaaactgacaatgataaagcggcttgtccaagcacacacagttaacaagttgcaagcagtatattggctacaataatcttttaaagttaaagccgatattccactctcatgcttaaaacaatttcatcacttagactggaaagccagtgtttcccaaaggcctaaacgccccatcctagtgccccagccagtcctctcctgcaacatcatgtggcacagtctagctcaagtggtcttctttccattccctgaacagactgagcttgtttccacattaggacctttgctctttctttgctgcagatctgcccctagctggctcgttctcctcatttaggtttcatcttacatgccacatcttctgagaagccttgcctggccagcaggtctaaaggaaccccacctctcctcccccgtaatctcttacaatactatatttggttatcacattttcaagtggttctgttggttaatttatttttatcttgatgactctaatgtaaacatgaaagcaggagtcctcatttgtcttgctcccccatgtatcccaacacctagaacagagcctgatgctcagtagatgctcaataaatatttgttgaatgagtgattgagctgatatgacttcagaaccttagttattagctgccatcatagattgtctttttttgtgattataccacataataaataatcttatatttgctatttttcttattcctactcttacaaatcagttataaatatttatgactccctttcattacacttgcccccagcctgaaaatgtcttataattgtttgacctgagcacaataatcaattacttggggaaaaaaatcttccgtaggcaaacttgtaggaaattatagaaaagtcacttaattaattttggacaatatacacatttctattatttgaatttttttttctaatttcttaaaagctgaattaaaaatttacttgtggaacaattgttctttatatacagtaagtaacttattaattggtacattcattttagaggaagcttggtagtatctataaaagtctagaaggttcctttcagtaagtctactttttgggactatgtcctactgaaatactagcattagcatggaaaggtaggtctaaatacaaaattggatactgcaacattgtacataatggtgaaaaactgtattcaatctaaatgcttatcaattgatgatactataattaaattagaacatatacattggatggaatactatgcagttattaagaaataggaaagtctgtacatatttacaagagaacatataagagatatactaagtttaaaagcaagtagcagacactcttagtatgattttatttttataaaataaaaagaaaacaaaatccctaactgtttatatggtgaggggggtgtatgtgattgaaaatgcaagaaaagaagtctagagaacatacaacaaattgttaacaatgacactgtcttaggcatgatattgaaggtggaaaaaaccttcacaattttaatttatatatatatatgtggtttgattttatttcaacaagaatgtattgtttataaaaaaaatgctgaaattaatgttactatcttggaatcaaaatggaattcagaggttggaaacaagaagcattcaggaatagagcatattcaaccattactatggagagtcctgaggttttttgttaatgaaaggaccagaattggaccttgggtggaataggcataggagctacatactagctgtgtgacttctaacaaattactcaccctcttgctgcccaattcctgggccagttaataagagtgaattattcctaccatacagcaatcttgagaaaagtataatgtgtgagaaggactaactaaggttctacacataaagagaacacaatgggtatttataactttatcaattcacttttatttctttgcttctatcgcctacctgcaactaactaccttttaattttttctcatttatagtttttcattttttttcatttttcttttcttgctgttgctttgatgattgcataggaaggaggccaaggctaacatggggtttggcagttatcagtggacaccatccttattttcatcatgatgtatcaggattcgagcagatgtttaaagaaatcaaaggactatgctcaaagtgacacagctaagcagctagagccagggttcacacccaggcctgatgctgtgcatgagcacttcaccaccgcactgtattcacactctctgggttctccttctccagttttcaatcagtcagaattagtcacaactcaaaaacatcgtcattccctaaatttattctattcttaaaaaccagtgagggggtgaaaagatgagacaatagttgggttagctaaaaaaaattccattaggcaagtatttactcctgttttgaaaagtctgttttggccacacattgtgctaaacctgaggggtccaggcagggcagcaactcagattttagtgatggacatgttagcagtcactttcgctgaagtcccacatctgttttatgagcatgttctagaaaattaagtacattgttactcatgcctgggagacagacctggcacacggaagtggtaaaatgcaggggttgatttttcatgatttagtaaggcagtgagtgggaaaatggagtaaaagtatgcaaaacgcagcaggcctgaacttcaggtgtgaattgagtaccacattttggtaggtgcaggccaaattggagaatatttttgacaaaattcagattgtacagggtattttgtgagcagatatttctggatctatgactgctaccttggatttgctggtctggactctggaccacagaagccttggcctatgttggcattagaatgacatgttaaataaacaataagcatattttacatagactatagtaagatacagctaaaacccattagttcccaagattttagaatgtattagcaatagcaatgtgtgtctttagaaaaaatctttcactcatttgaaacctttaaacaatttttaaattgaggaacttggtgagaacaaattacttgttagaggttcatccgttaagcagtatgtagggcagtagtatatagtaacacagttaagtagagcaggtatatatgaatgaacatatttctcttcatacagtttttttctatttttcttactcaggttaattttgtggtttattaatggaaggagacaataaaagtatcaaagtttactgagcagttactatatattacatattttactaaattcttcatatgcaatagctcaggtaaagtacaattctaagtgaattctaagtgaattataaatcattagcaattttgtatagtcataaataacatcttgagaacattttcgtttcatattctactcaatctattaaattttaccctaaaagaaacatttcaggatgctgtgtaattggctaattatcataaaatccttatgtattgctacattttgttttggaattactgtttatttcaagcagattaagtctgtggctaataatctattgagagtaaagaaaataatttacttatgatataaatacctatagtattcctgcaattatataaattggcatttgacaacatgagtgtgtgaggctttttgttttagtggtagattatttctttggtggcttccaatgaagcatagaatacacacacacacacacacacacacagaggcacacacacactttttactttttaaaatctgggtctaggcctacgatttatttacttcagtcaatagaatgcagcagacatgaacatgaaactgccagtttgagttccaggcctaagatttattaaggcatggtagtttcctctattgttttcttggaaaccatctgtcatatgaaaactttgactactctgagaccaccatgctaggaagaagcccaacctagccatgtggaggagaatcgagactctggttaacagtcttagctgaactcctaggcaacagccagtatcagcgctggcaccgacttgctaaccatgtgaaggcattccgcttctagccattccagtggctcaactggcagcatgtgaagcatgagaactgctcattcaatgcacagtgccatgagaaacaatcaattttgctgataaccactaattttggggtacactagactccccttatctgaaggagatctgttccaagaaccccagttgatgactgaaacaacaggtagtgccaaaccctatatatactatttttttctatacatacatacctatgataaaacttaatttataatttaggcacagtaagagattaacaaccataactaataacaaaataggacatttataataatatactgtaatgaatccttacagtggccccatgggggagatatttatattcctattttataaatgaagaaacaaggttgagcttggaactaatctctattctgtctataagctcatgcacatcttcatccataccatcccagaaactatttatggtttaagagattatcctatttacccaaaactctcatacagaagcaatgactggcaaaataggtaattcaaaacgcattccaataacacaagaaagttttaaaattaggttagatcagaggttcttaatcctggcagcgcattagaatactctggggagttttcaaaggccagtgataaccctgacccaacacaaacatgtgaattagaatctcttcaaatagagtccagaagagcttttgaaaatcccctcaaatgattccagtgtacagccagggtggagaaccacagtgcatatatagagctttatgtgagtgacccctggactgagtgtgaggaattctcacatcactgtgtagaatcacggtgttcacatacaacagatgctcaacagatgagtgtagactcattgactgaaatcctgaaagagctttgaaatctggaaagttaagacaatgtgcattggaaagttcaagtactgtacagacacatcgtagaaagaaaaagtaggagatactgaaaataaaattatgccttcattgttagttggtcaattcaggattccctgcagactgttttatgacaccatgatttcagtctatctttattttagttataatgccttgcataccttccacatccaaagtgtttcagagaaaagctactgatatggcacagtgcatggcagttgtggtggctattttcccttcccttcctcactcctctcctcttctcccctctccttcccttccctgcccttctcagcaaagaaattagggagatacaaatagagctgaaagtgctaatttcatacattaaaaaattagccaagcctgggcatagtggctgaagtctgtaattccagcactttgtaaagtcaagatgagaggcttgcctgaggccaggagttcaagaccatcctgagcagtatagtgagaccacatctctatagaaaatttaaaagtagcctggtataatggtatatgcctgtagtctcagctacttgggagactgaggtgggagggttgcatgagtccaggggtttgaagttgcagtgagctatgattgtgccagtgcactccagcctgggtgacagagtgaaactctgtctccaatatatatgaagcctctaaatgaaagcgaggaaaacaccatatatatatatatggtgtttgtgtgcctcctctctttctctttttccctccagttgataatggaatttggtcccccaattctcaattaaagaaaaccagggctttaatataacattttgtttgttcaattcctgtctctttcaaaaaagtatttgaggctgcatagaaattaatagtgttgcagaaaattaataaaatataaaaagaagagtgctaaaattttggaaaaggggatgaaacactatgataaccacatgaacttaacagaattttgtgaatgagtaagaaatttactgtgggcttccccagtagtcaggacaagaaataagtttgcatggttgtcaagtgcagaaaagaggaagtacatagcaactacttgggggtgacaaagaaacttctgctttgaaatgttataggggacgatgcgtgtcatgacagcagcatccttgacaactgcttcacaacaaatacaaagtagtttcaatattgcttttccctgtagttgaagacataacttgaaagccaaactcagtgaagctgatcttctaagatgttgaattcaaggagttgaacttatctttataacataacctttctttcttcttgttcttaaaattttagtcattttcgctttcatttagaggctttttttttttaacattacagtggggatgaatgatttctgtttttaacctaccacattattttgctttttcaccgttaactgtttaccaattgaaaaacttaatatttattttcagttgcttgggattcttcaagggtctgagatctgtctgccctgtcttgttttggcctttgtttcccctaaagtgataccttgttgattgataagaggctgacagacttcaggtagttaccctgaagggagtacaaggccaggactcacatgtgtttttcttggctatggaaaaggagcactttcctcttaggatcatgcagctgcaaaagtaatgatgggattgagtggagcttggaatcttatggtgcaggtataggtacagatagaaaaaccgcaaactgctgtctctcttccagtgtaataagctagcagatacctgagtgtacaaaaaaaaaccttgaatccacgtttgggaagttcctttagcttaaagtcttgtgctggtgttgtctgggactcagcagcaatggtgagctgatttgaactgaatggagaaggctgtcttatgcaaaatctgtttgtgtaaacttgcatttcacttgttggcagcaaacactaatgctcaaagacacactgccactcatttctgaaaagcaccaaatatttgacttttatctgcattcagacacaatcagtttcaagttgtttctgtagctatcaaacgtaaatattttagatacaacaagcttatgaattacataacttatgctatcatccttggaattataatttttttatgatatattgaaaaatttattgaacacttactttgcaaatgacattataataagtacagagcaggggaatacagcataaataaaagacatggtaatagcctaatgtaaactttcagtgtagttgaaaagtgaatatttaaattaaattagttaaattattagaaagttgaatgtttttaggagagaacttttttttattatggtaaaacatgaatatgagtatgactagaaagcttggggtgactcagaataagagtgtaatgaacttaaagaatggttcagaataggtagactttaaaccaaatatttaaaaagacaattagcaagagttaatagagatgagtgaaccaggaaagagaaggattagggtcataccttgaacattgtcttctgttacctggaaactttatgagatggaaaacttgcctgataatattttttattgcgatataaaaatacaatcaagaagttacttttaaaacgtatataaggctctggtgaatggattatttatttcaattatttgaaacacaatattgcagcatgacaaaatgttttgaaattatttttgacatattttataaccgcatgtgatataaacgtatacacacatgtacctatataaatgttgtgtatggccccagtaagttccttgatgttaagatgatacttcttacaattaatctccttcatctatcatcctcagtaggagtgagtactcttcatgtgttatttacaattttctaattcagtttatcatttcaagaattttacatttaaaaaggcacttcttatcacttctcagccttttggttaagatcaagtgtagtatccattctcaccagtttaaaaaggcattttttttgtttctattgaaaaagtctgaaaacaatatcttaagatatcttcttatcttttaaatttattataaaacaagttttgaatttaatttggataattttgccacattattttacttatcttttaagataattggttttatttattttcgagaggtttcaaatctatattttaaaaactctaaaaattgggacttcccttaactgatacacataaaatagctcttaataatattgtagtcataccccatttagacaaattcagttgggatagtgaattagtcatgatgaaagaaattattctatagtttttaattgctttcattcatagtgtctcttccaaggattcattaccttctaattcatccatctatccatacattcatccatctatctatccatccacctattttttcattcattcatgaaatatgtattaagtacctactatgttcaagggaatgtgcaagggaatgtctggatgggtgagaaggtgtcataaaagtgaataaatcatgagacttacgactctgggagacagtaagaaaaaatgttaatttctgtaaataagggctaaataatgtgctttagcaattcgcagataacaaggaaaatttcccacttttagagagatggagtgagtgtttcagaaatgctttgtcattgaagatgagctactcaatttttgtatttttgtggataagggaaggtatattttactccttttaggaaaacgagtgattgaagatatctgttctcagctcagaaggcctagaatatgcaaagatttttcaagacattgttagcacatcaatgtctatttttggtagttaaaatacagaagttattaaatacttactaaaattacaaaaagtatatgaagttatctgccttcaaagcccatgttctttcctctgcttcctactgaagaaagcttagttacaatactgccatgttttttaagaagtgtttattgttacctttgctctttgctcattttttcttttgtttaatattattttcagaggcaaaatcagtaaaggcttggaggatttaaaacgtgttagtccagtaggagagacatatatccatgaaggactaaagctagtaagttcttttacatttgtaaatatgggagagaatgctttcttattctgtggtgaaataaaaccctctagcaaagctcagtaacctcattacatatttatcttaaagtttttaaagtgcttttagttgttccagagttgagacaagtagaaaaaattatttactatggtgatgagaaaagttaagatggcttttgccttttaaggaattttccatttcccttgtggttatattaagattaagcagccacagctaaaaatctatataatttaaacccaatagtaactactctgtaatgtgaatatatgcatatttcaaataaaatagttaacacaaattaccctgttttaaaagctagccagtaatattttgattttgtcagacttacaaattcagcttgatggaacatgctggttaaaagttaaaattaaattgtgagttggataattattcttcattttcaggcgaatgaacaaattcagaaagcaggaggcttgaaaacctccagtatcataattgctctgacagatggcaagttggacggtctggtgccatcatatgcagagaaagaggtgagtattgaactgagactgttctctacaccccactgtacatcgctgtgtgtctcggaatgtatagcttgatatttgaataattcactttctccctctcccctctctttttttctctctttccctcctcattctccataggcaaagatatccaggtcacttggggctagtgtttattgtgttggtgtccttgattttgaacaagcacaggtaagttacaagagatctgcaaactttaatctgaaccacataattgtcttaaggatagtttaacaaattcttttcactgatgacattgtgacactggtcgattgttaaagattttttatagaaatggctgtaggttttgagtactaccttaataatgtaagaattttaataggttttgttactgaaaatgaaactttaaatctctcaattgtttggtttggtaaactaatataaggtaaacatttggcttgaaatgatacacatatttctcttaactcaattgacaaaatgttattatattatatatataatatgtagtcatattattataatgttagaatttctattttatttagaatttgactctaatgaaagtccatctaatgaaagtctgatcatttttcttacaagaccatttttttcatgagatttgagggtttatatatttgaaaatgtttcactcatgaagttattttacgtttaaatttttgcttgagcatggcttagactcctgagtcacgctgttgatagctgttagagttctgcactgttttgaaattgcacttggggccaacttaaaggtactctgactgatctcaattcattttgtggtaatacatttagagtaacactagtatcatcacctttaattcctgaccttgaacacagatcacgctggtaaattaatcctgtggggtaatttttcagatgaacataactgaaatgtaacgaagtttataaattgttgtatgtgtcagccactccttaattaagtcttcctcttctttctaaagcttgaaagaattgctgattccaaggagcaagttttccctgtcaaaggtggatttcaggctcttaaaggaataattaattctgtgagtatttctctgggggcaggaagggctcataaccttgtatatttttttaaactataagaagtaatcttaatatccagtgcaggtggtcattatctagaggaaagagattaaggaagagatttgtttggtattgcaaacagtgtaattctaaagatgtgaattttgtttgtaactgacatttggtattaattcttgcatgttgggctctgtgagactgggtttgtggtttcaagtttaagattttaagtctcagacactttcaccctttgattctggagttaactgtcttgatatcctgaaagttttataggttttataggagaaatttaaaataaaaatttggattgatgtgtgattactcccttctccaaatatagtatctgttttaactatatcagtcaggcaacttgaactagtggctatttgactacatttgttgttctttccatttaaatgattaatagtttcactagagcacataatatttctgtttggaattcagttgtgctgtctctagtgatcattagaatctaggctatcctaaacagggtttggggaaggagagtgatgaaatgcaaagcaaaactcctgggctttcatagctgaggtttatgtttcattttactgccttttgctacaagcactgggaacagttgctattaagtatttatgatattttggtaaacaccatcctaaaatggaagtgaataatatatattctctaagccaaagcattgaaaaaaaatcttcaggggaaaaaatatcagtttcttctaacatttggttctgggattttaaatttctctttaaagatcatgttgtttagaaacacaaaatgagatttattgtatttgtttttagtagcacgtaggcttttaaaaaaattaatggagcttttcagagaaaacataatttggtttcatcacttatcagtacatctagtggacaaaccaaatgtaagtgcagaatggaacagagattcaattatttttgtagtttacatatattgttgtgtttaggttttagggaatagttgcagtgtaaaaatagtaaataattttatagctggattcaggataaataaaactgatacaactgtgatttaagttttaaaatacaggatacagtactgacaatgtaaaaaggaggataatttgaccctctaaataaacaaatcagtggattgtattttaaatagaattttattttgctctgggatttgtaatgatttttataattatactgggaaggagaaaggacctctctgggctattcctttggatttttttaatatctaaaaggtttagctcagaattacccagatgatggattgtttccaaaactctatttttatgggtaataactacagatttccccttcaaggaattagtagctgagttccagatgacatcgttatcattgttttattatgtttgttggatacatttaatttttctatttttattagggaacctctagaatgtaacttctaagtatggcctttcttgcctaaagttcttgatgaactttaacttaagttatgttgaaagatttagcatgaaattaggaaaatttgcattattttagccacaatttgccaacaaaatctcttgagtgttgtttggagggagatcatgggtatagttttcatgtcaatacagttaaatttcagctatgtgctcacaaagggaagagtaaattattcttaggaaagtcaccttttggggaaacatcgtagtatctggcagagttggcaggtggaaagaaggagccattacaaccaaacctggtttgattaatggttgagatttttatcaacgtgattgatagtttgagatttttgcccactttgtagaaattaaaggcaatgtaaactttcatgtattttcaagggcaaagattgctccatccctcatagtatacaaaacctataattttgccttaaatttgaattggactttataattgcatagtaccatctgatttttaaaaatatctattagatctttaaaacaaatatagtgtttctgtcacatggctaggagagatagaagagactatactctattctttatgatttatcaaactaatgggtgaaattatactgtggaatgtatttacataaagctaagccaatagaagaaataaaaaattttaagtctttcagatatgtggcactatgaaggcagaatatttgctaaattgataattttttttcctgctcattgttttttaaataaatctggcctcattgtcagtgcattaatttttatgaagttaatccttgaaaaaaattgacaacatggtttttattgttttgtttgttctctctcccctctaaaatccaatgaccaagatagtctggtccccttaatgtaagatatcatatattgttaagacatcatttgtctagaattaatttcttaatagcaaagattaagaaagttttattttggagcctttcttcatggtagttaaaaaaaagaagaaacactgtagtagttctgcttttacaactcaaaaatcaaggggctgaaaaaggcctttgttatgaacatcctgcacgttaaaattttaatgccttctctaaaatgtatttgatccagaaaatcacttaagcattctattttaattttggggaaaatgcattgttttagtatttttagatttctatccaggcaaacatggtatgtaacagttttggggaatattgatgtaatttccaatcttagctagttgcatatgaaggtttgtaattcattatctcaagtatatactggaaggaaacatttcttctttttctcctttttttcctcaatgagctcattctttcattagttcatttactgagcccttactattcttaaggcattgtgttatgattagaagaaggatataaacttgaataagacatattctctctaaaggggcttgaaatgaatgattatttgaggtttggagtatggtagtcccctgaaagatttacaaagcattgtggacatttagaggaggaaaatttcagtgagtcaccttaggggataagaaataatcttataacgcaattggtgttaaatgccaatatgcctatagtgtaaggtgacataaagacaggatgggtttagttatgcgaagttatgggaggcctttcattgtgaaatttgaactggactctgacaattgggatagatttaatgagaaacaaagagcacagaacttcaagaactatctgagctgactggctgaggtgtaggctggaatgtggtttggctaggatcatggaaggtatgggggataaacattgacgggtagcgtggattcagattatggagactttcacatacttgttttgagaatgcgctcatatttcataaataagtaggaaattatcgaagattaatttagagcatgggnnnnnnnnnnnnnnnnnnnnnnnnnnnnnnnnnnnnnnnnnnnnnnnnnnnnnnnnnnnnnnnnnnnnnnnnnnnnnnnnnnnnnnnnnnnnnnnnnnnnnnnnnnnnnnnnnnnnnnnnnnnnnnnnnnnnnnnnnnnnnnnnngtgtgaattccaactctgtcttgccaagtgacctgggggtatgtccggcaatgtaatttctctgagttttaaaaccctcagtcaaatgggaatagtgatttccattttgttgttttattttttaaattaaatgagataacaattgagaatgacctaagttagaagggcttggctttaaatcatttggtagaaagctaggcatggcaggaaactaacccagggctaatgatggggctcctgatccttctgtcgggcagtccactgagagagatgacccccaatctacttaaacaaggtcttaggtacaaaaggacatggcactgacatgtaagaggatcaaatttaggatgtgagtcatgacaacaaggatttttagatagtgtagcacacaaagtcaagcatttggatgtgcgctggtattaaatcctcaagccgtaagatcaggacctagccaacaacttggaaacaaaattcagtattcccatgacaaaagctatgtagaatttctggaccccacattcagaggagagacacaattcctgtggtgggacttatagtactaattagaaattcagagaagaaactcagtagttttggaagaaacagtggatcatcatagttccttagggattattcttggcactgggattctgtctttcgcaatggaactaggtcaaggatcatgagggaagcacctaataacctctttattctggcaagcatcatgtcaggaacagggtggggctaaacctccaggtataaaatctttgactcttgttgagctgggctccgagagacatggcaaatattagctgtcaaatgttaattattgttagtattaggatgggcagtgaaactggaagtaaaacgttaaatttgggaagcattaaaatattagtagaatttgagagctcactggctatagggttcaagagacagagagaggagtcaaaagtaacttgggcattctgtccctgactaagatgaatgactaagaatagagcaaaaactgtttttacagaggggacaagagggttattgtacaaaatggaagaaggcatagggcagagggggaagttgatttgagcttgagaacaaaagcccagtgggggatatcctttagggagttagaggccaggtggaatggaaaggctagaaaaccctactgtcattatgcttcctcattttctttctcccctcccattgtccacagacacaagcacatatatatattctctttttcactttccacttcagattatctttaaatccttggaatgttaaattatttttgtgttcttgggaaggtgattgcatgacttatatttgaaaatgaaattttatttgaactagtaaaggtcagactgagatgtgagtaccctgtgggttctagttcaatgtttcataatgcagactatggaagataacattaaaaataaaagaaaaccacagattggtgaataatatggaaagaataaaaatcaaaatgttctgtgcccttccttgtgtaaaaacaggaccatgggatgtttcactatttggaattattcccacattttttttaagaatacctcagaaagtattaagcagaaagaaataaatcagttgtgaagcatgttttataaataacccttgtccaaaagaattgagaacactacatcctaggtgatggtagttaatgccagagtttctaagtttttaatgggaaagtatacaagcataaataggaagggaacgatcatccatacatttaggacatttaaataaacctgaattagatagtttctaaagggaaaagtgaaatttcaaaaagtacctacattcatagtgctggagatataagcttcatttcacttttggagtggaatttttttctcagcaatgtctgttgttgtttgttcttagaaaaatatctaagaagaaaagtgtctaacactatattttatattgtctaacactatattttaatggaatgagaagacattgcaaacacattttctcttaaggcaaatcattttcatagaagagggaacctaataaacactctgataataccttagcttaagtgattttagcacactctgctatgaatgttgaccacttagttgtgaaaacttctatttgtaaaattacggtttgatgaaaaacctgaagcctgagcaactgtaaagatacattcataggagaaacaaaaatggtaggacttactcaaaactggaaaccaattttcaggactcctgttaaaaaggactggctataatgtaagaataactgtatatcagattattctaggcttctctttgtccaaggatcattagcgctgaatgtagatgaggtatttcattataataactttcacattaatggtatgaaggttgaaattgtattgccccaactcctgtttttgtttttttttttttttacctaatgcttaatctagtgttgggtaagtagtcattgcttaattcatatttctgaattataagtaaataaaatctatgcaagtttttgaaaatattcttatatttttataatatagttatggtatattggagcattaaaaattaacctctgattccatgtgcattagataaataaataaaatgaataaaaatctatgcaagttcttaaaaatgtttttatatttttctaatgtagttatggtatatttgaacattagataattaacccctgatttcatataaatttgatttcatcctcatatttatgtttcactgtattaagactcttttgatttcacatgacaagaactcagttaataatagtttaaggaaaagaaaaatagaatgttactggcctgtaactaggtggtccagagagggaaattacctcaggtacagctggatccaaggaatcaatcatgttgtcagggtcttctctctcagtaagttttgcctatgtttctatttgcctcattccttgtttagatgaatggtggtgaactgtaattgcaaaaggaggcttacatggtcctcagcaagtatattggaaagtgaggggtgttgtctttgcatcagtgtatagggtcccagataagaactctaattgattcggttgagtcatgagctcattcctgtaccaattctgttgggggcaagggagagagggagaagaaggcactgtgattcacagcctcactaggaccacatggagtggaaaagagtttcccaaatagaaaggagcactattcatagaagtgtaagggtgcaaaagtgtccagggtaggaacaaaaaaatcagtagtgatgacagctcactatattcaaatacatttaaaatattttgacatatattctaagaagacaccccattcctccgaaatcccacttgataataaacatagaaagtttcctttaaattattcattttattaactgatcttattttggcctctactgtccaaagctgtatttgtatttgcatgaaaatattccctaataatattattattttcttttttttaaaaaaaatttggttgggattgtagtttaagaaaattaaatccactttgaataaataagtacagctttgtgatagtttgtgagaaaactaaactaaactgatgacatttggttacacagataaaatgaaattccaaattttaatttcttaacattaacctgttggactataaaaggtgtcctacagaggcttacctgctcttaaaagcagatttaattgagtggaaggaaattgaacaggtgcagaaaatggttaatatttgtcaccaaatgtaccatttggtgtacattatgaggaaaaatgtacaatttctcaattatacttcattttctccaaatataataattctcagttaattcagaagcatttgttgggtactgggctgtgttcaagacactttgctgtgttttgtattaccaaaatgggtatggtccccaaactcttcagagcttacaatttttaggatgtgtatttggaaaattaatagaagaattagtaagatattttttctattattgttgcatagggaaacatttcatttgccatcctggatttctgaaaaatcaaatggaataaatatagactaagactgcttggcagatatacttcatgtcttagtaaaacaagaaagtgggcaaataaggctaatacaaaataatgtttgcatcagagtgaaaattataccatgaacaagtttcttcaaattctgaaatagtctatttattattattttatctcataagttcaaggcagtttttataggaagcttatttattttctaagctagcattaaatgattattttgagtttgtggtgaccaaagacaacaacgacaacagcaaaaccaaaaagtagtggcagataaacttgtttccaatcacaaactatgcatttttggaattttttctatattgtaatgaaacagcaagactgctaatatgatttattttaaatatcagaattgtgagatgtggaagaaactaaagttttaaaaaagatttattatatgagagtatgttcatcaacaatgtaatcagaactatccatctgttttgtttggagctcagaagactaaaagacaatgagtatgatttaccttcttccacagttctcttagggtaaaagtttgtttagaaatttgtcatgtgtgcttttattccttgcttacttgcaagacagaagagaatccatatttagaaactagtcagagtggtgtgtgctgtattgagcaactgatattttgaagctctaagcatttttaaggaatgaactcaaccaaaacatgtgattataaaatagcaattgttcttagttgaagtattaccccttagagaaaaatatatttggctggggtgtttggaagccatagaaaaaataaaaatcacacatctgaatattaaaaggtgaaaaggaaacaagacaagaggatgagaaacacctttccagttgtttttgctgcttatgttatgcagttggatgtctaattactaaagcttcattttgttagacctttaaaactaatacttttcatatattttctcctgatttaaacttgaaatctttttgtattggggatgaatcctttagtgtttaaagctgctcaatgagtcaggaaaaaaaaaaaaaaccttgcttttttagactctactacccttgccaatattttctgacatgctgtgggtcatggaaattggcagtttctatctgttaaggacacacctggagcacttgtaaattatttgtgatgatcggttgccagtgatgttatagatccaaaatcagtgtcaaaaaattcttgctgaggtgaatatttagaatttttaatagatttgtaaaaattttggagaactttaggtagcacatgtgaatgtatatatgaagaaataatctattttggggaggaaaaagccttattatttagagttgatcctaaaaaatgttattacagaggaaaccatttaatgggagttaataccccttttctctttttatatattctacctaaaataagactttaaaaagaagataacacataacttaagtttgtttctcttcatgttgtttttgtttttgtttagttttgcatctggtccaatatgccttataggtactattaattaccaaaatttgaatttatccaaataatttttttcactgtgtgtaactgaaaatatgctttgattaattcaaataacttctcagtaagctctgtatctttttacatgcataactcttagtgttatatgctctgttttttatgttatagtcataatggccatgcttcttattaaaaagttttgcatttactttttaattaaatagaataaacattcattgagtagctgctattcataagatattgcgctatatactttttatattagattgaattttgaatatgtggtgttattcattttaaaagtttttatttcattcttctggaatggactgcattctgttttccagatatagtatccttcctgttgccacttagaaattagaaaaaaaatatggattttaaaatatgtctaggcttatattaattgtaggaggtgtttttgttttggtcaagctgggtggttgatcttcaagtcctaaggtctagctcatagatgtttctctcaaattcaacataaacttcaaagacaacataggtcctaaataatattttgattttatctccccatcttaatttattgcatgataaattattatcttggatcgacaccaactacaactctccacaaatcccatattactttaaataccagaagaaaaggccataactatatccattgtgtatgtttttcaggacatgatattgcttttattacctcttatgtgtcctacgtttgttattatagcatgtgtcttttatgtaaacatattcaggaacttacaagatctcaatcaaagtatgattccacatgtatcatgaaacctctaagaaagaagaaattaagtcaaggttctcacaaaactcatgccttctgatgatttctggttatttttgctatggatgtttccttgacaataccagcaatttgtctttaccgtcagttattattcaatagttgtaaaaacttgattgtaaccatataggcaagcaagataggaaacttctttgtagcccgttggattcttggagtatttgtccctctgacttagcgttggttctcaacctccagcaaaccttgccaattctgattctagagtgaatttctgcctcttgtcatgtagaaaggagatttggcctttggtgaatccatgcaacctgaccatattatactagatatagactcgatgcaaattaatttgggacattcctagagtgtccaggcttaaacactgttctgatgcttcattcaagttgggcttcagagaagagacaacagtagaatctactttcatctcctgccaaacatctataatctcaaggaggccagcaggcagggcagtcacagctgactcttacggctggatctggacttgctgctaactgaaaacaaacccagagggatacataaacagctttatcttatcctgcacttctcccttgccaaatagaaaaattccatgaaattagttagcagtgttccctgaactattgagaatattttgcttatctgaactgtataaataatgcatcaaaattttatacgatcagttagaagcaacagaaaatgtcattataatttataaggggttaatgttattatcccatcagcagttttatcccaaaaacttagcaaagggaaaaatacttgggttttgaatttctcatgttaatacatgacagactttttaccacacattttaaaggaggcattcaagacacatcttaagtaggagagaaggtttcagtgagaaaggatagtgactgttattgcagagatcaaatatttaaaactaggcatttaattcactggcacaataggttggaatgcagccattttataccaaatatcagaatttagaactcaatatgttttttaaaattccatatttgtataaatttttggggtacaagtgtaattttgttacatgaatattttgcttcaggatgaagtcagagcttttagtatggaataagacacattgtacccactaagtaatttttcatcctccactcccctctctcccccatgcttgtgaactcttttctattgtatatttttagcagactatcagcacaagtcttacagatagtattgtgtataccaatagctattttgcctagacggattcctcctggaagttcatacctttatttctgcctattctgtgccctctgagaacaaccatcggttaaaaaggttttagagaccctgtgattcacaaatataagagggaaagaaactaagaaaaggaaaaacagagaaattggccttataggtagacctgtttttgcaatgttgggatcccattttagattttccctcatgctgcttgcatttcttgctttaaaattgttagactgcctgaatttccatgcacagttatttttcatagcttaacaaacatcactttgagtttacaatattatcaattcacatattcacattcaatataaagtatgaatgagttcatgagataagaataggtacaataaaatggagtattttgggagataaaggaaacctatatagagagcatatttagaaaagaagtaactgtgtgtgtctagcaacctaggtgagacagtgagggggagaggaccaaaggctaacattccatatgaaaaatgtacccaatgtcttctccatgtccagaaaaagtatagagaaagaaagaaaaacacccccaaacttctgcctcacatttctgctcccaactcaggtaaattctaaaattttagaactatgaaacctagatgtcattcacatagttagtaaagaaaatgtgttctaagatcatataacaaatttaatttttataaacggagttttgcagttttctaagtgcctgttgtcttcgaaaaccagagttagggcttgtggtagcttgttgttctagtatggcctcttttgtcttttaggttctgaatgatgctgagaagtaaaaactatgtatttttatctgtgcaaaacaaatttgagatagaaagcattaatacagtaagacaagaaagaaacataataataagagagagggccctaagtatttggctatcttataagttactaattcatagaatgattaaacattttaaatccaaagtcaatggcattaggaattttaaaacaaacatacattctattacaaagatacatgcatgcgtatgtttattgcagcactattcacaatagcaaaggcatggaatcaacccagttgcccatcaatgatagacttgattaacagaatgtagtacatatacaccatggaatactctgcagccataaaaaggaatgagatcatgtcctttgcaaggacatggatggagctggaagccattatcctcagcgaactaatgcaggaacataaaaccaaacactgcatgtcctcacttacaagcgggagctgaattgtgaggtcacatggacacagggtggggaacaagacacactggggcctgttgagggtggggtggggagagagagaacattaggaaaaatagctaatgtgtgccgggcttaatacctaggtgacaggttgatgggtgcagcaaaccaccatggcacatgttgacgtatgtaacaaatctgaacatcctgcacatgtaccccagaacttaaaattaaaattaaaaaaaaattttgagaaaaaaggaaagaagatcctaacaaataaaagcaaaagcttagtgatatactttcgaggataaggaataagccagattttagattgtttttggtagcattacaggagtccagacaaaacaggcagatacatttcactagtttgttaagagttagattttgtaatggttagattatccatcacaaacctggagggtggtggaaggtgctggctagaagaatggggtttggactcaataaaacctggggacaacctagttaagagctaattcttctagggcagttaaaaaaatctttctaagccccagtttcctcatcaataaaacatggataaaaatatttgtttattagacttatgaggattagctgaaaaaaattcataaaaagcacttagcatagttgctggaacataagtgcccaatgaatggttaactattatcatgttagaaattcttttgaattttggactactgatacttgtacttaatttagaaaatttgactttttgttatctatattaatgtttgaggacttaaaactagggattaggtaataaggtatataatttttttatttgtaaatactccttaatactaatattactttttgggtgaacagatgcttcgatagtatactttttcatggtgatatcaggttctttgccaatatgtgtgtgtgtgtgtgtatgtgtgtgtgtgtgtgtctatgcatgcgtatatatcccccaaaatatcaaatgatgaaattttgcatttagtgtgtgcatgacttaacataccctagatttattaagcacttgatttatctttaaatttgatctattggtctatggtgctgttagctctctctaatatcagctaaggctatatttagtagaaactattttcttttactattgaaacataatgatgacagcatatattagagggaaagtccttacaattttctctcttgtaccaatgatggagttgcaaagtattaaagataatttgccatttattgtggatgggacacctgatccaatgttcagtcagtaatattatttaatttggcaaaaattaactggagtgtttagaatgtttctcctccttgtcagttgtttagagatgacagttttaatataatagactcattttggtttattctattttttctttcctttcaatttttattttagattcaggaggtacatgtgcaggttgtgcaggtttgtcacctaggtgtattgcatgatactgaggttttgggtccagttgatcccatcacccaggtactgaacatagtacccaatagctggtttttcaaccctcatctctcttccttcctcccctatctagtagtcttcagtgtctactgttcccatctttacgtccatgagtacccaatatttagctcccacttataagtgagaacgtgcagtctttggttttattttcttgcattaattcacttaggataatggtctccagctgcgttcatgttgcctcaaagaacaatatttcattcatttttatggctgtgttttattccatggtttctatgtgccacattttcttcatccagtccactgttgaggagcacctaggttgattccatggctttgctgtgaacagtgctgcgatgaacacatgattgctttttggtggaagaatttattttcttttggatatgtatcctgtaatgggattgctgggtcaaataacagttttaagttctttgagaaatctccaaactgctttccacagtggctaaactcatattaccactagcagtgtataaacattcccttttttccacaacctcaccagcatttgttggttttcgactttttaataatagccattctgattgatgtgagatggtatctcattttggttttaatttgcatttctctagtgattagcaacgttgtgcatttttttgtatgtttgttggccacttgtatgtcttcttttgagaagtgtctgttcacccattttgatatcttgaacatttcaatttgtataattacttggtgagaatagactattaacttgtttttgtaaaactgttcaaaaaaacttatggtgcaaactatttgcattcagacatcaaattattttgatttctagttgttgctttcttaatattggaacatggtaaactctagatggaaaagaacaaatttagaacaaattttattttctaaaaatgcataaattctcttcttactcttctccctcctctctatttttcatttggaaatggttttggtgaagtttgtttcaaattatagatttctggatttccaacattcataatttatggaagaaatagatgcctcatcacataaattaactttatcctgactcatctgtgtcctaatatgattgttggtttgttaataagactttttaatatcctcattaatttatgtgttcaatgtttattccttaagcatttattggttgtaccgaaggcacaaaacaatgtgtaaggccctgaatgtgctgtatagtataattcaatctcatttctttcctcaaaaagtttgttttctagtagaagagttgagttatgcactaataatataatttaaggtccaaacagtttttttttataaataaaacaaactttagagaggagcatatgccatggaaattcaattagataacattagattgtgataccaatgttatgacttgtgctctcactatttgcttttcaatgaatgtgttacctgagtcacttttccattcaattatattatttttagaaaaacttattttattaaaataattatgaatattgaattaatgtaaatgtattgttattagcaaatgtaagctatactgtttactgcaggatatatctaacattagctatccttaatctctgcttaatttaacttgatttctttaaactcagactttaatagaacataaattgttgaatcatcctgaacctcttctttaaaattaaaataccttataggggatatacagggcctggctccaaagatgtagatcaccagcagtcctggagggtgtttgttcttcagccttaaagagatctccttaggagaattgcttatttgatattgctattggaattctcatttatttagaaatgttttgatggattggatcaaattaaaagaccaagtcaacatatgcacaattatcttaaatattatgaaatctgattgacttatggtcagtgctgatagaagagagaaaacaaatataaagttacaaattcactgaagtcattccggatgcatgttttttgacatgatctttagaaaatccttttgtaattttttgatttactttattctgaggaattgcagagaaatggtttctattgccaatagatgtaatctttaagtgcctcataattttcctgagtacttgaaatattttttcagtaatactgataaagctgtggctaaataactaaagagattataaactgaaagatgcaattagtctccttaataagatctgttttaagataaattccttcaggactgatgacagacaaaatagatttgggggttttgtgttttcctttaaccttccattttgatggttcactgttgtcactgttatctcagattggccaaagctatagctataatgtccatttttgttagttggaaccttttcagcttcatattcctttgcaaatcttttctattctatttccttcagagtcttgttatctgaattatgtccaaatttttaaagatgttagtgatttgaaatactacccttccaagagggcacattaacctttaacaagagttcttaattcttgaatccataaaagtgaatgttggttattgtagataaagtagcagaccaagaggaggtatttgggtgcagaaaggtctttgagtgcctatggaatctctttggtcatttctggatttaaatgggcctcatctgcagtttctcagatataaaattttacgaggtttgttttctaatcacaaaatcctcaatcactatgtgaaaagttgagtttattggaaagttatcttaaaaagtacaaattttccctcttttcagagatgtatattcagcaacaaagttccatgatttgacacagttgattttaggggctgagaacttatagttttgctgttattaaagaaagcacagaaagcatgtctatttcctgctacagtccttacttcctattctagttatgaaaaggagatgctagaaactgctgtaaataatctgtcttcaacttctgccaagaaaggaatgtcaagaaaggaattctggagatcatctggaatttgtctgactgataatatagtgcagagcagttctaaaaataaagacaggattgttgtccatgaggagcagcgtatttcatcattgtttttcagttgtagccttgtcccttgtgtggtggtttctgtttctcagaacaagctaagaagagcagttctgttcctgtgttctgggaatgcttgagtatggagtctgtgtttttaaaaagaatattggctcatataaggagtctatgttctgcaattgtaattttttatgcatgtaagagggactagcacccacaggaattaagcctgagaaatgggatagaaatgccactgtccaataaagagaagtgctttttaattttaattttaatttatttatttgtttgagacggaggcttgctctgtcgtccaggctggagtgaagtggcatgaccttggctcattgctgtgttaaagcgattctcctgcctcagcctcccgagtagctgggattacaggcgcgagccaccatacctggctcattttttgtatttttagtagagacaggattcactatgttggccaggctggtcttgaactcctgaccccaagtgatccctctgcctcggcctcccaaacggctgcgattataggcatgagccactgtgcacagtcagaagtgcttttttattgatattattttgaaccaccgcacccagtcagcagtgcttttttattgatattatattggtcttctgaacagaaaacataacagcattactaaacagggggtctgatttgttatcttgtttttgcttgattgggaaagtcaacatagattttatggcagcaggaaattttagttatctattcatacccaaggttatcagactttgagacaatgctcacttttcctgtgcttatctgaatttactttaatcaaataaggatcctacagtacataatcttaaaatataccctgaaatacagtgcagaagtttcctaagaacttggtagctgtacacgctatagttaatagattttctctgagatctattgaagtatggagaagacctcaaggttattactaatcttataatttacttcacattgtaattttagatctatagcttggtaatcttttttttttttcttttttagatactagctcagtcatgtactgaaatcctagaattgcagccctcaagtgtctgtgtggggggtaagtgtttagaatttaaaaataccatgtaagaaattgtatttttttcctagctaaaatatatgatatgaaactcatgttggaaaaagaatagcaaaattaacttttttggcatcttttttgtgtaagaatttttaaataattccttgaaatatttctattttaaattcaaatttttaagattggaatgttattttaaataatgagcatattgtgtgacaggcttttagaatcttctgtatatttagttcacgcttgagacctttcctatggcaaataaaataaaatatgaaattgtttcttttgtctgattatacaaacagtcaggtatatgtagactttgagctccatgctttgatgacctggacaaagtacagaatctgccagctcagggcacataaggaagtgacttatggacggattgcaggaaggaagcaggtggctttatcagctggtgctaagcacatactcaggttttcacacctcccagccatccttgcccagacagagtgtgattctctctggcctattttgtttctttttcaagcctgacctacagttcattttaacctgactttactttaaaaaggaaaaatattgggtctggtgggggagaaaatatgttgtgtaatgtaccatagagcctctcagccagttgtgcatggtctcacattctgcatcttctagattccctaatgaatgaatatggagatgtttaaggaaagtagtgcatctgaacttcccagggaaggattatcttccctaacagtgaaggttaatacatttctagagataacaaagaaaaataaatggaaaaataatattaaaatagtagctgttgtttattaaactccaattttgtgctgagggtatactgggttgtttgcatttataattttacctaatccttataacaacactattgaaagttttatacatccctggtttacagatggggaagctgaggcagagacaggttcagtacttgctactagtaattaccctgtttgaccctttcctgtctgacttgaatgcccatactcttaccgaatcacattttacctgcactttattttaacttgcaagtgaaattcctttcataacatagtaaatgaaaagtgggttggcagtagtttcttgcatagttaatgactatattatacttgtattatgttagatatgagaagttttagaggactggtaatgttaaattaaaatagagaacaggcctgaagaagccttaagcaggcaaaaacacttaggcctcgtaagtagccttaaccttatttgatttacaaatataattggaatttaatttgaactatttattgtcaatgcctacattaagaaaaatagaatttaagtgcaaccaatcaaaaacaaccaacaaacttatataactagggactttccacaggatagaccaaacaaggcaactgtgtaactataacccgtcaaatactttctttggtttacttccacgttggttctataaaagcctcccccttgtattcccttggtaaagctgccaaacctcttctgatttggatctgtctaattcaagaatcttctgctcaaataaactatttaaaattttatttgtgcttcaatttaccttttaaataagcgttaatcactattaaaatagttagtatactatcttgcagcttagcagtaaacatgcattgtctgtcaagatatttgatcagttaactttcattccagcctattctctcactctctaacaagttttagtgcttgcttctactataaataatggtacaataagttaaatcaacttttgtgactggccatcgattattagtaattcaaaatacgtgatcttttgattatttataggtttgaaatagaaaatgaatcaggattagtaaggtgaagaagtggttaaagaagaattctgtatggaacaggcatagattaaagaaagtactacatacgacttttcgaagaactaaaaaacgtacataattagttttatttacattcccaaactttaatacctgagagtagggaaaaacaaagttttttccccctggtattttcctaaggatagaagttgaggaggtttgtatagtatctgtctgggaatgactgttaatgcttctgttctataccttggtcactactgggaatcactttgtttagaaaataaaataatgcatccccatgtggcagtgaatggtatcttcactacatttacctagagggtctgggaaagccagcacagttggaaatatagagctatgtcttcattgctattagttaactgaatagtatgaaaaaaattattctttgcaccttaatactttcatttcagcttgtgttttttatttttttggtaaagcagtgattaaatgtttatttttccttttacttctagaggaatttcagattgtcttaagtggaagaggattcatgctgggcagtcggaatggcagtgttctctgcacttacactgtaaatgaaacatatacaacgagtaggtccccagtaatctcagtgttgtcttaatctctgcaaagcacatcagcatcaaatgttttctttttttctccaacgaaaactaactgacatattttttaatctaagaagaaagaaatgaagtctgaatgataatacaaatagtagtgataattatttaatagttatttaataatggcaacatttgtttataacttaataaatgctggaccctgtcctaacttccctcattgaacagatgatggtttgtggctaaaagaatgaaattacttgcatgtggttacacagctaataatggacagagctgatatttgaacccacttttcctgactgtactctgtacctactacatcaaacacatgatttaattgcttctttcctcaggcttctttcttgtcacacctgccttaaaatctaattatcttcagcttctctcctacttgttcctttttttctttctttttttttgtcacttgttttctttatctaatttcccaataatttgttaatttattgaagatagtcttttttttgccttatagatttttgcatctcaaattctcacccagcatagttttggttgataattttcgtatttattgaattgagttttaattttccctacctttgacttttaaaaaagccaagagtacgtttttgttttcattctgaaaaaaccctccctcttaaatagaccttagttttctgagcatcttgagtatctatataaatgtttttccttattaattattatttgcccttcaaaatttatattgtaaagcagattttataactttgtaaactctggtagagttatttttttagattcatctgccattttgctgtttatctgagtataaacactccaattaacacagctttggccatacacacagtacctattcaatatgtgtttattgaattaaaatggtaaggatcttagcatgctaaatgtcataattaattcctctcttttctattaagatcacaattttagtaaggcaaaaatttacaaactctcttcatagtaggttccacaattgagtaggacaagataattttatttttattcagtagtcatttgtatctaagcattagcttcacctagctccttttgattacatatttgagttcattataaaataaacgtatttcatgtttagctacataagattaagtttattaaagtaaatcctcaaataagtgaaattggtattttcctcttttagattctagaatgatcagtttgactaagtaacttttctgcatattttagtctaaatcatttttttcatattttattaaagttacaagggcgatttaagtatgtgacttcataaaatgcatttatttattgtagacaaatgttttattaaacttgtgaaataagttcattttcctttggacatctaactttcaccttccttcatcttttctaaagtgtgcttttaaaataatacggagcatttgtttttaaaaatctgagatatttaaaaaatttaagagaaaatatattttataatatctagaatggtatgtgaacttagtctaagtcaaaataatcctaacttatgatttaccaacactatatgtcaatggagcatataatctctttccatttttcattccctttcacttctctttctttagtttttttatgttaatatatctagtattccacatttgaactctgattgaagcatgctgttcatattattaatgaaactgtgtgagatgcataaaaccctttactaattcagtggcattttattttctaggtgtaaaaccagtaagtgtacagcttaattctatgctttgtcctgcacctatcctgaataaagctggagagtaagtacttaatttaaaacaattttataacatttttagtaaaaaattattagaaaatggtgacatatacattggtcattttattctatctttttttgatatacagagcattaaaaagtaagccttgggcaagccacttaacttagtactaggcaagcaagttagtacttcagctatactcttagtaggttgaaaatgctaaaaagtgttttagctagtttcttcaatactgattaaaaggctctatgaatatttatctggatgggtttgagaactattattagaatctataaataatcagagccataaacattattttaaacacacacacatgcacacgcacacacatgtgtgtgcatgcacacacccagttcaaaagtgagattttcaataattactatagtatttaataaatattgcgattaaagtgcctcaagaacatggctaaaaaaaggcacaccttgcactaggaaatacttgtacatttgtattaacttgtgctttgtgttccatttctgttaaggtctatcttttcatcttcttttgtgtggccaaaaaaccacgatatctgctaaaaagaaaaataaatttagtttggatgaaggagtcttatttgaattgtttatacacaagtaattctactgataatttagtgttcccatttgtgatttttttcagttctatgatgaagcaaatgattacaaatagttcagatattctctagcccaacagtagagcatgtttaagatagttaataggatacagttttctaggatctctttatatagatctgatactgaaagcagggaaaaattacatatacaaggccacaatccaaaatctggattagtatttagagactgaaaatgatattttcctctatgaaactaagaaaatcattctagcatttttaagctgacttgaacatttatcttttgtggatacttaaatattcaagatatctatcgcacatcacttttggtcatgcaagtaaattggagcagtatcagctttctgttttaaatagattcaaagaagctgcacaagatggcttacaaaactaagagtattattcgttttctgtatcatgtaataatctatgttattgacaacatgcctgtggctaaattaannnnnnnnnnnnnnnnnnnnnnnnnnnnnnnnnnnnnnnnnnnnnnnnnnnnnnnnnnnnnnnnnnnnnnnnnnnnnnnnnnnnnnnnnnnnnnnnnnnnnnnnnnnnnnnnnnnnnnnnnnnnnnnnnnnnncccccaatctatctcccaaactgtattttccattttagttattggcagctccatcatttttgttgttcaggtaaaaatcttttgagtcattattgatttctttctctctcttagacccagtctatcaacaaatcttagctctaatttcaaaatttatccaaaatccaatctctgctttctacctatactgctaccattctagaccaagttactgccatctcttgcttggattattagtctctcaactggtctttctgtttccatccttcacaagagtgatcttgttaaaacagattattttatgtcatctcttcacttaagattctctgtgatgagttctttaccccactcagagtaaagtctaattagtgtaatactgtaccaggttctacagggtctggcctctcattccctctcagacttcatcttctatttgctctttctactcagttatggtcacactggcctctttgctgttcttgaccacacctgcacactcctgcacctgcacttttatacttcttgttgcctctgcttggattgctcttcccctgatgtagaactgtatgtgaacttagtctaagtaaaacaaaacaaatcctaacttaccctatttaatcatgcaatcttcctctttgagtctgtaacctgtatacctttttcatgttttattttttctccaaagccaattgtttgtctgttattatgtttctacttcctgctaggacacgttttgtcttgtttcttgttgtattactagcacttaacacaatgtctgactcatagtagatttactaaatgtttggtggataaaaggatgaatgaatttttcttaaatatttttgtttaccagttaacataacgatctgaaagaggtcatttgattggtgggatcaggtacttgtaccaggatagaggaaaatggtcagaattttattttggggggccatactatttaaagcagaaaaaaaaaatcttggctttcaaataatagtgactagttaaagaaagtaatttactttcttctctgaagtagttataaaatgcattatgcctgttttatcccaggcactgattttgttttctctagaatttgcctttgggcacagtcttctttagaagagaataccatcggggctagtgatacactttaattatttgtagataggttaaatacccaggagatacattttttaatcacacatagcataataaatatcagacatgagaaatcatcattcatttagattttgacattaatatttcacctacaagcaaactgagaatgttctgggacagagatgtgtctaaaagaattgcttttgtcttcctttcctggatcaggtacatgataccattgaagcaaagctttagattttatttgttaatgtactgggtatttggggacatcattatttattttacttagtatgttgcaagtaatttggacctttcctgtgccttgaattttcttcagacacttttgtaggtgatgagctctcttatgagattggattgaaatcaacacaattgaaacagtttagccttgtaaggtgactgatgcttaatatgtttgcctaattagcttttggctaaggattcaaacccattaagtagctagttagtctatgtttcagataaacacatctggcccaacaatgaatgaaggtttttcctgtgtgagggtgacagatgtggtgatagttcccctcattctctcacttaaataattaacaacatgctggtgaagtaaccctagacagagagcctcaaagccagatgcacagtctcagagctgcatccatgggcatgtgcctcatctcattagcctgctctatccgttcttttcttatctttatgttatttcatgaatttcactttgtttgaggattattcttttaaaaacttaaggcctgtggattttggtttaaaagagcatgtgggagatgggggagtaagaatgtagccgagtagctaggacataggtcgtcatttggaatttgatgttatggagtaaaggaaagttaaagttatctgggcaaatcctgtccaggtatatcattttgagcattgttcagatgggtctttcaataactttttttgatagatctgtctgatacagagatctgtatttattaaatttctttatttgatatagatttttaggctaagatgaacaaactcttattatttaaacagaaagaatggtcatagtagtgaggttgttttctatttttttggatgaacacggtttacttttaaaatggtgtatgattaaacaaactgttttaccaagaaaaatctgcctattatttagaaatttatttctaaaagtggttcctttgtgccaaattgtcttctttaagtttgaataggatgcattctctgatgttctttggatgttccctaatccagggcactagcctcacagtttaatgtgcaagtattacaagtatttgcaacgtgggcttattctatgacccttgttttgtgagacatcaacaatagcacagctgttctgcaatagttgagatctcaaacctgtaatttggcaagaagaacagagcaaattgggtaaatatacataaacacattgtgaagaaagaaaaacagaacagaatgaaccggagtcttatcctacagtttttttgatagagatgatttaaggaggcatatggtatagttaaatgtgctttcaaaaacattggccagaatcttctggcaaatatgaaataaatatctaaatcagatgaaactgatagtattagttctcttaaaaggcagtgtgggaagacacttgacagagtgttttgagaaagaagtggtgggacgtcactgtctgtggaaaatttcaaggaaaactgaaggatcattgagatgaacagtgtggcagaattgaggttagagcctggcttcataatagaatctttttattttcttcaactttttttttcagtattaagcctaatctatttttcctggaataaaattgattaattctatttctctttcttgattagataaattctgcctttactacagtttctgttctttccaaaagtatacttctatctgtatgtgtgtgtatgtctatagaatccctaattctcttatgttagtagcaggtgatacaaccacaacattattccttttgcttcttgtgaggaatgagattttattttttggaaaaatcatggatattaagacattagttatgtctttatttgaatatgaacattagaatcatgatgatatgggttaaagctaagggctttctctgtttctctaccccacacttccttggtggaacatttctcttttccttcacatggtgcactgttttcaaattatatctatcaatgtgataagttcacctcatctgcattgcctcttcatcctaagtattatatacggttctggcaatgtcttttaacacatgaacacctggaggggtggctaataagatgtcaccatgtatgggaatgttaaataggatacaatttaaaatactgaaaaaaatactattcagatgtgatgcattaactctccaaacattggaagatctgtcacatgacagacagatttgaattgttctttattgctataggagaaaaagggtgaagttaaggggaagcacatttcagatcaatataaggaaatactttctaaaatttagaattatttagtagataattctactaaattatttagtagataattatttggacaatgaaaagtatttaaagatggacacctatatgaggatgtagagaatattcttgaaataggtacttaaatcctcttatatatctgcttctaaattttatattatcaaagcttttcattattactaaatgtattagtccgttctcacactgctataaagaactgccgagactgggtaatttatcaaggaaagaagtttaattgactcacagttttacatgactggggaagcctcaggaaacttagtcatggcagaaggctaagggggagcaaagaccttcacatggtggcaggagagagaagtgcaagcccaggaaaaatggccacttttaaaaccatcagatctcgtgagattcactcaccatcatgagaacaggatgggggaaaccatccccataacccattcacctcttatcaggatcctccctttacacggggggattacaattcaagaatgagatttgggtggagacacacagcaaaaccatatcactaagactctttaaagttttggatgaaaggcactcaatttgattgatttaggcactaaattgacttggtgattgttttttaagtgtctttttagaatgttattaaaaaacacacagcaaatggaaagtgcttatttttagtgcaatactcagaacaattataatacagctttcctgtgatgtccagtaaatctctgaatatagctctttttccttctgaaatgtagacatcttgctaactgcaatttttgttttatctattacacatattgagatatgctaaaaataagtcatttaattcaaaaatcttttagccacttttaagaaagtatccttagtcaaaacattaatttacatataaactaattactagaagtggtacctttaaactattcatgaatatggaatcttatcttccaacttaaaatctttatcattcataaaactatcttttaaaaagcactgcagagcattaaatagtatcacttgatttcaaaatatcttaagtcaccataattgtaataactttttgagtagctgccagtttaattttcagtatgtgcaaattgaaggtaaattatttattacttccagcaaatgtctttcacaattttatttaattttttcatcctttttaatggatcataaaatgacaatcttttattggatatatataaagtcagaagcaaatgaatactttgcaaatatgttactgtggattgaaatgtcaatcataattcatggagtataacatttcttagatcagaatagctatgacatatggcactgagccattctcctgttttggaagagtcatgcatctttagacattaaatagaagtatgtgactattaggacttagtgagttttatttactaaattgtgtatcatagtactatttaataatttctcatgtggaatgactttactatgtttgaatttaattttattactattaattgtcagttgacatgaaagtacacttcaatcaatctttttgttacattaagttgttaagctttcttctatccttctactttgaaaaaacatattttaatgatggagcaaagcatggattaagatatttgttaagaaatattaaacagtgtagaaccaatttatagaaaattaagttgaaagtgttgccatttcccagcattatcttcccttacctccctgtattatctgcacaaggtgccactcttgtctcagaaggttttcccttgtcttttgtgacttcatattctcaccctagctgtttctcccctttctcctcagatatccctttagactacttttgtttttacagtctcttaactgtcagttttttctttttgaggtggggtctcactgtcacccaggctggagtgaagtggcatgatctgactcactgtacttttggcctttctggctcaggtgatcctcctacttcagcctcctgagtagctggggctacaggcatgtaccaccacaccctgctaattttctgtacattttgtatagacagggtttcaccatgtttcccaggctggtctcaaactcctgggctcaagccaaccacccgccttggcctcccaaagtgttgggattacaggcgtgagccacagtgtccagtgcccctcagtttttatcatggttggaggatacttgacttataaactcaccctttctatggctccctttttcttcctgatgagctccaaatttcctggcaagatctttttactagctttaagtctgctgtccaaatgcctcctatccaaatgtctacaaagtcacttggattttctacaggcaccttaaacttggaggtcccaaattaaactcacatccttctgttcaaacttgctccttctgtgttccctatgcaagactgcccacctacttgtgtaagacagaaactttgaggtcatccttttttcttcttcctcacctcctacatccaataaatgtccatgtcctttttattctaactcctaatatgtctcagtttttgttttcacactaacctcattgccactattttagttcaattctactttggtacttatttcaagtacactgagactttcttaactggtctttctacttttgaaatttattcttcagacccctgccttacactgtaacaagaatgatatttgtaaaacacatttctaactatatttctatcaaacttaaaactcttaagacgaattccagatgtctaaagatggcatccagggactcaatgatcttttctctgctccccttttcaacctggagccatttcattcttactctcaccctcttttgttgctggagtactgaatcacttttactgccttgactgttctgtccctgtccctttcttgccttccaccctgtcggagtgctccatctgcatggactcctttctaatctcatttcctaacttctgatcattctttaagcttcatcctgtagtcgacttcctgcaggaaaactttgctaatgcctctatgccaaggccaagtctgttgaatctcccacacagccctctagaacccctgtgcctaaacctatttaatatcgcattcttttgtaattgtttacggggcttccttttatttacattgtaatttgtattatttgttactgcagccattttaccaagtacagcccaattatcattgctactacaatcaattaataaatactcatttaattaactagtaataaaataagtgactgattgagtgattttattggcagatattcctaaaccaatttggagtgtgattttaggcctgaggtttaagcacagagctcaacatagctataatgttggatttaatcaaggtcatgttttataacaggaagaatatggcattgaaaaaattttttacatgaaactgcctgacattatatagtaggcattttttgaacaatttagcttacaatatttttatatggcagtgagcagaatagaaattaattaaattaaacaaaaggtattacataatgattttattgcttctatatacatttcttcttagcttggatctaaaaggtttattaaaaagtaccttgatattctaaataatccattagacaaatattcaggtgttaacggtaatttatggagtacctgttgtgtcccaggtattgtgttgtatattttatgtatattattttaccaagctctgttccttaaaacaactttgaaataggtacagttatccccattttacagattgagaaatggaagattaaaaatggagtgatgagggttcaaactcaggactccagtttcgcccaaatgccctttttcaatattattagatccttggggcaaataaaaatgaactgctctcttgcttcccatatatgtttgcaactaagtaaacacaatgttgttttaatacatttttgcccataagaaagcctctgttactgagcgtatggcttccactgtcagaaacatactaactagaagtagaagttatgtaggagtaggaataacaatccatagatgctaacagaaatgacataaaatatgacagaaaacactaaatatgtatagttgactcttgaggcaaggaaagcttaccgaatttggtttgcattacagtgggcggttttctcaacctatgccagaaaaggagtagcatagctttgggcaaaggctctagcttaatgatggtgccagtaccataccaataatttcaaaaatgtttttctaaagaagcagcaaagtttaaaagcagatgtaactgtgtttttcatatttgcaacttttctgaaaaattttcacagaatacatatatctatacacacatattcataaatatatatattcacaagtaaatatattgctttagcatatagtaaatgccattctagttaaccatgagaaatatgtgaatgtagtaaaaagctagaagattcaaatgaaactcatactaatgagagaaatttaaatataagatgctaaaatacatgtggaggattaaagtagtatgttgtagaagtgaaagcattttgagtacagagtcagtgaagtccaatatttggacaagttacctttataagcttgtttcttcatgggcaaaatggagatgatgctagtgctgacctcagtaggttgttgtgagaattaaatgagaagatgaattaatgtgtctggttcttagtaagaaatcaacaattgcctgtaattatgagtggtgtttatggttacattttgatcacgctgctactactactctcaaaaggaggaagatattcttgtttcagttccatacatcatatatcatcaagtggatttctatatctgcggagaattaactcagtttttgttttttttttacaccagccacattatactagaatgagattttcggagaatgcagttatttttgtcggttacaagatcatatcagcatgcatttctaccataggaaagagtaaactttgttttaaaatgacatcttctgttctcatttcatttttttaggcattaaaagtttgaatgtttccttcattaattagagaacttgttcgtttctggtgaattttaactgtcagattataaacaacttcagtcaatgtctactgatcccttaaagttgaatcagtaagattacctgcaagaatcacatattattatgaatgaaaattatctttccaaaaaataaaaccatgccaacatgtcagatgattcaggccacattctttaaagtagaggaattaagaactagggaagacaattttttatttgattatgcttagtcattaaaaaaacaaaacaaggcacccatttcttcagaatgagcaattaggtttaagttttctttcttaatacgccacttggccttctgtgttggaatagttcagaagtatagttaattagatgtaaacatccagaattcttattctcttctggatttagctaaaccatctttttttttttttttttttttttgagatggagtctcgctctgtcgcccaggctgggggtgcagtggtgtgatctcggctcactgcaacctctgcctcccgggttcaagtgattctccagcctcagcctcccaagtagctgggattacaggcacgtgccaccatgcccggctaatttttttgtatttttagtagagacggggtttcaccgtgttagccaggatggtctcaatctcctgacctcgtgatctacccaaagtgctgggattacaggcgtgagccactgcgcccagcctagctaaaccatctttttaaacaagatgctttgaagtaaatactttacacagaaatattttaatagaagtatttctatattttgattgaatttagcttgaactttgccaggaatatccttcccagtagctttcttgtatgaatccaaaccaaatagcacattgagaaaaaaaacacattaaggactttgatttcatcatttaatcaagcctctctgatatgatggaaagagttcaaagttagaatcctagctgtattactttgggcaaagtaattaacatttctgggcctcctgccccccatctgtaaaactgtgaaactactatttacttcaagggctattgtgaagggttgaaatagataatgcccataaaatgcctaggatagcatctggcaatagtaagaactgaataatatttcttatctcccctttctgtcaacagcttgagattgtttctgggagtttgttttttgtttttgtttttgcttttttttttgacagagtctcactgtgttgctgaagctggagtgcagtggctcaatcagagatgactgcagcctcaacctcccaggctcaagcgatcctcctgccacagcctcctgaatagttggacctataggcacatgccaccatgcccggctaattatttttatttttactttttgtagagatgggcatctcactgtgttgccggggctggtctcaaactcctgggttcatgcagtcctcccacctcagccttccaaagggctgggactataggcgtgagccaccatgcctaccctgtggatggatggctttgatttgtttgcaaaccaattatatgataatatcctttgtaaactattttggaaaagagctctttccatacaaaccctcttgtcatttttttcccttttgatatcttgttttagttatttttataataaaaaattactaactctaggctaatcccaaataatcaatctaaattaatgaaattttaatgattattacttgttttataatttgaaatcatattttcaaaataagaactatattttaactataatatttcttagccagggacaaaaattattatctcttctttgtacctttgtcgggatattttaatatctttggaccatctgcaacaaatacctgcaaataaatctttctccctttcttttctttgttgctgtctttcatattcactttctttatattttatttttgactggtttattgcttccagttttatattcttagtagtaatacctagagacagagaaataggctaaatgggatctaaagcttttctttctttgtaggtttttgtgaacctgaaacaaccttggcatttttctggatttagaaatttcttaatgcctgtatttctgttactactttgtaaagaaacaattagtccacttaataagtttgcctgactaataagtaaagactagaactaaggaagaaaaaagctggcataatttaccaaaagctgtgactcttactctttccttttttttgagactgagtctcgctgttgtcggcccgggctggagtgcaatggcatgatcttggctcactgcaacctccgcctcccaggttccagcaattctcctgcctcagcctcctgagtagctgagattacaggggcccaccaccacacctggctaatttttgtattttcactagagatggggtttcactatgttggccatgctgggcacggtggctcatgcctgtaatcctaggactttgggaggccgaggtgggtggatcatctgaggtcaggagtttgagacccttactctttaagtatgttttctggctggttttgaattacataaggaaataaaaatctcctactcctctggttttaaatgtatataaaattattgtttcttttctttttcagaactcttgatgtttcagtgagctttaatggaggaaaatctgtcatttcaggatcattaattgtcacagccacagaatgtgtaagtaaaagtttgcacaaagattatcttttaaaagcaattccatccagaaataatctatggatctttggtattgttgcatactacaataaaggagatgcaaacaataacattggagaccattacaaggaaaaattttgtatagaattcgttttgggtggcattgcttttttttatgttgagctcccttttataggaactttaaggtagtatgcatttgattttcatacttatagaatttaaaaggcatatttgaaatcaaaataaggtaagataataatttacaaatgaagcactttttttcttaaaacattaaatatagaaattatgttttctgttaggaaggttagattacagtatctaaacatttatcatggtttgaaatcaaattattgcattttaatgtgtgacttttttattttgttcatttaaaatattggtgctttctgaatgaggaagttgactttgacagcttgatactatcttaatttgtaaccacatcgaatatatattttgagattactgatttgcattacctaaatgcagtattttgaaatataagctccattcagtagacattttcttccttttatttaattttgtggatttatagaaagtttcaatattatattattgcacgtggaaacgggcagcactaaacaggaccaaccacatggttattatttctaaatatattttgtaaaaaatatgtaaatcaaagcaaaaaaagaaaaattcctgccctccaaaagaccaaaatcctaaacctaaacattttctcacatctcacggtttcattgttttatattttgattttgatctactaattcgagagatacccttccaacagaaaacaaaacaaaacaattcaatgttatctgtatagaggtagttgcatttctcattttaagacaatgcttcaggtaaaaggcacatcatatggacccttgggtcactttttaactccttggataagtctttaccaacagctacttctattttgaaaatagctaggttttttgtttttgtatttgtgctttttggggagggttttttttctcccatttctagcgcatgttgcaatttgtagattttgtggatgttgcagtttgctggttttctggtccctcaggatgtggttgaaattacaaatatttgtggtttgtagtttctcagtgtttagctcactgaaatggcattccttcctcatccttcttcctattctacacctacaaactgtctttttcttcctttcttccatgcaagcaggaaaacaggtctttgttcctatcctataacaatgcatgattttcacatgcaaggatgctgaggctaaatgactcatgtgggatgtataggttggtgctttaaggaagactttctagttcttgctcctgagtgagggtaatatgactcaagatggtttaagagtggggagatttcagaaaaatgatcattgatgtgtcaatgatgaggtaaggggaaaggagcaagctgtaacagtcaagaaggggtcaagatgattctccgtaagaaggaaggctttgagaaaagacttgaaggtaagggagtgaggcctgcagaccatctgagggaatagtgctccacacagagggagcagctagagcaaagcctgaggtgacaagtctctggcaagtttcaagaagagcaaccagccagtgtgctggaatggaagtagtcagggagagtgggagcctctggataaggaagagagagtggcaggagcagggcagatcctgtagggtgtatagttattgtcaggacctgagcttttcttctgagtgaaacaggaagaccttggaaggtgacatgatttgattcactgttttgaaaggatcactctggctgctgtatgaaaacagactttgcgagtagcagcaaacgtggaaacatcaagcccaattctgtggctattgcagtaatgcaggaatccttccccacccagaggagggtagccccactggggtgatcaaattggagatggtgagaagggttgaattagaatatattttacaggggaagtttatgggatgcctagacagattaggtgtgggatgtgagataaagaaagaaattaagaatagctccaagtgtttttgcctgagcaactattaggttgatgcaaaagcaactgtggttttgccaaatagaaggatgaattgtcatcaggcacagcagtttcagagcaaagagaagttcagttgtggtgaggttgaatgagggatgtctattggacatcgcagtggaaatgtcaggcccctgaatatgcaagtctggagttctgagagaggtctggattggatgtacaaactttggagctgttagttgttgacaaatggatggaataaattaggcaacaaaatttcacataatatttactgggaaatagtggcttccaggagcttagagcaagaagggaaagagtaccagaaaaaggttttatgcttgtggaggaactgagacagacagggccttgaagggagactaggatgtcagcaaagaaaggggatggggagcatattatagagaaagagcaaacagggtggggatgtgttgacgaaattgagaggagatgcatttgactggagtagaaataagtggaaggaattcttggaaatagaaaatgtagaccagattatcaacaacctaagaaaccgaattgaatttagagttcatcctacaggctgtgattcccaaactctacggtgttgaaatgaaaaaaggaaagaaaatggattatatttttcatattattagatttattcaacttgaaagaattcttttattttaaaattgttctttgtcctattttaattttaaaatatcctttgattgaggaaatacacttcatttgtcaggaccgacctctccctcctttcctttcctttcctttcctttcctttcctttcctttcctttcctttcctttcctttcctttcctttttcctttcctttcctttcctttcctttcctttcctttcctttcctttcctttcctttcctttcctttcctgtcctctccttccttccttccctccctccctccctcattccatccttccttctttcttctctcccaccttccttctccctagtccttcagtcctttcttttccttcctcatattcctctccctcctcctgcttcttctcttcttttctctttttccttgtatgctgttacttggcagaattattagctggcaagtttatgtgagcagattttttttttcaggttttattgccttgagaaatcacaaggtctgactccaataaataataatatggttttaaagagctttggacacacatgtgatggtgaaacatactattttgggaagattaaattagtaatgacatgtaagagaaaggacaggaaaagaaaaggcacagagaaagcttttaggaaacaaatgctagaatataggcataaaactttagtttctaaattgactgatggtggtagaaatagtcctagaaatagccatataaattgtattaatgaagaaatccatattataaagtgacttactggtggttatgggggaatgtttcattccaaaatattgaatctcatgggctggaagaatgatgctgccattggaaacatccaaagcgagaggtaaatctggagatcagaagaattttcattgtagacatgttgtgtaagtgaggttggcaatgtcaagcaggtacttgtagctatagcttcacatctcgtgagtgatcagggctggaagtaaaaatttaagttttgcttttgctgaggttgtaggaaggggaagaaaaatgggacaatttagagttaatgtcattttgaagtggggaggaatacatagagtcaaagacaaaaatgcactggacaaaattaaacaggaaaagaagaccttgtcaagactgttgcaagagggaagagtgaatttacctgtgatgaaacaaaaggttggagaattttcaaagctagggtggtgggaattataggccaccagtatctgctaattgaccttacctaaaggaaaagtaaactttctcctactttcctaataggaggtagtgctaaaacttggagcaaggcaccactgatgttaggtttctccgcttctacagagaccgtgtgataggggcactatctcccttgatgattacatctcaaaggaatggctcccagggccttgagaaagacagtcctccaaggtctgtaaaactgctgagagttaaaggagatttaaatgcttttcaaaaggcggagaaatattttgtgattacaagtttttatttatttatttatatatatatattttttgagactgagtcttgttctgttggtaggctggagtgcagtgacgccagtttggctcactgcaatctctgcttcccgggttcaagcaattctcatgcctcagcttcccaagtagctgggattacaggtgtgtgccgccacacccagctaattttttatttttagtagagacggggtttcaccacgttggccaggatggtctcaatctcctgaccttgtgatttggccgcctcagtctcccaaagtgctgggattacaggcgtgagccacctcacccggccacaaatttttaaaagtagattcttaaagaaaagggagatccaagacccacagttagaagaaatccaatttgactgaagtttaaagtttaatcaagcagaagaaataggtaaggctgtcttgatgaataaagtaagtgaagaaataagagaaagaactgcttaagacgtgggaagaccagacaccgagtgaagaagacaaaggaagttagaattccaaggtgaagagagggcagcagtacatgcctgggagaggccaaggtgagccagggctgagaaaatgtccgaggggtcaccggtgatctccccgtgtctgccaaggctgatgacttgaagccttctctttcttatgacttttattattccactagttattacaggataataaatactataattcaatttttcaggttgacagtaattataggaaaattatttttcctccttaaatttaaccattgccttgtatttaacctcaaattcctgttgcctgtggtagtgatattaccattccatagatatgaaaagtgagacttgcgctgatgagatgcacctgctgatttatgtatgaaatatctattgaaaatagaagagtatagtgggtaatactatgatgaatacctggaccttggatttaaatgatatttagtctttcaggcatatttgcatatggtgaacaggtgaaatgcagttagcgatattgctcattgtgaggataatgctttttacttgctcaggcatttgaaagccaaacaaagtagaacactattattctagtcattggttagtccttgttaaaatctcacaaataaagaagctcctctgtatgcttcaggaacatccagggctcagtcctattgaggccttaggaactgagctgtgagttcctgtttgcttctgagcctttcttaccagccttgagacattgacggcagggcttgtgctgtgcttattgcccgtctctcacaactggtccttacacagagcaagtgctccaaaattatttcctaaatgaatgattgaaagtaaccatatatctagtttaaaatggggaaactaagttttagatttaagagatttaagattagagtctgaggagggtttgtatttagacaatcctttatgttcatctctcctcaaaagatctttaaaatggatctctgcttttaaaaacataatggaaagatgtccttttttttctcttggaatcactggtcttctgactcttttgcaataacaataccaagaacctgtttgctgagcaagtattaagtgctagacgctgtgttcagctctgctgtatatgtgctaaatcctttatggcttcatttagcactcacaatccaagaggaggctgttcagattatgttaattttgcagatgagaaaactgaggaacaggaagatacctccaacattcagtgcacttttatccaaatacattagaaggtacttcttcttatgtggacccagccctcaaagaggtgcatggtttgatgagtgtaacagcaggtggtttcagtccttactgtccctgcaaaagggatacttgaagcctggaggctctgaaaggttgttacttgcccagttttgcagtctgataaatgctataattcagaattgaacccacgtctgtctcccccaccccctgactgaacacttccacaagttgccattttaaaccagattctacattgatttatataggacaagggttggcaaatttttcctgtagaaggccaaatagtaaatacatacttaaggctttgggggccatatggtctctgtcacaactacttaactctaccattgtagtgcaaaaacagctatagacattatataaacaaatggctgtgttcagtaaaactatgtacactgacattggaatttcttgtaacatattcttcttttgattttttcagctttatgtaatactgtaaaaaaaaaaaaggtattagcttgctggggtcttaccaaatagattggctggatttgactcttgtaccatagtttcctaattcctgatatcaaatattccaaaaagaatccagtaaatgaaataattatctgtttcatgactctgttttctttccctaactctaaattcatgaaacaaaattgtggagacccattttctccgttctgtgtctgtttcattctaatgtggctgctgtgaattcactattttctagatagattgcagcaataataactaatgctcttttgaaactttccagtgattcctctgtcccatagttatgttgcaagggcagcagtcaccctgatttgtttttatatctctatgattctcttcactagaattttagttatatttggcagaataaagttttttattgtataacttgcttttagtgaagaaaaggaaattagatgcagatgacacagtccctgaatacactaatcccagacatcagctcggttaactggatacaaattcaggctttcccattgtgtttgttttgatagccagagccactatcagagcaagaaagatgttagtcatgaaagaaaaacagtttcattttgcccaaaactttataaacatattggggaaatgtggaacactacagaattcagtcccgtaatcagataccatgttgcaaactatggacttaagagtcagatgaagaagagtatgaaactagatttgattacatatagatctatatcacgagcgaaactagaagcttctcagttttacataggcatgcctctctttagaactgaaaaagttctaataaatatttattactcaaatgtcatttttcttaaacagggtagaaatgttcttggcttgccagggtcttacaaaatagattggctggatttgacctttgtgccatagtttcctaattcctgatattgaatatttcaaaaagaatccagtaaatgaaatagtcatcagatagatagatgatagacagacagatagatagatagatagatgatagacagatagatagatagatagatagatagatagatagatagatagcaagaccaggttgcattttccctgacgcttttcccatcatgtttggcttatatatatactaggtctgtaggtctttagaaagtgcataatttatttttaattaatttatttaatttattttttttgagatggagtctttctctgtcgcccaggctggagtgcgtggcatgatcttggctcactgcaacctccgcctcccagattcacgccattctcctgcctcagcctcccgagtagctgggactacaggcgcccaccaccatgcctggctgattttttgtatttttagtagagatggggtttcaccatgttagccaggatggtctcgatctcctgaccttgtgatccgcccacctcaacctcccaaagtgctgcgattacaggtgtgagccactgtgcccggccatttttaatttttttaagacaaatctttgcaatcagtcgatatgataatattgtaataataaattatatttgtatctggagatgcataatattttgtcgatgctactaatggaggctttttttaagggaaaaataaaaaattttgagtatctagcagggctagcccatctactttgtgttctgtcagtgcaattttctgattttcctgttcttggcacatgcatagaagaaacaaacttaaccactaaatttttagcagtttcatggcctctagttgcatgtccttatttctgaacatgggtgtgaattctaagaaaaggggaaaccaaatgttcatagagcccttttgaaagctgtatagcacagccaaatggtgtgccatttctatgagtgctgtggctggatcctcatgtgggaaaggtctggtgagaaatgtattccttctgtacatggacagtcacagataggggctgtcttacataagaccatatttttgaaggtgagatcaagatttatacatttgacaatatttctcccatagggtaccacagttttccatgcgtttctatgacatcctttttccgttatattcttgtttgcctagattttagagcttaatgtgtttgtgcctgtggacggtagctgatttattcatgaatatttagaattttgtaaagaaagatgcactttggaatgttctttctaagaacaggctacttaggtatttgcctgaaaatttctataaagtattagtattaatcttctttctcttttgctctttttcttttcttccctgaattttttctcataaaaaaaaaaccacaaaacaaaacattattactgaggatcctagggattaggcatttgggagataccccttgttcccttggaaactgtttgtacagtaaaagttcagtaaacattcttctttgtatccatgtcttttgctgttttttttctttagagttcattctttcagtaagtagttttttctttctttctttcttttttttttttttgagatggagtctcactctgtctcccaggctggaatgcagtggtgcaatctcggctcatggcaaactccacctcccgggttcaagcaattctcctgcctcagcctcctgagtagctgggattacaggtgcccgccaccacgcccagctaatttttgtatttttagtagagatggggtttcactatgttggccaggctggtctcatactcctgacctcgtgatcacctgcctcggcctcccaaagtgctgggattacaggcgtgagccattgtgcccggcctcagtaagtagtttttaaatgccagacatggagtatacggtgctaagtaggctagatgtaacccctgacttcctagagctcacaataaatcatggtagaaaatataaattacacaaataatcacaaaattcataattcgttgcatcgtgataagtactaaagattaaagtatagagaaatatgagttgtttaatcaaaggggcattttatagtcaaagggtccaaggaagacttccatgaagtgacttaatatgagccctgtaaaatgagtaggtggtttttatatgaaagggtttaagaacagcgcccagagtaggtgccttaaggctggaggagctcagtagttaggaagggaaagaacaccactgtggtttttgtgtaggtcatatttcagcttcaatgagagaacatctgatttatgaatgcatgagattgcattcttgcattgatgtgtatataccatttcccaacaagaaccattgttggtttgtcatctacttgataattttttttaatattcatcttattatttaactacatgcaataaattgtgtttcaccatcaaaaagtctgcaggattctgcctaaattctgcctatgggtaatttgctttgaaccaaaataatccttacatgaaagatagagaccagtctaatcctgattagtgatttttcctaaattccttttagatgtatttgtaaagaatctgcagcattttgggaaagtttttgtttattatttcctgtcacaacaatataacataaaacataatatatattaaatagaagatacatttgtagaatttcaagaaattaaaataatatagttaaaatctagtttgacattatactttctgaattattttctggtgtttccttaaaatatatatacatttggaatttgaccataagctgtgctgactgctttgtttttgctttttgcctactttagtctaacgggatcgcagccatcattgttattttggtgttactgctactcctggggatcggtttgatgtggtggttttggcccctttgctgcaaagtggtgagtaagaaggatttacaactctacttaaaaaaaattagaaagatgtaaagtaaggtctgaaatatgaataaatgccatgttaataacagcaaagtttcagtttgcaaaatgaattttaattgtcttcactactataataaattctagaaaacatgcaggtcagtaaatatttatttaaaaaattcatctaaaaagcacttttaaatcaggtttgtgggaagaggaggagagaaaaataggggaagtagttgggataaagggtattttcattcaagtgcaagagaaattcaagtaaattgaatgatgttttcttttgggttcattgagaggagttgataatttgtcagtttttttaagtgctcatttaattattcatttcctctttgaagggtctaccatttcatgaccttctctgtttgctactgaaaaatatttgttcggaaattagtcatgcacaattgtcagcatatctgttaaactgctacttttggagtaatgacgaggagtttcagtttgtgtcattttttgtgtttgtataaagcctgtgaaagaatatgggtgtatatcagttatctattgctgctgtaacaaattgccacacatatgttgactaaaagcaacacaaatttattatctaacagctgtctaatcacagctttcacatgagtctcactgggtttacgtggactaaaatgtgttggaagggatgtgtttctttctgaatgctctaaggaagaagccattcctttgccttttccagcttctaaaggctactcagattctttgcctcatacccccctttctctatctgcaaagccagatgtgttgcatcttttcaaccatttttctgtagtcacatctccctctaactctgaacccagctgggaaaggtcctccagttttaaggaaccatgggattagattggacgcacttagctaatccaggatcatctcccatctcaagatcctgaaccttaatcacttctgcaaaatcccttttgccattaagataacatattcacagtaccaggtaattaagttatggagatgttggtggggggtatcattctacacatttcaagcaatccaatttagattgttcaggtttcatagaaaaaaaattatcttaaggaagccctcttccaaatcatgcctactatttattttgagaatattccttttattataagcacattgtgtagaacttaatattgtgtagctcatggtaatgttttacataatactgcaagactgccttttcccgccgctctcatgtttgctgactgatttcatcatccttgcaatttcagatgtgctttgttttagccctgcgtttattattagttgtacttcagtttgctttcatgaggcaacttgacaatcctttatctcagagcagttggcccatggaggaggcatagaattaactcagataacagtagagacaagacgcatcctgtctctttgctgaactaatcagtttcctgccatagcaatttatgctcagtttcctgttgtaatcttgattatctagttatggctattttagggtggctagcattcttgagtatcacattaaaaagcaaaaagatgccctaatgtaatttgtgctccttggttttttaatttaaactttgcagtggtgcatttcccctcctttttttaaattatcactttgcaatttcatttagtattgaccagagggctcagaagtgtcaaagtgtatgatttttaaaaagacatatgcaaaatgaaatgtgctcaaatatgggttttgactgtcattttggatattaaggagaggagccaatcatcaggtgactagatcagagactagatacatggtactctaaagccttggactctacagatctcaaatcatggagttactttctacgaggcataaagggagccctttaatggtggagtatcaggatgtcagaaaggcttcccgtcctcagaaacatcacaaatgcttattaatttcctgaacttatttaatagaggaaacttcctttattttacccttagaaatatagattaaaaagcaattagcccttataagttcatataagtatgaacttatatttatacctacatataagtgaatgatagcaaacgttttctaaagtagattttaaagcaggaagaaaggagaggtgaaattctgaattcagcccttggctaatattgattatctagtaggtgtcagtactgtgctaggaactggggatacaaaagtgcttataatatgatatggaaattcacattttaatatggaaacatagaaatgtgtgcaaataagtgtaaatggaaggtaactgaagtcctaatagcggcgtgtgtaaagaacagtagaaacataaaggaggaagggtttgccaagactaaagggagcatttcagagaaacctgactgacctgatgactcccaattcagttctgagtcatgaataagatgttgacagttcttgaatgacatttcagatgaagtgcatgtggaatcatgagttattctgacatgttttcagaagtgctaggctgagacctactgtgctaggtgaatgatggtttggattttggcatgaacccataggggaggacctcctatgtcttgtaatagaaagtctgatctcttcccagggatgacgagaagccactggagagattcgatcagtctaattacctgaaagaaactttgctggcttcacagtagtgctaaagtctagtcctggcaaaaattatttaagactgtatccaactgagttccattaacaatggaaatggaaaggcagtgacagatattgcaccttaaatatagccagaacaaagtacttctaacaaagtatagacagctggaatctcaagctgaaattaagtgagctagagaaaaatgaagacatgatgtaaaaaggaggtagtgtgacaataaccttgtggaaaaggatcttgagttttcagagggtattataatacaatcgcagggtgtttatcttattttgtttcttttaggttatatatttgtgcaatgctgaaattaggatgtgaccatttaaataattcttagtagcgttaaattattggagatcaatatgactttgactgtcattcctagcaatgaactttttaatagaaaatgaaatttatctatttatcagcgtggtgttgtgcaaatttctttttgcttgaatatgttttaagaactagtggcaaatatttaaatctaatctttcaactgaaacatgactaaagagcttaaaatgtctattctcaggcacatttatggtgtgtcagctatccacctccatgagcatcgtatgctcaggagctcttatcaatacagagaacatggaaagaaaactccctgaatagaaatctcaatatctgtcacatattcttcattcagtcatttcatgttttataaaatgccaaaatatgaaatattaagtcatattttataacatgattgaatcacttgttatccagagtttaaaatctcatagacctctaatcaatgagtcagtgatgacaatgttacttatattttagacagagattctcaggttttttttttcttttttctgcctcaacagcaagtctttcagaacagtggctgtcaggtttccaatggtggtaattctcctggagaggaagtgggtttgggtagactgaggcagctccagaggtcatgcagtttgaaaaagcctccttcaataaagtgaataaagatccctaaagacatgcaggtctcaatccctggaaccttgtaatgttacctgatatagcaaaagggactttacagatgtgattaaattaaaaatcttgacattattcaggatgatctagatgggtcataaatgcagtccaagccttataaaagggagacagagggagattagactatagatggaaagaaggcagtgtaaccatagatgcagaaattggagtgatgcagccacaagccaaggaatgctggcagccactagaagctggaagaggcaagaaacaaatccatccctagagcaggaagaaccagcttggccannnnnnnnnnnnnnnnnnnnnnnnnnnnnnnnnnnnnnnnnnnnnnnnnnnnnnnnnnnnnnnnnnnnnnnnnnnnnnnnnnnnnnnnnnnnnnnnnnnnnnnnnnatattatctcctgaattttctgatattccccagagttggggaatttttatgttttcagacaaactcattacaaaaaagaaaagaaaacaaaaaccctgaactttttatttttttattttattttttttcataatttttttatttcaaaaatgttatataaatggaatcatacagcatgtaatattttgagactggctttttttcattcagcataattcccgagatccacccaagcttctgtgtgtagtcgtagtccactctgtttttactgctgcatagtaattaatggtgtagatgtaccacagtctgttgaattattcacctgttgaaaaacatttaggttgtttataggttttccctattatgaataaagctactatgaacatttatgtacaggtttttacataaacttaagttttcatttttctaggtaaatgccatctgtgactcctgagttataaagtagttgtatatctagttttatgggaaactgccaaactgttacccagagtggtggtaccatctcacatgcccactaacaatgaatgagtgattcagttgctccttcagattttcagcatttggtgttttctctatttttattattgccattctaataggtatgtaatgatatctcatcgtggttttaatttgagtttctataacagctagtgaggaacatgttttcgtgtgcttatctgccattatttgcttatatctttggtgaaatggctctaaatgtattttgtccattttctttttcttttcttttattttattattattatactttaagttttagggtacatgtgcacaatgtgcaggttagttacatatgtatacatgtgccatgctggtgtgctgcacccattaacttgtcatttagcattaggtatatctcctaaagctatccttcccccctccccccaccccacaacagtccccagagtgtgatgttccccttcctgtgtccatgtgttctcattgttcaattcccacctatgagtgagaatatgcggtgtttggttttttgttcttgcgatagtttactgagaatgctgatttccaatttcatccatgtccctacaaaggacatgaactcatcattttttatggctgcatagtattccatggtgtatatgtgccacattttcttaatccaatctatcattcatggacatttgcgttggttccaagtctttgctattgtgtgtagtgccgcaataaacatacgtgtgcatatgtctttatagcagcctgatttatagtcctttgggtatatacccagtaacgggatggctgggtcaaatggtatttctagttctagatccctgaggaatggccacactgacttccacaatggttgaactagtttacagtcccaccaacagtgtaaaagtgttcctatttctccacatcctctccagcacctgttgtttcctgactttttaatgattgccattctaactggtgtgagatggtatctcattgtggttttgatttgcatttctctgatggccagtgatggtgagcattttttcatgtgttttttggctgcataaatgtcttcttttgagaagtgtctgttcatgtccttcacccactttttgatagggttgttggtttttttcttgtaaatttttttgagttcattgtagattctggatatgagccctttgtcagatgagtaggttgcaaaaattttctcccattttgtaggttgcctgttgactctgatggtagtttcttttgctgtgcagaagctctttagtttaattagatcccgtttgtcaattttggcttttgttgccattgcttttggtgttttagacatgaagtccttgcccatgcctatgtcctgaatggtaatgcctaggttttcttctagggtttttatggttttaggtctaacgtttaagtctttatttcatcttgaattaatttttgtataaggtgtaaggaagggatccagtttcagctttctacacatggctagccagttttcccagcaccatttattaaataaggaatcctttccccattgcttgtttttgtcaggttcgtcaaagatcggttagttgtagatatgcggcattatttctgagggctctgttctgttccgtttatctatacctctgttttggtaccagtaccatgctgttttggttactgtacccttgtagtatagtttgaagtcaggtagcgtgatgcctccagctttgttcttttggcttaggattgacttggtgatgcgggctcttttttggttccatacgaactttaaagtagttttttccaattctgtgaagaaagtcattggtagcttgatggggatggcattgaatctataaattaccttgggcagtatggccattttcaggaaacccatctcacgtgcagagacacacataggctcaaaataaaaggatggaggaagatctaccaagcaaatggaaaacaaaaaaaggcaggggttgcaatcctagtctctgataaaacagaatttaaaccaacaaagatcaaaagagacaaagaaggccattacataacggtaaagggatcaattcaacaggaagagctaactatcctaaatatatatgcacccaatacaggagcacccagattcataaagcaagtcctgagtgacctacaaagagacttagactcccacacaataataatgggagactttaacaccccactgtcaacattagacagatcaacgagacagaaagttaacaaggatacccaggaattgaactcagctctgcaccaagcagacctaatagacatctacagaactctccaccccaaatcaacagaatatacatttttttcaaccctgaactttttatagggtacaagcaattgcaaaataagaggcaatgaaatattctttaaaatatttgcggtgtttggttttttgttcttgtgatagtttactcagaatgtgggaattgaacaatgagatcacatggacacaggaaggggaatatcacactctggggactgttgtggggtggggggaggggggagggatagcatcgggagatatacctaatgctagatgacgagttagtgggtgcagcgcaccagcatggcacatgtatacatatgtaactaacctgcacaatgtgcacatgtaccctaaaacttaaagtataataaaaaaaatttgcaatggtaccaaggctattgaaaccaatatgcatcctttaaaattagaataacccctctgttttgtaactttgaagttaatatgcataatgcttcatatactgagtagaatttacttacaatcttagagcaacaagggatttttggaagagacgggtttacaattttcagaagtgcctcacgcatatatgttattagaatcatttgacaacagagatccatggacagcttcctcaggggtgatatgatttgctagaggagccagcacagtttcattcatattcagatattgaactattgaacctcttaaaagctagaaattgaccttcactctatggaggaaagcaaagaatttgaacatttgactaattactgtgtctgtgaaactatgacgtttacctggttagctgtaccagttttatatcaggaaaaagaaacatgtcaaagtcagaaacatcccttctatgatgttttatattaaatttttagccaaaattcttataacattatcctgtcaggtgagcaaatgttacccttttggtgatgcttaagtaaaattacaattagataatgatttatgtattatttgtttaaaatctctctccccttatagactaataatttcatgaaggcaggtactgtgtgtattctacctatcattgtaaaccaggcatgttgcatggtgaatacttattattgaatgcatcttcttcacctatcccaattcttaaaattgagaaaattgatattgctttacttggaaatcaaattcaaaatagagtacctttttgctagttatagtaaaaaattctgtcaattatggagaagtattgtgcttgaggaaatttatgatacaatcactcttgatataattttcattgacttcatttaaaatttgtttctcataatatatatacaatgggaaatgtggcctttgtaatcatttttagtaggaactaagatacaactacataagaatttattaattataatgaaactctgaagtagaagcagttcaacttttgtctagttgctgctacatataccccacagggatgcctcacctaagaattgtgaatttatgtggaaaaaaatatatatctttcttttttcttccaactgaaatttatcgtttttgtcattgatttttttaccctgcccacaaaaatattagcagttgtgaaaactgtcaccagtagcaatcacatgtatcccatatcatatttatagttgctcagatttttttttgagtcaggttctctgtcactcaggctggagtgcagtgacatgatcatagtttgctgcagcctagaactcctcggcttaagggatcctcctgcctcagcttcagcctcccaagtagtggggaatataggcatgcaccataactactgactactattcagatatctttgaaatgtgttttacaggcattgctactttaaaattatgatagtttctaaacttattacaagagcttattacttaatgagttaataaagaaacatacatatttccatatctcatattttaaaaaataaatttgaaaattacatttcaatatgattggggtcctttaaattctatacattttaatttagaataattattatgggatagattcaccagactgctaaggagtggtgtagtagtccatttttacactcctatgaagaactacctgaaactgggtaatttataaagaaaggtttaattgacttacagttctgcatagctggggaggcctcaggaaacttacaatcatggcagaaggtgaagaggaagcaaagaccttcttcatgaagaaggaaagagaggcctagtaagaggaggggaaactgcctcattaaataatcagatcttgtgagagctcactatcatgagaacagcatggggaaaaccgcctccatgattcagtcacctctcacccaggtccctccctcaacacgtggggattatggggattacaattcgagatgagatttgggtggggacaaagagccaaaccatatcaaggggcatataataaaaaagattaaggaaaaactcctgccatagaagatctggtcagccaagatgcttttaataagagactatttttaaattttaaatctttcagttcatactaaagagtcttttcaagaatgacagagagatgtgatgtaatctaaatgttgcagatagtgtcctctgtgtgcgtgggctttccatacaaaagtataaatctaaaccaatgatatttggagacctttatctagcaagccttataaaaaaggagcctcatgtaaatttgaatatttaggcactaccattagtgaatgatagattgtgttgagttttcaaactgttccatgaagggaagagttctcattttttgtgaggttatgtcttaacatctgtttaagagtctgtatcctgttcattgagtatccttcctcatatccatcctctataactgcctttctttaacaaagccgtcatcagcatcctgtctttttccctaggttaaaaaggcaggaggcattaaaacaaaacttatcctgttttgaattgttagtgacatcagaaattatggatgttttcatcattgtttagattaggggatattttgagttaagagcaaatttgttttactaatcaggataggagaaatgacagtcctatagttgcatagtttggggtaaccagacagtccagatgaattacagatgaggtggcaaacaaaggctttctgtagtgttgtcagttagattgtgttatatagctgcaaataatacctgaatatgctgaaaatgacaaatgttcacttgctttagtgtccttggccaatgttctgcagcctcaagggaaaattgcaaattcatttttctttagtgcatttaagacgttacataaagatctcatagatcttaatttaaaataccatttacaaatggtcttttttatgtttttaaagcccaatttgcctataagttagttgatctcacgcgatgatgatatgtctagctggaactctatagaatcattttgttagccagcaacagctgtgctgttcttttctaaatagtaataatgctgtacattgcacttgtttttattgttgagaagggctcctggtacctttattgaggtactttgagagtagcctgatttcttttttggaatgcacaataaaatataagtaatttaaattttaatataccttccttacaccattaattaaaatgatttatgtttggttgccttcttgaaatagagtgtgatgttaggtctttcatgctttcatggtgatgctttccgacagagcatcttttacgagacagtatcaaactcatcctggtctcagtttatttgctttgacagaagcacctttacttaactcctggcagaatacactctcacactgttcttcttagttctcatttagcattctaaattatatttattgtccagatttcaggctacttatttacttgttcaaagtagaattatttgatcattgatgagtttgtcgaggaagaaataaaaagcagaggatgagataacttgaatcatattttggtcaggatgttgaaggctagatgttgaagttagatactttgtgggattcagaaaagaaggacttcacaagcagtaatgtaagaactttgtgtttttgtatgtcaaaagaaaggcattttacttcctctctgatcttatcaaaaagaaaagggagaatgaaaggaagacccccatatattttaaagaaattcttgtaaatactaagaatgtttctctattgtctgtgggtccctaggcacctagatgacattgccgataaattgggcattttttttgtcactggcaaaaatcagttctgaaatactacttagtctacagtcattgtacaatatcttttttttttaatccaaggcaattcaatgttgacagttcttttcactcttttctgaatattggaacatatgattgcatcaagctggctgcaggctccagtgctgacattttttagcgcaaagaatgcccatatcacttgaacatttgaaaagtgttaatgagcagatcaaaaggactgttgcctgaagcagctaacttttttttttttaaagaaatcggctctcttccaaactgaaatcttcattctagcagctaagtagatgagatgtaatccttcctgatgatgataataacaaatgaaaaaaaaattggagaagaatcaaactctgcatatggttcataaagtggtgaaagtgttttccagaatcttcaatacagagctgaaggatgctaagtggaaaaaattctggcaactaggcaatattatgccttttaaaatctgcaaattctcataaaatatggtgcatatgaatacattcttttctgaaatgaatgtgtattcttgcactatttgatataagaatggaattctcatgactgtagtttttaatgtatttttactaacagtaaatctttcttttctcttgaactagttttactgaaatgtaggaatgtcagttgaacacagatttttgccatttttggcttttgagccaaatggcttcagattattttcacccttctttgttactcatgaggttgtgtggcagagtggagagagggaagattttggaacatcacaagaaaaccattttgtttctcgtccccaaatttttatgtgggtgacattgggcatattagctaaatgttatatctatataaaatggtgataaactctatcttacatagttattaaaagttttaaatataactatctgtgtaattatctatcatctatttgtcaattcattcattcatccatccatccatccatccatccatccatccatccatatatccatccgtccatctacccatccatccatgcaagtaagtaacaactactcaacaaatcataggctttttcttctgcaccctttccctttgcaaactaaatcttattttaaaaagatgtcatatggcagaagttgaattcagagttggagataggtagacttggtcctcggtttgaatcctaattctgtgttttctctttgtatatatttgggcaagttattgaagttacagctttcctctccttatatttaaaatgaggataaacatagtgattgcacagagttattatgaaaataaaagagctatagagacagagcatgtggcatctggcagcaccaataaagggtggttcctgttaatagtgttaacaacacacagatgagccttagctctggttcagtttctgaaggtactattatttgttgtgatggtggttgtgtgccttaatttaccagatcaaaatgtgatttagatagagctttgagggcttcgttttcattattaacaatgtagaaaatatacttgtcaggactttaattcattttaaatgtataataagtcatgaattattcacacaaaagaataatggcatgctattgaaaagaactctaatgttcttttctggaataaggtgaatataattgcatatagacatatggccatatttatccatggaaaggcatagaagcaaaaacctggtggaaacattgtaatatgtattttttatcattttataagaattgacattttgacaaggacctacagttaatccaatttatttcccagatgaataaacttagtatacttctatctcctcttctacaattgggttatctgactttattggttcaggaaaaaatttagtgcttcattttcttagggactagtaatattttagtttcatgtaaatctatctgtgtattatttttgtatattttttcctcaatatttgacttatacatttggaaatcaactataattttttgtgaacgttctcagttccatcaatttcactttcagtatatttttagtacctttagtatctgctgtgtgcagagcactttattaggcatgatgacatgtataaataaggagaaataattattgccattaagaaatttgtaattttcagtgataatttaaaaattacaaaatcaacatataaacccaaattaatgatgcataaatggttcaactgtgcagcaacatatactttaaaaagttttatgtcttctagatgaaacaacagggagttggtgggctactctgtgaaggctggttgggacctaacaggaaaatgatcattgtatttgggggaagcatcaggatcatcaggctggctggagaggaggtgcatgtagggggatgtttgtagatacatgttaggccttaaccgtggagggactgacaccatgctgaggcattttaacaatgagaatagaaaaactggctcatgtttatgtgctgcaaaaggggctttgatagtttatcttgcagtttatattagataaaggacctccggtgaagagaaggaatgtaaagatgcctcccatggtactatgtgagtttgataacagtggtcatatggggattttaaattgaaattcaattttcccatatcactattaaactagatgctatatgggataatgaatatgacattaaaaaaaaggaagagttatggagagagatgttgaataattctcaggaggatgtaatacagaacagggttggggatactatttatgtcctcagaaatttatataacagtgcaagatgtacatgtaataagaagagtaaatttgaagtcctcacgatgaagtgaaaatgagttcagatgtattattctcagacttagtggaatggaaggatgtaccttgacctttttctagtgagagaactccagagagtactttatggaaattcacaaaactaagagtggaagcatgattcgtaaggtctttccaataaaatttagtactttattgagtcaaatttgaacattgggattgtttattcatttttaccagggaaatgatcgtttaagcttctgttagaagaatattgacctggctacataggttaaaatggggaatcaattggagatagagaaataagttagatgtctaatttaacaacaagtagagtattaagtcattgatgcaaaaaaggctatggtaattataactatcaataaattttgtgaatgtattattaattaaaattcttagaatgaggtggtgagaaaagatggagatgcatctcctttgtctgagcaccattcatttatttataatagctcagccatacttaaaatgttatcagttctagaaaccacactgaaatattgaccaaatcaatatgtgattaaaaaaaaaactgaccaagataaccagataactcaggaccatctcatgagaaatgtttgatatatttaggttccagattggtagactcagtagatatatggcaattatcctagcattcaaaaataggaactgctctcctctgaaagaaaaagtgcatgtgtgtgtgtgtgtgtgtgtgtgtgtgttgcgcgtgtgtgtgtgtgtggtgtattgccagactctaggatcaagactaaagactggaaactacagagtgggaagtgccttggcttcatttgggggaaaaactttcaaatgatgtgggttccttgccaatggactgaattgctttgtaaggtagtggatttctcttgattgcagtaattcaaacataattagactacagcttggtgggaacttttcagagtattgaagttttgattgtgtatgcgttggaggagttgaaaaaatgttgtactaggtacatttaaggcccaaagaatcttgagaatatgcttttaggagtgacagggggagggaatgaaaagaatcccttcttcctttgtccttccctctgcagtctatctccttccttcccttcctccttctttattctctcaatttgtttcttcctctcttctctcccttttttccttctttttttcctcctaatttccctttcttccttcttccctctctttctttatcccttcctccctccttttctctccccttctcacttctttccttttcctcttcctaacttctctttttccttacttccttgaaagtctaatttgtgctagacattctattaaatactagaaagtcagtgaggagcaaagcagacataacacctgttctcatgaaacttactatttttttgtagataaaattaataaacccttttttggtagataaaattatcaacttggataaattctaggagagaacaatgcatctgtgcatatcaagagaatcatatgctttgagaaaatggggagaattcatcagggagagaggaaggtgggggatatttcaaagaatgtattgggcatggaaatgatttggtaaagtcatttgaagtgagaaaagagattacagattatgccaactttttaggttgcaactgaaaaaagtcattcacttgaaagaaacagggaagataggaaggaatgttagcttttaaatgaagatggttagggtagctttgattttgttataaaatgctaacagatttggttttcattaattgttttggacatgcaagttcatagtcatatgacatgctttctttttttatagaggaaatatacctgcagtttgatgaacttaactttattttgttttattattattttaaatcttaattctctactggcatttatttctgggctaattataaaaaatcataaagttttatctttcatgattaccaaaatctactggaattttatgattattaaaaaaataaaattgaattaaataaagaattaagtagaaataatggctttgtagcattcaaaaggagattcaaatttaattactatttatatctatattattggcattattgggctgtgtattttttccctgaggtttggatctaaactaaaatttagatgatgaaaacattatacacacagaaaattatgggtcagttctctaaacattatcaatgacatcaaaatataaaaaccctttcactatggaaaatggaaacatttacaaagagagagactaatatatgtacccacaaaaattaaaaattaaaaaaactaagataatgaacttcccactgtcttcattactcagcttcaatgattctcaacttattgtcaatttttttctttcaatttttattttaggttcaggggtacatgtacaggattgttacaggggtaaattatgtgttgctggtgtttggtgtacaaatgatttcatcacccaggtagtgagcatagtacctgatgggtagtttttcaaccctcacctttctaccgggttctcacttcatgtaggccctgatgtctattgttctcatctttctgtccatttgtactcaatgtgcagcttccactccacttataaaaaagaacctgtagtacttggttttctgtttctgtgctaattctctgaggataatggcctccagctgcatccatgttgctgccaatgacatgatttcattttttttaaatagctgtttagtattcactggtgtatctgtatcacttttttttctagccagtccatcattgatgggcatccaggttgattccatgtctttgctattgtgaatagtgttgtgatgaacatacaagtgcgtatgtctttggtagaacgatttatattcctttgggaatatacccaataatgggattgctggattaaatgtagttctgctttaagttctctgagaaatcttcaaactgctttccacaatggctgaactaatttatattctcactagcagtgtataaacattctcctttctctacagccttgctaactcctgttatttattttttactttttaataatagccattctgactggtgtgagatggtatcttgttgtggttttgatttgcatttctctaatgattagcaatattgagcatttttttataagcttgttggccttgtatatgtcttcttttgagaagtgcctgttcgtgtcctttgcccatttttttaaatgaggttgtttgttttttgccttttgatttaagttccttacagattctggatattagacctttactggatgcataggttgcaaatattttctcccattctgtagattatctgtttactctgttgacagtttctttcgctgtgcagaagctctttagtttaattaggtcctacttgtttattttttcttttgctgccattgcttttggaaacttcatcatgaaatctttgccaaagcctatgtccaaaatggtatttcccaggttttcttttagagttttaggttttatatttaagaatttaattcattttgagctggtttttatatatggtgaaaagaaggggtttagtttcagtcttccacatatagctagccagttataccagaatcagttactgaatagggagtcctttccccactgcttgttattgtcaactttgttgaagatcagatggtcgtaggtgtgtggctttatttctgggttatctaaccttttccagcagtaccatgctgctttggtgtactctagccttgtagcatagtttgaagacaggtagtgtgatgcctcctgcttttttctttttgcttaggatagctttggctattcaggttctcttctggttccatatgaattttataatagttttctctaattctatgaaaaatgatgttgatattttgatagaaatagcattgaatctgtaaattgctttgggcaatatggctattttaacaatattgattcttcctattcatgagcatagaatgctttttcatttgtttttgttatctctgattactttcagcagagtttggtaattctcattgcacagagcttttgcctccctggttagctgtattacaaggtgtttttttttttttttttttttttttttgtaactgttgttattgaattcttgatttggctctcagcttggacattattggtatacagatatgctactgatttttgtacatttggtttgtattctgaaaggttaatgaagttgtttatcaggtccaggaactttttgaaagaatatttagggttttctaaatatagaatcttattattggtgaagaaggataattttgacttcttattttcctatttggatgccttttatttctttctgttatctgatttctctggctaggacttccaggactttactgaatagaagtggtgagagtgggcatccttgtcttattctatttcttaagagaaatgcttccatcttttgcctgttcaatataatgttggctgtgggtttatcatagatggttcttactattttgagatattttttttgatgcctagtttgttgagagttttaacatgaagggatgtggaattttattgaaagttttttctgagtctattgagatgatcatgtggtttttgtttttagttctgttcatgtaatgaatcacatttattgatttacatatgttgagccaaccttgcatcccagggataaagtctactggatcatggtggattaactttttgatacactgctagatttggattgctagtattttgttgaggatttttgggtctatgttcatcaggcatattggcctgaagttttcttttttcattgtatctctgacagcttttgttatcagaatgatgctagccttatagaatgagttatggaggtgtcccttctcctcaactttttggaatagtttcagtaggattggtaccaggtcttctctatatgtctggtagaattcagccatgaatctgtctcatctacggcattttctggattttttttattactgatcaagtttcagaacttgttatttatctgttcaggataaatatttctttgttggtcaatcttcagaagtgtatgtttttaggaatttacccatgtttttctagattttttagtttgtatgcataaaggtattcctaatagtgttttagagttcttgtatttctttgggatctctaatgtcccctttgtcatttctgattatgcttatttggatcttcttttttttatttattaatctagttagtggtttatcaatcttgtttattttttgaaagaaccaaattttgattttgctgatcttttgtacagatttcatatctcagtttccttcagttcagctctgattttggttttcttttcttctgctagctttggggttggtttactcatgttttcctagttcctctaggtgtgatgttagcttgttaatttgagatcttcctaacttcttgatgtaggcatttaacactataaacttttctctgaaaactgctttagccgtgtcccagagattctgtgatgttgaatctttgttttcattggtttcaaagaatttttaaatttctgccttaatttcactctttgcctgaaagtcatttaggagcaagtttgtttactttccatgtaattgtatggttttgagagctcttcttggtattgatttctatttctattgtactgtgttctgctagtgtgattggtatgattttgttgtttttaagtttgttgagaattgcttcatggccaagcatgtggtcgatcttagagtatgtgccatatgcagatgagaagaatgtatattctgttgttgttgggtattctgttgatgtctgttaggtccatttggttaagtgctgaggttaggtctcaaatatctttgttagttttctgcttcaatgatctgtccaatactgtcagtggagtgttgaagtctcccattattattgtgtggttatctaagcttcttcataggtctctaagaacttgttttatgaatctaggatctccaatttgggagtgtatgtatttaggagagttaagtcttcttgttgaatggaaacttttatcattatgcaatgctctttgtcttttttgatcattgctgatttaaagtctgtattgtctgaaataagaattgcaacccctcttatttttttgttttctgtttgcttgagtgatcgttctctattcctttactttcagcctacatatatatatatatatatatatatatatatatatatatatatatataaaatttatgtgagatgaatttcttgaatatagtgtatagttgggttttgcttctgtatccaacttgccactctgtaccttttaagttggacacttagcccatttatcttcaaggtcaatattgatatgtgaagatttgatcttgtcatgttcttagctagttgttatatagacttgattgtatagttgctttatagtaccaatgtgatatgtacttaagtgtgtttttgtggtggcaggtcttacatttccatgtttagtgctccctttaggacctcttgtaaacataactgatagtaatggattcccttagcatttgcttgtttgaaaatgattttattcccccttcacttatgaagcttagtttggttggatatgaaattcttggttgaagtttcttttctttaaagttgcagaatataggccgccaatctcttttgacttgtaaagtttctgctgaaagtttcactgttggcctgatgggattccttttgtacttaacctggcccttctctgtagctgcctttaacatttctttcctttgcgttgactttggagaatctgatgactagatatcttatcttttctagtatattttaaagattctctgaatttcctgaatgtgcatgcctacctgtgtagtgaggttggggaaatttgtgtggacaatatcctcaaatatgttttccaagttgcttgttctctatctctttcagaaatgccagtgagtcataggtttgatcttcttacataatcccatatttcctggaggtttgttttttcatttttaaaaattcttaatttttttttgcctgcattgattcaaaggagcagtctttgagttttgagattcttttctcagcttcatctattttgtaattaatgcttccgattgcattataaaagtcttatagcaaatttttaatttccggaagttcaatttttttttgtttttttcttaaaatggcaatgtcattttccagctcttctatcgttttattagtttccttggattgggtttcaaccttctcctgtatctcactgggcttctccgccatccagattctgattctgtgtctgtcatttcagacatttcatttctgggggagttattgaggtagtttgtggaggtaagaagacactctggcttttagagttgccagaattcttgtgctggttctttctcatctgtgttcactgattttcctttactttttgacattgctgtcctttggatgaagctatttgcttttatattctttgatgttcttgagggtttgaaggcagtataaattgtgtttagttgattgacttcatttctggatgctttcaggaggccaagcctcagcttagcactcctgagcttcatgctaatgccttggggactgggactgggcatatggctttgttctttgacctctcgaggtcaaacactttctgcactggaaggactggggtgttcccagactgctggcaaaacactctgatgggggctgttgacaaaagtgctctggttgtgggggcagggtgccacaggagaatgtcttgaagtagggggccaccagagagtgcacactagtggggcgatggtgtgaggtgcagacaaatgaaaaccaacagggcagcggggagccactggtgtgtatgcagtggtggagcattattgtcaatctttctttatctgtacccatatccaagtcccaacgcccaaattattttgatgaaaatatcaaaatcatatcatttcacctggaaatatttgtacatacctttaaaagacaaacagtctttaaatatatatccatgatcatagtaatatactacacattaaaaataattctttgatgaggtaaaagtggaaccacattttcaaagttgctattgttttaaacctttgaaaatttaatagcatagttgacacatttgacattagatgacatcaagctggaacattttcagttttccctcttagtatagagactttgatttgtacctgaagtagctgaagccattgacacttggtcaaagattttccatcacgatggtgtgaatatccagatagcccaataccagtaaaggtcatttcaaattaagccccattctattcacgtgaagaattaactgtattggggggccgaggcgggtggatcacccgagatcaggaatttgagaccagcctggccaatatggtgaaaccccgtctttaccaaaaatacaaaaaaattagccaggcgtggtggcgggcgcctgtaatcnnnnnnnnnnnnnnnnnnnnnnnnnnnnnnnnnnnnnnnnnnnnnnnnnnnnnnnnnnnnnnnnnnnnnnnnnnnnnnnnnnnnnnnnnnnnnnnnnnnnnnnnnnnnnnnnnnnnnnnnnnnnnnnnnnnnnnnnnnnnnnnnnnnnnnnnnnnnnnnnnnnnnnnnnnnnnnnnnnnnnnnnnnnnnnnnnnnnnnnnnnnnnnnnnnnnnnnnnnnnnnnnnnnnnnnnnnnnnnnnnnnnnnnnnnnnnnnnnnnnnnnnnnnnnnnnnnnnnnnnnnnnnnnnnnnnnnnnnnnnnnnnnnnnnnnnnnnnnnnnnnnnnctgaaatagctggggatcagctggtgtctctgtctcaccacccagcctaggttagtttgggtttcctcacagcttgatggtcttggggtggatttctgacctgacagcagtgttcctcaacagtgagtgttccacgggatgtcagggaaaattaagttcttttgacctagcctgagaagtcacatagtaccacttctacctttttcttttttttctttctttttctttttcttttttttttgagacagagtctctctctgtcgcccaggctggagtccggtggcacgatctcggcacactgcaagctctgcctcccgggttcacgccattctcctgcctcagcctcgcaagtagctgggactacaggctcccgccaccacgcccggctaattttttttgtatttttagtagagacggggtttcaccgtgttagccaggatggtctcgatctgctgacctcgtgatccgcccccctcggcttcccaaagtgctgggattacaggcatgagcgaccgcacctggcccacttctacctttttctatttgccgaaagctagttacaggcaatccaagattcaaagagaggggcataaatattgggtggcaagcttcaatgagggacttctttggagctaccacagtattttatgtatcaaattatttttacacatccttactatctcctctctatgccatagaaatttttatatttgattttttttgacaggttattaaggatcctccaccaccacccccccctgcaccaaaagaggtaagtgagtgcctaaaaaactgatatggctgttttttttttccaaatgcagataccatgcccaaatttaatcaattttgtctgttagataactatgatacctatgtactgactttttaatttatacaaatcagtggttatttttcatcctcttatgatttatttcatgtgctagaggaatgggaacttcatacattactagatataaactggccattggaatcaatagtacataaagatttaatatacttttatagtactatatcaacagttctgatatcacttatgttattgacaaaaaacatccaagctgacagttgaaagatcctattactttcttcaaaattcttggtgcttttatatgattctgttaaccagaatcatgttaggaacatgaaataaggaatgtgctggtgttgtatattttcaaagcttctcaactgcctatcttttcagttcaaatttcatagagtccaaacctacacacacattgatgctttaatgactgttaaaatgctgtcctaatttaatattttatctttctaagtatgaagtgatgaatagatttgaaataccaaatgattcccatagttaaagaacaacttctagttacctagggatgatgtaagagagattcctgaaatttgaggagggaaaggagttctcatatcctgtagaactccacttgaaatttatgcatgtaagtgtaaatatatccacatgttctatacatagttttttccatagtaatgacataattcagaaaaatatttaaatatgagccagttccgactaaacagtattttaagaaattaattaaaaactatttataaaacatatttccacaggaggaagaagaacctttgcctactaaaaagtggccaactgtggatgcttcctattatggtggtcgaggggttggaggaattaaaagaatggaggttggtatcttaaaaaaaaatagaagctgctaatctggagtatgtatttctagggctattaagccatagaaactacttttcacaattcaatattataatatcatccatttgtgcttaacactgggtcttttctggatacatttttttttctatggaatcatcctagccgctgcaaaactggcctagaagaactggtttcattagtcaaaggattgcattgataagacctctgaattctaagggacaaaacaaagctagggtttttcttattttggaaaaaattaccgcatagaacgtcaactttgaagaagccagccacttcaagttgcaacaatgttcttctttgtaaagatccaatagttatctactatttgagaagaaaatgttaaaatattcaatagcgtggatctgactttatcacaaatatagaggaagcacatttaatactttatgttagttgccacttatgaactattgtaattgatattatatatcatttatagaatgcattgaactttcagactagcccaaagtgttgattaaaattgaactttaatattatatcttaaaagtcaaataagattttattatcaccatgaactattttttcaaagtgatatattatttagtaataagcaattattaccagcactgagctcttaacaacagtataaacaggcctgcatcccatcccaaggagcaattcaagggattttttcatgaacacattgactttattattaaattctggcattccttcctttttagtcataattttccttctgattagaatgtgttttatgcattttaccattgttgcacgtttcctattgtcatatctgctttgtgccagcaaaaattgataacctaatgaacaaccccacaattattgcaattttctccttttatacattacaataaaattcagattcccaaggagagtttccccttttcagaataaattttactcttcttcagaaaaagcccagacatactgaacatggttgtcattagcaaagtgtttatataggtcatctgacagtgattcttacttttctggaccacattagatcttgaagcaatggacattttccctgagagcttgccctttattgttgaaatatcctctgaggcagatacctcattgccaattatccatgattataaacagttgctagatgcagttaagctgttctttggagaagttattgcatgtatttttgtgtgctagaaactgagaatagcaaacaatataagagagcatggctaggcaagttcttgttgtttgacacagaaggaaggttattttcctttcttacctttgttgtgtcattctagacttggaaaggtgggaagaaagtatataggatgttcctatatgtataaaacatacacttcgaaataaaagtgttacaatcaaatatccaaatacgatctgtaacaacttatttttatttgatttcatctcattccaaaatgtgtgtgtaaaaagatctatataacggggaaaaaaggcttgatagaatataccaaaaatgtgagtaggtttctctggatggacaattttcaatctatgctatatatttccctattgtttaaatgtatttgacagtgagcatgtactacttcatattcagaataataaacttaatgccattttgaaattcactcatgtaaaatatggcatgataataaagtaaggatattagtatgtgagccttaattgaataaataatattcttgctttaaaaaactaggaatatgtcagatttttgttagttcaatattccagtgttccaaagattgagatctctttttaaaggaaaggaaatgtgtgagtgagcccctgaatgggtcctgagttaaaaggaacattattggtttatatttatgagagccaagagcatacacacatccctaactaacctataattcaagtttcaagagtttttaactctcaatatgtgaaattatgttgcccacacatccttttcagttgaacaaaatttgtgacgaaaaaccgcagccaacttgtaataaatctgggtccattttagttttggataattttggctaccttgcatgaagtattccatcaacaagatggaaatgagaatgagaatgaagaaaaaaatggaaaagcaagtgtggatgttacaaaggggaaacacgatacacgttgagtatcccttatctgaaatgattggaactaaaagtgttttagattttggatttttttcagatttcaggacatttgcacatacttaatatgatatcttggggaggggagccaagtttaaacatcaaatttatttttgtttgatatataccctatacacataagaggaatatgtttgacacacaccttatacacacataagaagaatatgtatataaggtgtgcgtcaaacataaatgaatttaaaatataccataaatacacaaacataatatacaagcataaatgaattttaaaatatacaatgttttaaaataattttgtgcatgaaacaaagtgtcgactgtgacccatcagatgaggtcaggtgtggagttttcctcttatgctgttaagttggcacttcatgggtttcaggttttagagcattttgaattttagatttttgaactatactcaacctgtatataaaaatacacagtaaaaattgaactgagaattaagcatcattaaacattttcaaacattaatttatttaaatgtggagatggaaatgtttcatttatctatttaatttttaagaaatctggagtggatgatggggagttctcattatgttgccctggctggtcttgaacccctgagctcaagcgattctctcgattctctcatgtagctggggctacaggcaggtgccactgtgcaaacaaaatttgttttaaaagcatgcttattcaaacctggaaggtacttcttctttttttttttttttaaagcccttaaactaggaaaagtaaaaggaattatagaaattatgagcacatgtgaattacagaacacatttttatagctaaggttattttaagccagcatagggatttttacctagaatttttttcttccttcttctttaaattaaatatttaaacactatggtaatgggaatttttagaaagctggaacggagatgatgttaataacagctgttagcacaactgatccacaatacctaatgacttcaaatgtgtgtttctgccaattcagtgtgaaactgtttgtttcttttctcgattctgaaattgctcctcaatgatataaccttctagtcatccaaatatgctctggaaattacggaattttattgcttataatgaaagccaagtggagttggaagaatttagctatcaagcttacacttatttttttccataataaagcctgatatattaattctgctaaggcttcctttagcagtctattgttgttattcttttgtcctttttaactgtctcaatgtggtcaaactaaaacattaaaatttatgcatacatacacatacacatatatatgtatatttaattgcttttaagagtttgaaaactgtaataatttctagtttcagactttgagtaagtgagaattgtttgtggtggtgtttgtggtggtgatgatgttgatgatgattaaatagctccctcatgaactaaaactaatgaatttctttaatggatcttctttagatctcagcaactatatttctcaagtatagtcatttgatagtgtagtacctagaaatgccacattgggtcagaactctagtttaactagcttcatatatatatttttttaatctgagaatagtgccagtgaaacttgaaagaagaatatgattatcattacctctgcaatatcaactgtgaaacataggcgagagagctgtctattctaaagcctatcatttctgaatggatctaaattgtatctacttctctttctaccctgaatgacttctctaagttaagacatttgtgtctttacttaattgtgtatcttttttttccttaaaattgagcctttacaactgcaaggatatgtgtcctgattttagagtttttaatacaatttagctatatctaaagattttataagtgttagtttatccaggtgatgacactgtgattggaaagagaaggtcatttctctggaaagaaagccaactatctagctctaaaggtttagtggtgtttaaaacaattttaacaacctcataaaaacattctagtatcattgatcacactgaaagatatagatacattttaatgactcaacagggcccacttgaaattgaaagcccattctaaaattgtagtaaaaaaaggtaaaaacatctaagtaagccttatcaaaaagactgaatagttctttccatgaatagtaatcttctctatccctacccactaattcagatcattaaaatgctttaggaagtcttaggatttttttttttctttttagaaatcacttaactctgatgtgtcatagtgtgccctcggtagctcttattataggtttttagagcttcactcctctgacctcgcccatttttggtgatgtccttggtttttgtagggctttccactactcctggttggacaagctcttctccaggggctgcatcctatttttacatgcccagtttgactcaaatttagctcttaatttctgtctattgaaaaatacaacaatcatttgctcttaatttctgtctattgaaaaataaaacaatcatttgatcttatggtttttcaatgtcaagaattttcagaggaggaaatttgctataatttgtggaattctctagggttcctgaacttttcttttcaaagcagtcttttcagatttgacctcctcaatgaaaaaaatcatatgccacacaaccatactcagatgagcttgggaactaaaggctgaacactatattacttagaactataaaagtaaagaaaactcatatataattattttactttcaaaaactaaatgttcagatcatactttttgccttaatcagatgtgatgaaaagtttggaagaagcaactcttttgtataaaatacatttgtaaaattctaaccaattggaaacttattaacccatttcaatccatgttcgaatccctgccctgtcacttactagctggctttgggcatatcacttaacctccctgtgcctcatctggaaagaagaaaatagagtctctatctcactgcatttttgtatggattaaatgcagactgacacatagtaatcactcagtaaatgctaactatcgtcattttcatatatttcttccagtgtcatcactacatatgggtatgtgtttagctagcaggggaacaaaccaaattagagaacaaaattacacactgtcatgcatttcatatgtaaaccacaaatggactctttatttaaaactatggaaaaatggttgcttcaaatttagttggctccagatttttttacaaagggttttttttttttttggatcttaatattaaatacagtcaggagtggtgagaaacctatttagcctctgaagaggagaaattaggaattaggatacctgctcatcttctttttcactctgagatgtgaactaaaggaccataggctcaataagagcctgttcctctaggacactttatgtctgataacagtactctccctttgttttacaggttcgttggggtgataaaggatctactgaggaaggtgcaaggctagagaaagccaaaaatgctgtggtgaagattcctgaagaaacagaggaacccatcaggcctagaccacctcgacccaaacccacacaccagcctcctcagacaaaatggtacaccccaattaaggtatgtgtccagattttgtgtaatttaactcaaaacttctggagacattgtaactttttttgtaccacatccccccagctacttgaaagagggtagatgaaattgcagatattcattgtacactcttaacagctgaatactttcttggcaataagaacctctaggtttttattacttattagtttaccttatgaaagaaatgagggtaaagaagattttactttcttcgttttatgtcttcatttattcagtacatagagattgagtacattctctgggaattcacaaatctcattttcccttagggtcgtcttgatgctctctgggctttgttgaggcggcagtatgaccgggtttctttgatgcgacctcaggaaggagatgaggtttgtatatgggaatgtattgagaaagagctaactgcttgagtcagtataatggaggcagggaaatagtaataaaaaatgattttaaagccctattgcacttgaggaaggaaatactgtcaagtgtagatttctattacatagaattgtctataaattacctattgttagaatgcatcttcaaactacatttttacaccattcccttttcaagaaattctttacaattctggtcatttgtacacatactttaataagcacaatcattgcatcagcccttgactttgaagacaaaatgttccaacagactgggagttagtagctgaagtccttctctagcatttagtagcatttagtagcaataaggcctagggcaaaggcctcagaatctgttttatagatataaatatgttccctgccttcaacagttgatgtaatcgaatttcttgactattacgtaaaagtgtctttaaagttataaagcattataaaaatctgtgatagtgataaacacacacacatacacacatatggatatgtatatattttttccccaccagggaagcctgtctgaggctatatttttgttttggaaatatggctacaattactctagttttgtaatttcagtaatatagtagtactatttcccattgtattgatgtaagaaaaattgattaaaaccttttcatatgtaacaatggataggtttggttcagagacagtacagttcataatagtagtgatgcagggcaggtgagccctaaaattgaaggttagcctgggagagttcttaacttcatctaagaaggaatctgatgcagggcaggaaggctcccaaattggagcttagcccaggaaggttcctggcttcatccagaaaagaattcaagggtaagccagaggtgttagcaacttttgttgaagcgacagtgcatagcagcagcagaggtactactccctgtggagcagggctaccctataggcatcgtgctcagaggagcagctcagaggcagttctgtagtcatattgatacccacttttaattatatgaaaattaaggggtggatcatgcagacatttctagaaaaggtgtgacaacttccgggtcatcgggtcattgtcatggaaagtggtggtaacttctgggtgttgccatggcaatggcaaactgacatggcaccctggtcagtgtgtcttatgggaaagtgtttttgccccatccctgttttagttaatcatcaattaggtctggtgtccaagcctcacctccagaatccagtactgcctcctacctcattagaattgttttcactgtgtgtcaacatgatcattcctctgttttaacaagggaataaacttaatgaacttcaacttcaggggattttttttttaaatgcgatttgagggccgggcgcggtggctcacgcctgtaatcccagcactttgggaagccgaggcgggcggatcacgaggtcaggagatcgagaccatcctggctaacatggagaaaccccgtctctactaaaaataaaaaaaattagcagggcgtggtggcgggcgcctgtagtcccagctactcgcgaggctgaggcaggagaatggcgtgaacctgggaggcggagcttgcagtgagccgagatcttgccactgcactccagcctgggcgacagagagagactacgtctcaaaaaaaaaaaaaaaagtgtaatttgagaaaatttattcctggaattttccccaacagatcatcatttactgtttgctaagaccataagtagagagaactagttggtttataaagcagtctctgtcatgatccaatcactgtggttcttcataatgacatttgtatctttttaaattcatctgtgatctggagttctgttctggaacaacatgtactaactcttcttcctcttctacatgctagactttaacttcatgtattttaaaattgttttcatgcatcatcttagtttttattccccaggttagacactagtttatttgttcaataattttcaccttattaagtgctgggtattgagctaacattgaatatatactagccaataaaaacagacagtggtctcagttctcttgctaatgctttatattttcttttaactgtcatgattgtaatttagtttatagtctttcattattcctattaattttgattcaattcaataatttttggattatgaatatgtaaaagcaatggcatcaagtaatatcaaagggtagaaacaaacagcagcctccgcccttaagaaacctgaactttgggaaacaagacatgtacaaaaataagatctattctggaatgtgttctgggtactcttgagtgcataggaaagtaaagattagctctccctcaggagagattagggaaagcttcttcaaaaatataggtgccctgtctttgaatataggtaggagatatgtagaatgaacatttccatagatgtggcatcatgagcaaagtcactgaggcagtgattcgtggtttgctagataatctggggttcagaagtgaaaaccagaaagattcactgggaatagaaaagaagaaatatgtgagtttagataattggtatgtttagtttttaaaatgatgcattataatcattcattcaacaaatatttacctagtgcctaacatatatcaggtaatctgttagatatcaaataaatttaacattcttcttaaattataatgctataatatttcacatgttgccccagcaggttaaattatttattttttcatgtttgaagaataatgcttccctttccattattttgaccaagattttcttcctttttctttttttttttaatcaatatgctcacacttttgtctaagataagtccaaagcctttattctaactcttgaggtcagattatttcaaaattcaggatttttctgattttaggaatatgatataatctatttatcaaatattatgtaaagcatcatctcctaatcatattattcagacatttttctattatatattaatatatatgaattgtaaaacttgttgcttccaaatgaattttggtgacaaatgtagggtaaaactttcagttttcaaagattttgaacctcagagatatagataaaatataattgacttttattatgtgaggttaactaaaaccccactttttccactctgtgctatttatgccttttttaaaatttgtttttacttaagtgcgggacttcaggcttagtaaacatcagttgtcgattcaattaattgatttgtttttttcatcagatacatattatgattctatgtgtgcctgatgcagtctgagttaatcttttatcgtcatacctattctttttagctttagtacttctgatgttttcttacctgcaaatttttatttcaagccactgttgaaacctcagtgtggcatcccatgagagccttttctcacagatggacacttcacagttaagtgtcattagtatgttaaagctaggaacctacccaaaagtacaaactcagtttactacatgattcccaaggatttttaataaattgtgttaaattccttgctgaatttaaggtataatgtatatctatctattcacccatccaaccaaaccaaccacagattcttcactcaagaaaatcaggtaagcttggcatgatttgccgttttgcctttatgtttcttgctagtgcttttttataatatttattattttgttttagactgaggttttatgtgaaatctgtagttatcagcatatgacctttaccttttagacaacttgagaaatcttcacccccatcccccacatttttatttcccagctttccattttcattgtttcacaaagattattaagaatacctgaatgtggccaggtgtggtggctcacacctgtaatcccagcactttgggaggccaagacaggtgggtcacttgaggccaggagttggagactagcctggccaacatggtgaaaccctgtctctaccaaaaaatagaaaaattagccaggcgtggtggggcacacctgtagtcccagctactcaggaggctgagttgaaagaaccacttgaacccaggaggtgaaggttgcagtagtgagctgagatcgcagtagtgagctgagatcgcaccactgccctccagcctggacaacagagggaaaaaaaaaaaatccaaatttatgtcaactccacatcatcaaccaggtcttctttatttcataaaattaactcccatataaattccctatcccacacacatataaacctgaacctacatttttccagagatttaatcataaaaatacacagcaagaattcttccactactttagtgaaatagctttctgtacattattaggataattgaagggccccaacattttttataagtttacagtatgtattaggaaaccatactattttggtttcaccatctctagagtgctatcttacttcccttcctccccaccttcctctttccctccctcttttccttccttccttcttcttttatctttgtttcttcttaaatgcatttatttccactatgctttcactttgttttgacaatttcttatactagtttatacatttttatatgttaattttcagttggcttcttgtgaacaaatgaagccttcggacgccctattcttatagtcaccagcacagtaaatatcttgattgacaaaggcaacttgtgccaaaaagaatgtgcagcaatcacaggccatttaatcatggtaaatatttcagtgatttttttaagtctctaaaataatgtaaacataaaaatagtattatccaaaaagtaatatttcattatttgtttaaataaaatcatatttgcatggggcagtgatataatctgtattgagactctaatatcctacaaattttatttctattttatagaaagagcacataatatttcttaaatttcagttcttttttgctttagagtatctttcatttggggaacttacagtaatttacctattcagaaaataatgacgcagaggcaggaagagtatcaggaatttagagtatatttggcacagctaatttggatgcatcatattaaaatgggatgatctgctttggtaatgctttatctatgcacgagaagacatccatagctcaccactaccttctacttactgtggttagttggtaaaaaattaaagttactgaaccttatggtttttaccaatttagtttatgtagatgtggtttatctcatggaattacatgtactaaagaaaattaaaatttaggggactacgatgcccaagtggtagtatcctctacttctctggctgttctttaaataactatctacctacatttatatttgcttcaagaaaggagaaaatgaattgtctttagagtagtgtgtgtgtgtgtgtgtgtgtgtgtctaagtcctagcataatcattcattgaatgagaaaaattagtcctggagttcttttgttagctttaaataatcacatatacctacaattgggctctaagcaagggtgaaatcctattgtttgcaaatttacatccctaatgtcaatcaaaatctgattaaatgaaaaacgttgaactgagaccaattcatgaaagattttatatttttaagagatgtccattgccctttgaaaatgtatatcacttttatatcaacaaatctatgttctcaacaaattatctgatattaggaatattaggaaatttgtaaatagcattgtatcagcttagattagatacactgattccctctaaaagaattgtctatgcatagcaaaaagttcactggaacaaatgttattgtctgttaaggtcaattctttttaaaataaactttcttatcaacatgtaaattggtgaatatatcttgcaaataattttattttcctgtgtgttctgtgctcataatggtttttgtgtgtatatatgcataatatttacttttgattatggttcttatgaagtatttatacaggtatacaagttccatgtgtgtgcttataaagcaatttttaaactgtagaaatcaggaagagtttaaacaatttttttagttagaaatggatggaacttgatgtgtattgtcaagaagtaaatgagaatgcttccttttttaaaggagataatagtgactctaaaaaaaggcaaaacaaacttcatgccacttgagagacaataaaacacagctgttttcaggttgtggctaatggttctaaataacacgacctctgcctagtcaacagcatgttttctacctaggaaaacaatcttgtcatttatttataattgtttactgcagattctgccgcttgaaactcaagtttagttgtataaacaaatcagcgttcctagaactcaacccagagtcacgcgcatttactctgtgagtcccgtcacggtgaatttccagccaaatgcgccccttttatggctcttatggctcggaggccgcaccgggcacgtttgtggaagaattcactgctgaattgaagtccttgatcaagtaattgaagttcaggcagaaagtatcaaagcgggcgagcagtctcccgctcgggccctctctcgcgctctcttccgcgcgccagcttccgcagaggtggcggggtccgcgggccgcacgccgggcccgggctttgattgcggcgggaagtcctccgagacatgaatgtttcagcgcggcgcgcgaggtgagggccgcgcgtccaggtgtaagctagcaggttgtcgctgacatctgtttgcagcggcggcagcggcctccccatcccgcagctagcggccggattgtcagcggaggtagttgagagcggcaaaaccgttttggtctcactctcgctgcctggaggcctgaaacaccaaaggtaggagtcggggtggacacagctgcgctcccaaacttgccttaggcacaaataagagatctaatgtagtttgactccgttgcggtggggagacgaggacagaaagccacttcagagacaacttaacgctgcaacatctgccgccaagtttccagggagtgacaggggacagcaggtacagatcgaagtctccacataaacaacctccattaagccgtggactcttttgaaaggcctccatcaaacatgccggagtccgcagcaggagtttgtttggttttcaaagcagtgttttgtttttcgcagtaacaaggtaatttataaatgatgcattaccatgcgttctcctttttgatttgaaaagagagagttagagaagcagaaaggcaaagaaagaagaaagcgcagcactagttttggagtagttccacaaaccaattaaatctccaaggagcttcttggctgtaatcgaggttatgttaaccttcagaaggcagtctctcctcaccagcaagcagacataaaagtgtgtatacagcggttgaagaatcctagtaacactcgtcaagtacatccaccatttgtttttaaacttttaaggtttcttattacacggagatgaaattaaattaaatttttgccgatggatgtaattttttactaaaacaaaatttacaaaattgaattgactttaactaattcctattcataaagacttcattcctatagttacatataaaaaataaaatgttaagtcagaagtaaacaaacattttctttttgggcggttctcctcctctactacctacattcagccagaaacaaaaaattcaagaatgtgttgacttttcaatggaaatactgcaaaaactccttaattttgcacacgtaaatatgacataatagaattggttacaatattatcctgataagaaagagctcctgggaatggtaagataataaagattctatagtaacgtaaaatattatcattcgtaaaatttaggctccctttcttgagaaaaaggagagatgctgactcaaaagtatcctttggagagggaagtagccagggagcaatggccaaagggcagatggtagtatgtagcaaagtttttatgtcttgttgaaataagcaacataaatatttttcagtatattgagaggacttttgtcagttgtgcagatgtaatttcgtttttttgaaatgattgacggcgattgctttctcaagaatattcagtctgacagaacactatctcaatcctccaattttttaaatctacagcaaaacccacaaaaatatcagagaagacaggttgcacaagttcatttaaaagggacccgagaatcctgataacgtcaaaggcaaaggctttgggctctacctcttgtttacatctctaatttctaaatttatgctcgtgcctttcagtcctgcttgtgaattttcaggctcacactggccttgccctttttaatggtggcttcttaaatgattacaaccttctcaaggatggctttgtactccattatgttaacaaatcacccagtgcttggcactcttaaaccatgtcatcttcaaatataataagcatctggatggtagagattctgcatcacactgccattatgttcccatcacagttgcgaagtgtaaccactagtgggtctttcagtgcagattggaaccttcactcaattgatttgatgcttcaagtgtcttcagtacctagaattatgctgctaatgactgcattcttaaaaaaaatcattaaaatatatgtatattgatagcctgggctactcaatattattaccccaaaaatcattgttttgaaaaagggctacatttttaaatttagtttttagtttccatccaaatattttgtgccatatagctgaactttgtaacagattttaggggctttagaaaaaataaccctttattgtagcctaattgagtcagtcctatcatgtataaaatgcccatgtatttctattcatttccttttatatattaaagtgacagagtagaaaatataaaaatgtttaaaaactgtaaacccattgtttaccttttatttctataagatctgaaatttgttatagtttctttagggcgattctgatgcaacaaagctggaaaagaataccactagtcttttccgctctttatattatctttcattattattatctttggcctttacctttcagggcgtctttaaaataccatcatattccatttaaattaatggaagtaattaacttcagtttatacatatttgaaagataaatttttactagaataatccatctcatgaacatgccatttttactactatcccactgactgttttaggagagtgtgtatatatatatgaatgtgcatatagcatgtttataactatatatatgcatatattcttataggacatatttgctcactgtgtatatcatgaactgtttcagtggaaaataacaaattcatgaaatagaatgctttttgataacatttcttagtttcaataaaataatctcttaattaggtatataagttggcaaaagtgttgactcagtctggtttcctgaagtgaaatgcagaatatgcaaaatttaatcatttaaattaccaaaaaatatattttttttcaaagaatctataaacagaacttgggtacttagttgtctcccctccccatataggcattattagctatttagtggagtcatatacattttctgtattaatttccaagtttagataaatatttatcttgagtaaaatttcatcagcaaccttttgataaacaagaaacaaaaaatgattagtgtaaatacctcttctcaatgcactggttttagaaatgtaacttcttttcatcatcatcagtgagctttggcactctgaaagaatacttttggctgagtgtggggctcacacctgcaatcccaacactttgggaggcagagatgagagaatcccttgagtcctggagtttgagaccagcctgggcaacatagggagaccccgtctctacaaaaaatacaaacaaaatattagcctggtagagtggaacatgcctgtagtaccagctacccgggaggctgaggtgggaggattgcttgagccagggatgtcaaggctgcagtaagccatgatcacactattgcactccagcctgggtgacagagcaagatcccatcttaaaaaaataacaataattaaaaaaagaatactttcaaaatgtcttggtggtccaggactaaacacattattttctgaggctcaacgtatggctgtgatgtagaatcaattaaatcatccaatggggagcagaaatgtcaacacagatacaattttaagctttattttccattttttggttactttatgtatggtttttatatactttttattacagaggcttaaatatatatttaaataaattactataatttctaataatttacagaaatctacattattctacatgtgttaaatactcatttttaaatttagagctcagaagacccagtccaaggggggatacagtgcatcttttttgtagacagtttgttacttaaatagaatgcattatgatggtgcctttgtgtctaccagaaccccatttataagtttagtttaaggaaagctttataactcagttaaggaaattggcttgagtaggaagcttttattgcccctttattcctaaaaatgtacttataaatgccttttcaactttgctaaatatctctcatttttatttataaataaaacactaggatttgtataacatagaagctaatatatagtagtatgcaatagtaataattatactaagtaatttctttaaaaatttttccatataatttttatttatattttccactaattgtactctgaatcaaattccaacctctaacatttaagaattttgaaactgatataattttgagttataaaataaaaataatttatttttcaaactttgcaaataacataaaaaaagagagaaggaaacagaaaataaggagaaatgaaagaatacccctggacatttgtttaccattttattttttctggctttgggttaacactttcttagtttcaaataattacaagttttttttctccttatgcttttaaaaaacttataaagttgggataatttctacaaactcattgccatttcacaataattttattctctgatatacatcatctctttctccttaaagagctcttttcacttggaaaatgtggcagaaagatactttaggttcccataatgcttcttagtaagcaggttagtatactgaaaataatacatcatatatattaaatttcataatcatatccagtactaagcatacttttgttttgaatcatattagagttttctaatttttttaaatcaagcacttttgttttctagagccatttcctgacatgaatgatttcttaatagttaattatgaattcactttattttatttaaatagctttaaggcggaacctagtgcagattggtgagacatacacacagacacatgcacatatgcccatctcaaatcttagttgcctaaaagagttagtaagtctgtaaaacatttcaataaaacgttcaaatatcatgtttacatacgtagcatacagataaatttctggagtaaagagggattactctcccattatctttctctaattctttcatttctctcccttgtctgacttcctaacattgattgaggcttccactgctttgtcctcattgttagagacgtcgttagacatcattcttagacaatgcgaccttccctcttgaattccacttgcatgtctctgagagcttatatgaattttccgctttgaccccctgttgtcactacattatctgtgtttagcgggacttagccattttcctcatgtatgtctttcaaattgtagttatataacttttctctcagtcatttgctctatccctcaccagatgtatctaaactgaggcccactagacttaagcacaccattgtggttcccacagctcagtgagcagggtcaagattttaactttctaattctgggtacagtctcctatgccatcagataacataattaccctgtgatatgcatgagatattgatttgaggaacagaattttgtctattatagttcctcttagttttattataattaagaatataaattataagttaatatgtgcattagatcctagtgattcataagagaggtatcatttgaatttgtagaatttaaacatttctgttatctttacttattattttactacttataaattaagctactgagaaaaataagacagaacaattctgaaatttaacgtttgaattattttctgcaaaaatgtggctaaggatgatgatacaaaaaaatgttatttataaggggctaaaattagtcagtttggatgattaatttttaaattataattaaatctattgaacattttctgaattataaaaacataacacaatcattttcctttaggctaaattttgaacaaatgaaggcttttaatttttattgtctttttcagaatttttttttgcttgcagttgcatttttttcattttttaaaaacatttgatctttatttcatattctatttaagaaaaattttcaatgatcggaattcttgtgagatctgtatttgtcctagccaaatcatatattttaatgttaattaatcttttgcataatcatctatggtgctggcctatatgtggcttatgttagctctgagtgcctcattagtccagtttacagaaacactggctcttctcaacaaacagtgagaagagaatttaattcagttactactcttcagaagaggtgggacggttttaactgtcctccgaatccagatttatgaactagtcttatgctcttaactagattagttccttttccattaactgcttaaagtaggacagctgtccgagctgttggttgtaaatttgccaatgtctacttccttaatctcagatacaaaaagcagcagataacaggatcaaagtttcaggaccttcgtttttcacagcctgaaatgagcatggaggggctcatgaatgagagattgaaaagatgtgaggaagtgttacattggagaaaaagggatgacttctgtcattaatcttaattaattgctaagagttttaaatctgagttattaatactgatgttaagctcttaatacacttttcatgctctggcatcagatactcttttatgagataagaagtttaggaaggagagaatgtgtgtgtgtgataaaatattttcatttacatatttcaaatatttccttgggttaatattcagaacttcaccttttgacagttactgtagggcagttaggaatgatagacaagtaccaataaattcaaataaaatccctaggtatagcaacagcagtaaatctgaataatattactttcatgtttaccagcatacaaaatacttcactgaagaggaaacatcagattatgaggtgatatagaaggagagagaatcaagagctagaaaatgagacagaaaagaaaaggaaaaaagatgaagaatagggaagagatattattttaattaataatttgcaggcaataggaaaatgaagtgtcatttaaataataaactataaattatgtttttaaggttgtatatttcactattgcagccctaatcacttggaagtaaacggattgaaacttgaaatgactaaacagtcttttcttaaaattttgttttccttcccttcctccctgcgttgctgttccactaatgtttgtctagttaatacctttttaccattaagtctatattattattctgtgatatttttcaatgtgaaattgcaactaaccatattgtttatgagaattttggccacaaaaaatggcttcaaggggaaatctttaaaaaacagataaggctctaaacttcaaaagtatgattttcggattatatctcatgttctccatttatttggacaaaataaaaagaaaagctctgtcatgaaaatatagagcacactgaattattttagtatttacacatatatcttacctctaatgacagtgaagtaaatttcagtagtaaagtataatcagtagcttagatattcttaagttttctacaaatttaaaatcacaaatttggctttgagatacattatacttttctttttgcagcaatgttttcttcctttaatgattatctttaaatgtaagtaggaaaacatacaaatgaaacagtgttcatttgtttcatttatcaacccatttatttttgtacctattaattaattattgaagatgcaaaaatctgcaggcattaaggatttagattttatttatagtctgtggataataacagctttgaattggacaataacatgatgcaaaagaagttagaattagactcttggagggttctcaaatttgtaaaaggaatggaaataatatgtgttttcctgagtagcttagccctatctcaatgtttctgcctttgtagatagtctttcattatgggctccaaaaggaatcacataaaaattatgatatagcaggtcatattatatgtgatataactggtcaaattggtggatttggtggattgtcaagtggtcaagtggattcttaggtgaaagaacacttttttcctaatataaatccactctgttttttagaacacaaatttaggttcattaactgaaaaacagggattattggcttcagctatttttcttgatttgcccggggtctccttccttgcttcttgggaataaaacttgggtttccaatacttccaatgcttctatgagtgtgtgtgtgtgcgcgcgcatgcatatacttgtgtgcatggtgatgtttgtgtctaatgggaggtagcaaggtattgtagttgttgagggaactcataatttcaggagaggggagtatactttatttttatagagaagggtcagaactccgattcagctaacagtcactgagcacctactatgtcttatgtatgtttaattatcacatttttgtcctatctgtgttgagtcggtgtcatactgttctcatttaacagatgaagaatatgagatctagagatgattggtgaatttcccaagggtacattgccgaatgtaacagaatctagattgagagtcaggttttaaaatccagtgaacgctcgttattccatgctgtcattttacagtgcagctcttgattcctctacctattcaggcaataactgactgacttagggcaattatacatgtagggaagcacttttgaatttcagttttgaacctgattcttctggtgcctgggttatcaactgtgtatctgtgtttttactgatacacatatatttgacatatattcagaatgcatgcatattactctataatacacatacacaacatacatttaattatataggcatctataaataatatttaatatttagaagtggcaataaattctacagcaagtttatacagaataaggaatttttacatcacaagaaaccttagaagttgtgtaattcaaccccttcgtatactgcaacttccatccctacttcagttctctccaagagggacaagcgtgttcaaaagcacaagagggatgaactagcttatatattccaggaattgcacattgcttttcaaactgtagcaagagattggcagctgagaaggtgagttatgcaagagattaggagctgggaaagtgagttataggaaggaagaaaaattagagctattcctatagcccttggtggcatattggaaagaacactgcattgggagtcaggggagttgggatctcgatactgtcatttatcagcttcagtccggcgcaaattttctaaaccttctggtcttcggtcttctcatttgtgtatagaaaaataaatgatcaaaaagttacctttgaattctagcagtcttgtttttttaaaaaaatctaatttcaaccaacccagctctatgaatatgatatttttcctatgctcataagggtattcccaaaaccctgcacattgccctcagagaggaggccttaacaatatttgaacagaataattcatgcaggtggaaattctaacttattgtttagaatatgtttaaattaattcatactttttttagtatatagacatttcatgaggccagcaataatgaataaataaatattttacaagttactataagactaaaaaaatggcatatattctgcatagtatttgaaaatatgttcaagggactataaaaatactatgattctagatccataatggatatcttgctactggttacactttaaaataatttgaaaataactgcatatgaaagagagtaagggaaatacagattttaagagctctgtatatttatttaaattttattccagtttcctctctataaaatttgtctatttctcactgattttcttctttcaaaataagaagagatcaatgtgtgatattagattatctccattgtcattttgatatgctgtattttgctgtcttgtgtcacaactgtaaaataatttaaacacaagctatcatttaatactgttataagcaaatgagtactaatgtgttcttgtcattaaacacatatagatactggaactgttctcccattgggtcacattgaaattgattttccaacttgacctaacaataatggacaaatgttaaatgaaaatcaatcacttttacttaaatcagcctaatagactcattttattaagtggtctttttacctgcagctaactagatgacaaataacacttgtctagcctctgacctctggcctctgccctccggtctggcttctgaatgcgtttaaaaaacctctcagtacagatcatgattttattcttatatgacatattctttattaattagatgaaagtatatttcagatattttttataaatagaacaaaatcctgaattaatattatttcaatcacaaattcattctttttaaaatctggggtcttgctctcatctgggctggagtccagtggcacattgcacaaggctcattgcagccttgaactcctgggctcaagtgatcctcctactttagcctcctgagtagctagaactacagatgcctgtcactgggcccagtttttaattacaaatttttaggcccttaatatttcaaatatttcaaacatgtatcatgttactctaattatcaaaacatctcacagtaaaatatttttattgccattttaaagataaggaaactgagactttaaaatgtcaagtaagtctggacatggtggctcatacctgtaatcccagcattttagaaggccaaggtgggaggactacttgagcccaagagattgaggctgcagtgaccctgcacttcagcctgggcaacagagcaagaccttgtctcaaaaacaaacaacaactatatagagatctcaagttgccagattcatgcaggtaggtaggtaataagtggtattaactctaactttaaataggttattgaaaaatttagttcgtgtaaattctgctttatgtttcagaatttattggtcagttttccagaaaatttacagcagtttagagtttagtgttttagttatattaatatgttataggcccaggtgttgaattaagaaaaatttaacaataaaattgaaaaggccaacatataaatgagaagtactagtgaactatttttgtaacataggaatcactagtgaatatttaaataaataatacatacaaaacataaatattaagtatcttagtcatattattgtaaatattggcgtcagaaaattatttgtggattgatttttaagcacctacagatattgtccagaggccaaaacttaagaataattataaagttatatactttacttaaaaaaaagaaatataattagtggtagaaaataaatcaacatgttagtcttaatattaaaatattaaaattgattgtcatttctaacctgtaaaatcaaagcaaaaggagttctatctggaggctaagattatgacacaatcccaaattatatatttcaattatcaaagctctcagatttactatggaaaagccatcatttttagtttaggatactgttggcacagtcaataatttattatttataattccctcttaaaatctagttttcagaatctttcatcattttagacttccgttaaatttactgtgaatttactgtttatttcccagatcattctgagagcttgagctcttattttgatctatggagcaactgatttcactaatcaaatttattctttgatgtatctgaaaatagtgtgcccaaaatcatcttacaaaaattcaatcctgaaatggtttttaaagtcttaatatctcttcaggtacgttagtgaaaactgaggcaaatgggctgccagctatttttttgatgagaaatccttagtgtgtgagtactgggaactgagggttgagcatctggaggtcggcctcctcttcagtctgcctgccttcaacactaggtcctgtggtagacacctcagtccttacattccctatttcacatggaggggccaagggttccccatgatacagctgtcatagaacttgttgtttagatgaggcatcttgaaagactttcatgttgtggcatgctaatattatataatattttgctgagaaagaaagttttatcaaattataagaaataggaggtttcctttattcctagggcatcattctttgtactctctgttgtataaaataataatattactattattaataataataagatggtttttataactgaaggcataagaaaaatacccatgtaaactacattttaaggctttttatactctttagagcaaacagtttttctaatcatttataaacatttactgctttgtttctgaaatcttagaaataataaacaagtgaaattttggattaattaatagtattaatgaaaatacaacatattctctgtaagattacagatgaatattaaaacttaaattataagtgctataatttttctttttggcatgttggagcatttaacacatgagcatttaaacacatttctgacttttctaaatttttggtgaaaatattttctagtaagattagacaaaggaaaatgagctacaagttatcaacaggttctcgagaaaaaatttttttctttaaaaaatctagtgaatactagataatccctacctgctaggaatttattacagtctagatgtagtgggggataaagaaaagcctcaaaaattataacccaaagcagagcaagcaaaatgcaattaacaaataaaaacagaagataaaaccagttgtatagtcaagatggattctaattagaatctaatctaattagaattatatatatgatatatatttatatataaacagcaaatagtttatatatacctattatatatatttgaaaactccacaattataattccacatcaaataattttggtggtttaaaaaaatttgctagaattaggacatgataggcataaaataaaattagccattttttctctgagtacccactattttcaggcagtctttgaaaccccaaaatatttaatacatagttatcaacaagtttgtaatctactcaaaagggcaagaatccacatatacaacgtaaaataatgaaatatttaaacatcaattcaaggaagtaacagaagagattacacaaaagtgttgcctaattaatttctaaatgaattgtctggacattaattgctgtttgagttattaaggaagaatacttcagaccaagaggtaaggtgaggttttatagaagagagagttgagttaatcttgaaggatttgtagaggtagagaaagtaggaacatttacatttgttctgggacagtgattcaattattttctttagcaacttttgagctatatgtggggaaataatagagaataaatctaagtcccgtttggttgttctttttgttgttttttttttttgttgttgttgttttttgagatagagtctctctctgtcccccaggctggaatgcagtggcgctatcttggctcactgcaacctccgcctcccaggttcaagcaattctcctgcctcagcctcctgagtagctgggattacagctgccaccatgcctggctaatttttgtatttttagtagagacagggtttcaccatgttggctaggctggtctcaaactcctgaccatgagtaatccccttccctcagcctcccaaagtgctgggattataggcatgagccaccacgcccagcagagtcctgttcagttctggagaatgtagtatattagactagcacttagctatgaatgtccaacaaatatttattgctgtttctcaactttaaaattttaaataaatctgtgtcccatcaaacaaaaatattttattgaattttgttttctaattttgtactaagacttcatgaaaacaagttgggttttttgtttgttttattttgttttcctacaagtattatcttggtgacaggcagtatactcttagaaggactgaaggtaagagcagaaggcaactgggctaatgcaggaaccaccttgttagggcccccatgagacagtagcactccatcagaatgggacaatctgagttgaaagggggatgctagcaggacttgattactatgtggagctaggtgtgtagcagagaagagagggagaggagagagaacctgaggctggttccatggagttcagcttgaaagaaaatactggaaatgctcagtagaaagttagaaatactggatttggcaggaacgtcaggcttggacatgcacactgaagaggcttttttgatcattcaaactgtagagtgtttaagggactgaggaacagtctggtctactttaataatgaatattttctctctcatgggtcaaaagtggcatctgttttgttttgttttttaaagtttgaaatagcaccttgacgtcttcttggcataatgttattttccaattctttgccatttttgatagcatggaatgtacaaaaactgaagtattggaataatccacaatgggagtggagaggggaaagaagaaatagtagctttggtttgaaatgttttgaagctattaaattgcagcagctattttcatagcttctttctttcaagagatacacttttgtagccactggagatgtggccttttttcttcctaaaatggtggaggtttttgtaaatcgacaagggtaataactaagagatgagggtctatggggtcttaagggccattgtatctgaaaaatgggtgttaaataatgacatttgtgaggaatagcacaaatagtaactattaaattcttaagtagactgcagaaagaatatgaatagagatgatatagtagttttgggctgtatttcttcaacttttttaggattgatgattcagtggttttaggatgactatttaatttaaaagaagtgaacagatattgaacaaaataataaatattgagtcagaaatttttagaaattgaagttttctaatagttttatagattttattattcaaagacaataacgttgatatgatagctgttcttgtcccttaatcataaaatttcaaatataatcatcagttatatactttatttttaaaatattggatgataattaataaactatagtatttgtaaactgatgtatttgcagcaaacatttgcaagaatgaaatgtatttactagcagaaagtaattttaggtaaaatttgatcaacttgttcagggcggaacttggcttaggagaaaactaaaatttattccataccttctacatgccatctattttgcattccttttcttatttaatcctcatatgaagtaggctttccactatgtatgttggaggttaaaaaaggttaaacagctggtaagttgtgacatttaaactcagagcttcctgacatcaaagcttcacttacattggagttagaaacttaaaaagatgatctaccaagaaataaattcttgggccactgaagacactgagatttgttcagtacatttctgtaagcaatacttatcatttgtacttttttaacctgccatattagcctgtacttttccaggaagaccatagcgataaggattatgacagtatggtcacccacctgggacagtgacagctgctgcagctgaatccagtccttgtcatcattaatgacctgcatttgacactttatcctagccatccttgtttagtgttcaatgtcttgcattggaataattactacctgtcaccctctatttaacagataactcttagtcatcccaaacatgtaagcatcatgtcataatgtgccaaacccatgttatttctgtgttctcatcctgtttgtgggtacttgcgtcctctgtctttccttttttataatgttcaaatacattttatacctaaattgatgaattttcattctgccactcatattaaaaggatttttcttcttagttttataataatagccagacatttattaagaggtaatattttctgaacataaagcatggtcactggatttagagtctctttatcctgttaaaaatattggagagctaaaggagaaatcagagaaaggaataatagtgctgactcaaagaaatgatgatgatgaaattcaaagtgtttaaatcatgtacagagcatatcataatgcctacattaaagactttgctttaattcaaagatctaggttacctacagagacttttctctgtttctctgtttctgtttctcctcctcctcctcctttccttcctcctccccttccttctccttctttgcatttagtttgaaagagagacaggagacagacaggcagggaattcgctaagttactaaagtggaaatggaagaaacctccatcacggttttaatcacgaatttaagtcatcataatggtgtatatttattgaatgggtttagaaattctttgtctcagagattgaaggttgagacttatttttagatttgtataatctttgttttgcttaaaaccctattcataggcatctgttatggtttattttacttagatgagttaatctaaaatgtgcttctgaatttctgtgtatcttaatttgacactttaagaaaacaaaataagtcatgcctgaaatttggagtaacacgtgttgtattttttatgtgacttcagctttattttcaaaagttcagattcaaatgtcagcttttatatttacgtgcttattggttttgattgagttatataacctgagtctctttttaacagcatttttcaaccaagtcctcttatctgaaccacaaaacagagaagataatttgagggggtattttcccaattctcctaaggatgccacataactagcataaggctttgatgagaagttagtttttaatatataacagatgcctttgagcactcagtcctaatgtactcatggaatcctggttaagaaacgctaatagtttaaaaaataattccatcttacatattttttccactatttctatcattaattaagaaaaagttttggttttgcaagctagaaatgagtacagtcaactagcaatttattgtattactcgaaaaggagatttctatgaagctaaaattaatttctcaaatacataccttctggataaagtataattttataacagtaatgaaaaggtagggccaaaatctgtttttacatgggcttattcaaatctatatttgtgaaattaaatttatgaatacattatgtttgggaagaagtcttttccagagttttataatatttactgacaaggtacttaaaagtggatactaattattgtgcatgtctatacatttttgcaataagttgtgttatcactcaaaagtgaccttgttagtgaggggaaaggcaagagagatgtatagtgcctcttgagagcaagtggagtgatgcgtatcaggagaagacactaaagatttattgtctgtggcaaaggaaacacaggtctctgcttgtgcagtaagtgtttttgacatcacccacagtaaagggtgattggaggctataggtcagaaaatgttctgctggggcaaaataaaaaactttttttttaacactatgagtttgtcttgctgtttcatctttgtagcacttaaaatatgaatgatggtcatgccaaaccaatccttgttgtgaataggaccttgctacccaaataatcagatttacctcactgaactaacatgcaagaacagattcagttataagagggggtagcaatacaaagcagaataattacttttttctttcaatttcatattttgcttatgaaaactttatttcctgtttacatgaactagcttaaaaactgataaatggttcatttagccttaaatttgaaggaaaactattctaatgggaagaactgaagaactgcgagtagcttatcttaatgcccttaaaacagcttcgtctgactgagaagtaaggactttgattcatttaatacagctgggttcctatttgcttctggccaaaagaagcaggtagcttaaacacagaagagattcacagcaatttggattattacctacatgggcatttaaatcttcagtaagaaaagataaagcatggtttcccttctgttttgtatgttatctagagcctaaggttttaggattagtacccttagctcataggatataaactgtatggtatatatttttctataactttaggtaacagcaaccattctaaacaaataaatgtctccaattaaaaacaaaaacagggagaatttgttggttcatcacctattcgtgtttttcttataaatgtattttattaaaagtgttttgattttctcgaattgatacaatataactgtagtgggtactatgatgtgctaccagatacccctgcaggatggagacactcattccctcatgccagaagagttggctactgacaatttgcagttgagcccctcttcaggaaattcccctccacccaagattacagcccctgcctggggctgcccatattcaatgattgattgatgtgagattgcaatggttggcctcctgccctaattaagaatagcttgaaaggccattccagctccagagcttacccgggattggctgagacctctgttaccaatgtgacacagtccaaattctccttttgccaaatcctactgcatttcacagaaatgggttgtttctgaaaacttacctcattaaacttctcacacacaaatctttgtcttagagtttgtttgcagaggcacacgacctaacttagtaacccatgttactatcttggcatacctagattccaattcctggttgtactttttactaaccttgtgccttgaagcaaattttcaatctttctaaacttccttttcttcttttaaatattttaaatggggatcgttatataacaacacttacctcatgtggttgtttgaagattaaatgagataataaagcataaagttcagtgactaaaacttggaaggtttttaataaatatttgttattattagttttaccatgcttacaattataattcaaaaatttgtatctctatttctctctgtcaccttcatcttacattttaccattttacatcttctactttgaaaaaacttactttctctgctttcagcttttttaaaannnnnnnnnnnnnnnnnnnnnnnnnnnnnnnnnnnnnnnnnnnnnnnnnnnnnnnnnnnnnnnnnnnnnnnnnnnnnnnnnnnnnnnnnnnnnnnnnnnnnnnnnnnnnnnnnnnnnnnnnnnnnnnnnnnnnnnnnnnnnnnnnnnnnnnnnnnnnnnnnnnnnnnnnnnnnnnnnnnnnnnnnnnnnnnnnnnnnnnnnnnnnnnnnnnnnnnnnnnnnnnnnnnnnnnnnnnnnnnnnnnnnnnnnnnnnnnnnnnnnnnnnnnnnnnnnnnnnnnnnnnnnnnnnnnnnnnnnnnnnnnnnnnnnnctgtggggctccttcatccattctcatcatatcagaggtgggatgactaaatcttctaggagaaagatgtcaaatgaatactataaaagcaattctgaatggctgtgatacaaaggtatctaacaaaagctatgtattttggtttcaacttgtattggagctctcaagtcagaaaatataaaatttctttcagctttattttatgttatataaactccctgctttattttttgtgagatttagatacgttaatacctgtgaaacacttaaaagattgcctggcatagagtaaatgcataagaactattttagccattgataacaatacataaacaatcagtgaatttcttctaataaaatgatgtaagatgaatgatggttgcaatgaaaatctgaaagctgaaattgaaatgggaattttaaaggataagattattccagggttaggttagctattgctaaataacaaaacttagggcatgttcctaaaaaagagatttccatactagatttttgtacatattgcttaacctacttagtgttcttctattgggcaagaaattgatgcatatttgctttctcaccattgccttcagtgaacaattttttatataagaaatgtggcagaaaggaaaaggcacatcatactcattagttaaataactctggtatagaagaatctatctccagtaaagctgtttgaaatcaaccccagatcatgagttaaataattcgggtaatatttttaaaaacatgaatttttctgcttcaaatgcatttatgcttgattttagaaaacttagagtagaaaattgaagtgttgttaggcaattacaaaacaactctgtaattttaattaaatttctttatcttcctgttcgcaggcgtcactttgtatgctgaaagctcaaactctagggagaaaacattggggtagaaaggagattcaaaagggcagaagagtctgccagcagtggtggacatgcttaatgtatttaaaagattaatgggctattgaaattaaaattgccagcacaaagcatgttgtaccaaactcacaaatatatgtgtaccaaccatatgggctacagcttagaccaatggcttacttttatattgtgacaagcatagtataggcaatttttttttattgtgaatgctgaaaaaaataccttttatttgtcacacaaattagaactatacacaagtataagaactcatgttcacatttttcccccaagcagtgcagtacatcatgtttttggtgtggtgccagaatatgatattgtaaaaatctgaacatttttctcctactacagcagtttaaaatggtcttgtaatttaatggtttttaataagtataacagtaataattattcctatatataatacaatattttagtcacaatggataacaaagtagcaatacttaatgtaatgtgttactttttcagcattatttaaatttttctgtaggggctgaattagttatagagagcttggcatgaaaatgcagaggcatttagagtacatttaatagacttgaattctagagctctcgcctcttctgcctttctgtcactgttctctgcttcacaaagatatcctctagagtaaaatattttgtaatttgtatgagaagcactaccaatgatattaggctttgcaaagcctctgggaggttttaattagcttgattcaaactcaggaatgaatgacactnnnnnnnnnnnnnnnnnnnnnnnnnnnnnnnnnnnnnnnnnnnnnnnnnnnnnnnnnnnnnnnnnnnnnnnnnnnnnnnnnnnnnnnnnnnnnnnnnnnnnnnnnnnnnnnnnnnnnnnnnnnnnnnnnnnnnnnnnnnnnnnnnnnnnnnnnnnnnnnnnnnnnnnnnnnnnnnnnnnnnnnnnnnnnnnnnnnnnnnnnnnnnnnnnnnnnnnnnnnnnnnnnnnnnnnnnnnnnnnnnnnnnnnnnnnnnnnnnnnnnnnnnnnnnnnnnnnnnnnnnnnnnnnnnnnnnnnnnnnnnnnnnnnnnnnnnnnnnnnnnnnnnnnnnnnnnnnnnnnnnnnnnnnnnnnnnnnnnnnnnnnnnnnnnnnnnnnnnnnnnnnnnnnnnnnnnnnnnnnnnnnnnnnnnnnnnnnnnnnnnnnnnnnnnnnnnnnnnnnnnnnnnnnnnnnnnnnnnnnnnnnnnnnnnnnnnnnnnnnnnnnnnnnnnnnnnnnnnnnnnnnnnnnnnnnnnnnnnnnnnnnnnnnnnnnnnnnnnnnnnnnnnnnnnnnnnnnnnnnnnnnnnnnnnnnnnnnnnnnnnnnnnnnnnnnnnnnnnnnnnnnnnnnnnnnnnnnnnnnnnnnnnnnnnnnnnnnnnnnnnnnnnnnnnnnnnnnnnnnnnnnnnnnnnnnnnnnnnnnnnnnnnnnnnnnnnnnnnnnnnnnnnnnnnnnnnnnnnnnnnnnnnnnnnnnnnnnnnnnnnnnnnnnnnnnnnnnnnnnnnnnnnnnnnnnnnnnnnnnnnnnnnnnnnnnnnnnnnnnnnnnnnnnnnnnnnnnnnnnnnnnnnnnnnnnnnnnnnnnnnnnnnnnnnnnnnnnnnnnnnnnnnnnnnnnnnnnnnnnnnnnnnnnnnnnnnnnnnnnnnnnnnnnnnnnnnnnnnnnnnnnnnnnnnnnnnnnnnnnnnnnnnnnnnnnnnnnnnnnnnnnnnnnnnnnnnnnnnnnnnnnnnnnnnnnnnnnnnnnnnnnnnnnnnnnnnnnnnnnnnnnnnnnnnnnnnnnnnnnnnnnnnnnnnnnnnnnnnnnnnnnnnnnnnnnnnnnnnnnnnnnnnnnnnnnnnnnnnnnnnnnnnnnnnnnnnnnnnnnnnnnnnnnnnnnnnnnnnnnnnnnnnnnnnnnnnnnnnnnnnnnnnnnnnnnnnnnnnnnnnnnnnnnnnnnnnnnnnnnnnnnnnnnnnnnnnnnnnnnnnnnnnnnnnnnnnnnnnnnnnnnnnnnnnnnnnnnnnnnnnnnnnnnnnnnnnnnnnnnnnnnnnnnnnnnnnnnnnnnnnnnnnnnnnnnnnnnnnnnnnnnnnnnnnnnnnnnnnnnnnnnnnnnnnnnnnnnnnnnnnnnnnnnnnnnnnnnnnnnnnnnnnnnnnnnnnnnnnnnnnnnnnnnnnnnnnnnnnnnnnnnnnnnnnnnnnnnnnnnnnnnnnnnnnnnnnnnnnnnnnnnnnnnnnnnnnnnnnnnnnnnnnnnnnnnnnnnnnnnnnnnnnnnnnnnnnnnnnnnnnnnnnnnnnnnnnnnnnnnnnnnnnnnnnnnnnnnnnnnnnnnnnnnnnnnnnnnnnnnnnnnnnnnnnnnnnnnnnnnnnnnnnnnnnnnnnnnnnnnnnnnnnnnnnnnnnnnnnnnnnnnnnnnnnnnnnnnnnnnnnnnnnnnnnnnnnnnnnnnnnnnnnnnnnnnnnnnnnnnnnnnnnnnnnnnnnnnnnnnnnnnnnnnnnnnnnnnnnnnnnnnnnnnnnnnnnnnnnnnnnnnnnnnnnnnnnnnnnnnnnnnnnnnnnnnnnnnnnnnnnnnnnnnnnnnnnnnnnnnnnnnnnnnnnnnnnnnnnnnnnnnnnnnnnnnnnnnnnnnnnnnnnnnnnnnnnnnnnnnnnnnnnnnnnnnnnnnnnnnnnnnnnnnnnnnnnnnnnnnnnnnnnnnnnnnnnnnnnnnnnnnnnnnnnnnnnnnnnnnnnnnnnnnnnnnnnnnnnnnnnnnnnnnnnnnnnnnnnnnnnnnnnnnnnnnnnnnnnnnnnnnnnnnnnnnnnnnnnnnnnnnnnnnnnnnnnnnnnnnnnnnnnnnnnnnnnnnnnnnnnnnnnnnnnnnnnnnnnnnnnnnnnnnnnnnnnnnnnnnnnnnnnnnnnnnnnnnnnnnnnnnnnnnnnnnnnnnnnnnnnnnnnnnnnnnnnnnnnnnnnnnnnnnnnnnnnnnnnnnnnnnnnnnnnnnnnnnnnnnnnnnnnnnnnnnnnnnnnnnnnnnnnnnnnnnnnnnnnnnnnnnnnnnnnnnnnnnnnnnnnnnnnnnnnnnnnnnnnnnnnnnnnnnnnnnnnnnnnnnnnnnnnnnnnnnnnnnnnnnnnnnnnnnnnnnnnnnnnnnnnnnnnnnnnnnnnnnnnnnnnnnnnnnnnnnnnnnnnnnnnnnnnnnnnnnnnnnnnnnnnnnnnnnnnnnnnnnnnnnnnnnnnnnnnnnnnnnnnnnnnnnnnnnnnnnnnnnnnnnnnnnnnnnnnnnnnnnnnnnnnnnnnnnnnnnnnnnnnnnnnnnnnnnnnnnnnnnnnnnnnnnnnnnnnnnnnnnnnnnnnnnnnnnnnnnnnnnnnnnnnnnnnnnnnnnnnnnnnnnnnnnnnnnnnnnnnnnnnnnnnnnnnnnnnnnnnnnnnnnnnnnnnnnnnnnnnnnnnnnnnnnnnnnnnnnnnnnnnnnnnnnnnnnnnnnnnnnnnnnnnnnnnnnnnnnnnnnnnnnnnnnnnnnnnnnnnnnnnnnnnnnnnnnnnnnnnnnnnnnnnnnnnnnnnnnnnnnnnnnnnnnnnnnnnnnnnnnnnnnnnnnnnnnnnnnnnnnnnnnnnnnnnnnnnnnnnnnnnnnnnnnnnnnnnnnnnnnnnnnnnnnnnnnnnnnnnnnnnnnnnnnnnnnnnnnnnnnnnnnnnnnnnnnnnnnnnnnnnnnnnnnnnnnnnnnnnnnnnnnnnnnnnnnnnnnnnnnnnnnnnnnnnnnnnnnnnnnnnnnnnnnnnnnnnnnnnnnnnnnnnnnnnnnnnnnnnnnnnnnnnnnnnnnnnnnnnnnnnnnnnnnnnnnnnnnnnnnnnnnnnnnnnnnnnnnnnnnnnnnnnnnnnnnnnnnnnnnnnnnnnnnnnnnnnnnnnnnnnnnnnnnnnnnnnnnnnnnnnnnnnnnnnnnnnnnnnnnnnnnnnnnnnnnnnnnnnnnnnnnnnnnnnnnnnnnnnnnnnnnnnnnnnnnnnnnnnnnnnnnnnnnnnnnnnnnnnnnnnnnnnnnnnnnnnnnnnnnnnnnnnnnnnnnnnnnnnnnnnnnnnnnnnnnnnnnnnnnnnnnnnnnnnnnnnnnnnnnnnnnnnnnnnnnnnnnnnnnnnnnnnnnnnnnnnnnnnnnnnnnnnnnnnnnnnnnnnnnnnnnnnnnnnnnnnnnnnnnnnnnnnnnnnnnnnnnnnnnnnnnnnnnnnnnnnnnnnnnnnnnnnnnnnnnnnnnnnnnnnnnnnnnnnnnnnnnnnnnnnnnnnnnnnnnnnnnnnnnnnnnnnnnnnnnnnnnnnnnnnnnnnnnnnnnnnnnnnnnnnnnnnnnnnnnnnnnnnnnnnnnnnnnnnnnnnnnnnnnnnnnnnnnnnnnnnnnnnnnnnnnnnnnnnnnnnnnnnnnnnnnnnnnnnnnnnnnnnnnnnnnnnnnnnnnnnnnnnnnnnnnnnnnnnnnnnnnnnnnnnnnnnnnnnnnnnnnnnnnnnnnnnnnnnnnnnnnnnnnnnnnnnnnnnnnnnnnnnnnnnnnnnnnnnnnnnnnnnnnnnnnnnnnnnnnnnnnnnnnnnnnnnnnnnnnnnnnnnnnnnnnnnnnnnnnnnnnnnnnnnnnnnnnnnnnnnnnnnnnnnnnnnnnnnnnnnnnnnnnnnnnnnnnnnnnnnnnnnnnnnnnnnnnnnnnnnnnnnnnnnnnnnnnnnnnnnnnnnnnnnnnnnnnnnnnnnnnnnnnnnnnnnnnnnnnnnnnnnnnnnnnnnnnnnnnnnnnnnnnnnnnnnnnnnnnnnnnnnnnnnnnnnnnnnnnnnnnnnnnnnnnnnnnnnnnnnnnnnnnnnnnnnnnnnnnnnnnnnnnnnnnnnnnnnnnnnnnnnnnnnnnnnnnnnnnnnnnnnnnnnnnnnnnnnnnnnnnnnnnnnnnnnnnnnnnnnnnnnnnnnnnnnnnnnnnnnnnnnnnnnnnnnnnnnnnnnnnnnnnnnnnnnnnnnnnnnnnnnnnnnnnnnnnnnnnnnnnnnnnnnnnnnnnnnnnnnnnnnnnnnnnnnnnnnnnnnnnnnnnnnnnnnnnnnnnnnnnnnnnnnnnnnnnnnnnnnnnnnnnnnnnnnnnnnnnnnnnnnnnnnnnnnnnnnnnnnnnnnnnnnnnnnnnnnnnnnnnnnnnnnnnnnnnnnnnnnnnnnnnnnnnnnnnnnnnnnnnnnnnnnnnnnnnnnnnnnnnnnnnnnnnnnnnnnnnnnnnnnnnnnnnnnnnnnnnnnnnnnnnnnnnnnnnnnnnnnnnnnnnnnnnnnnnnnnnnnnnnnnnnnnnnnnnnnnnnnnnnnnnnnnnnnnnnnnnnnnnnnnnnnnnnnnnnnnnnnnnnnnnnnnnnnnnnnnnnnnnnnnnnnnnnnnnnnnnnnnnnnnnnnnnnnnnnnnnnnnnnnnnnnnnnnnnnnnnnnnnnnnnnnnnnnnnnnnnnnnnnnnnnnnnnnnnnnnnnnnnnnnnnnnnnnnnnnnnnnnnnnnnnnnnnnnnnnnnnnnnnnnnnnnnnnnnnnnnnnnnnnnnnnnnnnnnnnnnnnnnnnnnnnnnnnnnnnnnnnnnnnnnnnnnnnnnnnnnnnnnnnnnnnnnnnnnnnnnnnnnnnnnnnnnnnnnnnnnnnnnnnnnnnnnnnnnnnnnnnnnnnnnnnnnnnnnnnnnnnnnnnnnnnnnnnnnnnnnnnnnnnnnnnnnnnnnnnnnnnnnnnnnnnnnnnnnnnnnnnnnnnnnnnnnnnnnnnnnnnnnnnnnnnnnnnnnnnnnnnnnnnnnnnnnnnnnnnnnnnnnnnnnnnnnnnnnnnnnnnnnnnnnnnnnnnnnnnnnnnnnnnnnnnnnnnnnnnnnnnnnnnnnnnnnnnnnnnnnnnnnnnnnnnnnnnnnnnnnnnnnnnnnnnnnnnnnnnnnnnnnnnnnnnnnnnnnnnnnnnnnnnnnnnnnnnnnnnnnnnnnnnnnnnnnnnnnnnnnnnnnnnnnnnnnnnnnnnnnnnnnnnnnnnnnnnnnnnnnnnnnnnnnnnnnnnnnnnnnnnnnnnnnnnnnnnnnnnnnnnnnnnnnnnnnnnnnnnnnnnnnnnnnnnnnnnnnnnnnnnnnnnnnnnnnnnnnnnnnnnnnnnnnnnnnnnnnnnnnnnnnnnnnnnnnnnnnnnnnnnnnnnnnnnnnnnnnnnnnnnnnnnnnnnnnnnnnnnnnnnnnnnnnnnnnnnnnnnnnnnnnnnnnnnnnnnnnnnnnnnnnnnnnnnnnnnnnnnnnnnnnnnnnnnnnnaggtggagcctacagaggcaggcaggcctccttgagctgtggtgggctccacccccagtcgagcttcccggctgctttgtttacctaagcaagcctgggcaatggcgggcgcccctcccccagcctcgttgccgccttgcagtttgatctcagactgctgtgctagcaatcagcgagattccgtgggcgtaggaccctccgagccaggtgtgggatatagtctcgtggtgcgccgtttcttaagccggtctgaaaagcgcaatattcgggtgggagtgacccgattttccaggtgcgaccgtcacccctttctttgactcggaaagggaactccctgaccccttgcgcttcccaggtgaggcaatgcctcgccctgcttcggctcgcgcacggtgcgcacacacactggcctgcgcccactgtctggcactccctagtgagatgaacccggtacctcagatggaaatgcagaaatcaccgtcttctgcgtcgctcacgctgggagctgtagaccggagctgttcctattcggccatcttggctcctctcttagggggttttaaaaacactgtcacagtgctgggtacataattgatgctcaatatatacataagcattcaagttgttaccttgttagtgacacataacattttatgatttatttatttctagtttagataacggaacaaatctgtttgagtatggtactatataccctgatagacagtacctctctcagggtagatacaaattgcaaattagagttgggaaaaagtggcccaagcaagtggcacaaaaagtcacttgcagataaaaagctttctgtgagtatgttacagtgaaactttcaatgaagatatgtccaaatgcagttaatcagaaaccagccaaactagcctaaacatttatggatattacaaacattcttccaaaaattttttttcttctgctcaattttgtgctgttttaaatgattatatgtaattaattttcaaggaacttagttgagccaaatgtgaatcttttgaggttttcctattgctagcaattgcttcattaagaatatgaaataggcacctggtttttttaatgctactgttgagaatacagtgaatgagtcctatttataactgaattaaaagcttaattaagtttatgagtgttttaaaactgtataaagttaatgctaatgtatttattaaaagtaaaaattattaatacatttttcttnnnnnnnnnnnnnnnnnnnnnnnnnnnnnnnnnnnnnnnnnnnnnnnnnnnnnnnnnnnnnnnnnnnnnnnnnnnnnnnnnnnnnnnnnnnnnnnnnnnnnnnnnnnnnnnnnnnnnnnnnnnnnnnnnnnnnnnnnnnnnnnnnnnnnnnnnnnnnnnnnnnnnnnnnnnnnnnnnnnnnnnnnnnnnnnnnnnnnnnnnnnnnnnnnnnnnnnnnnnnnnnnnnnnnnnnnnnnnnnnnnnnnnnnnnnnnnnnnnnnnnnnnnnnnnnnnnnnnnnnnnnnnnnnnnnnnnnnnnnnnnnnnnnnnnnnnnnnnnnnnnnnnnnnnnnnnnnnnnnnnnnnnnnnnnnnnnnnnnnnnnnnnnnnnnnnnnnnnnnnnnnnnnnnnnnnnnnnnnnnnnnnnnnnnnnnnnnnnnnnnnnnnnnnnnnnnnnnnnnnnnnnnnnnnnnnnnnnnnnnnnnnnnnnnnnnnnnnnnnnnnnnnnnnnnnnnnnnnnnnnnnnnnnnnnnnnnnnnnnnnnnnnnnnnnnnnnnnnnnnnnnnnnnnnnnnnnnnnnnnnnnnnnnnnnnnnnnnnnnnnnnnnnnnnnnnnnnnnnnnnnnnnnnnnnnnnnnnnnnnnnnnnnnnnnnnnnnnnnnnnnnnnnnnnnnnnnnnnnnnnnnnnnnnnnnnnnnnnnnnnnnnnnnnnnnnnnnnnnnnnnnnnnnnnnnnnnnnnnnnnnnnnnnnnnnnnnnnnnnnnnnnnnnnnnnnnnnnnnnnnnnnnnnnnnnnnnnnnntattctgcaaataagaatgcaactaattatatcatttgtagtacttgtgtaatagtgattaaaacatctgaacccttttaaaaagtggtattgtactgatagtaaaaataatgtgtagtaactctctgcattgagaactatgaataatatctcaaaattagaatatatgactcctggctagaggttgtacacttgctaaatcctaattaattccatttttttacaactttggaatggaatcatagtttaaggtgctcttttgttggaacaggcatttattgtttcagaagagagattccactgggagcggagtcatttccttagagtacattagcctaagtgtcactctttaacaaagctatgcaacagctggaccacaatagaaatttactatattttattgcaatgaatgtgaaatatcagtgttccttccaaacacaagtagccaacaacgtacacacaaatgggcagagctaaccattgctaattcatcttagatttccaagtcctttgattcaagtataaaagtgttttaaaatttcttcacattgcaatagctgtatccaaaataaataagactttcttctcactatcccacatgccttagccaggcaattatattaataaatgtcagtgtactatcttgcactttgcttcttcttcttaatgttttgactcaggcttcaccctagttaaagctccttctggcattttctccagttttatggctcccttttttttttccagttcagctggcctttgagctcctcttttgatgttcagtatgtttctctagacagtctggccccaactctttgtcactaatttattttcgtattgtgatccatgatatacccccacaggctttaaataatttcaagaatgctgtttatagttgagcaaattataacctgcataaaggtggaaaatgagggagtaatggagagggtgggggtggggggactgctgaaatccagcctggaggaaagggtgctttttctaattggtcaatggtagtgctttaaaaaaaaaaagttggggggcgatgacatgtaatttttaaactctccacctttgtagaggtcatatactttaattttaagggcgtgttacaaacctatcaaatttcttagcaaaggccagcattattcagttgttttttttttttatactttaagttttagggtacatgggcacaacgtgcaggttagttacatatgtatacatgtgccatgttggtgtgctgcacccatcaacttgtcatttaacattaggtatatctcctaatgctatccctcccagttttcttaacagaaggccnnnnnnnnnnnnnnnnnnnnnnnnnnnnnnnnnnnnnnnnnnnnnnnnnnnnnnnnnnnnnnnnnnnnnnattttaaagttttatttaaaacaagtctatgtattaaactattttccagttcagatctcttagacagaaatagtagcaatgcatggcgtttccttagtgtttatcatatatcaggcattaagcttcatgcacattcacataattctcctggtaaccctctggtaagctgctattactttccatattttataaatgatgaaaataaggtgaaagagtcaaaagagtcttaaatgataggtttggtgtttttttttttttgttgttgttgttgttttagacagggtcttgctcagtcacccaggctggagtatagtggcatgatcttggctcattgcaacctctgcctcccaggttcaaacgattcccatgcctcagcctcccaagtagctgggattacagtcatatccaaccatgcccggctaatttttgtatttttagtactcagggttttgccatgttggccaggctggtcttgaactcctggcctcaagtgatttgcccacattgcccccacaaagtgctgggattatataggcataagccactgcacacggccagatttggttttaaaagacaacctacattcttgacaattcctgtcatcctattcaaaagcattgatggtcatttactgatactcttgtcacagaaactctattttattgctttttatatacacatttttatatgctacagcttgtatgtgagaagaaaactcagaattatgaatggttattcatagtttctaacaatagaaacaattggccaggcggcggatgggctcatgcctgcaatcccagcactttgggaggccgaggcgggcggatcacgaggtcaggagatcgagaccatcttccctaacacggcgaaaccccatctctactaaaaatacaaaaacaaaattagccgggcgtggtgttgggcgcctgtagtcccagctattccgaaggctgaggcgggagaatggcgtgaacccaggaggcggagcttgcagtgagccgagatcgtgccactgcaccccagcctgggtgacagagtgagactctgtctcaaaaaaaaaaaaaaaaacaaacacaccagggcctgttgtggggtgggggnnnnnnnnnnnnnnnnnnnnnnnnnnnnnnnnnnnnnnnnnnnnnnnnnnnnnnnnnnnnnnnnnnnnnnnnnnnnnnnnnnnnnnnnnnnnnnnnnnnnnnnnnnnatgtatacatatgtaacaaacctgcacgttgtgcacatgtaccctgaaacttaaagtataatttaaaaaataataaaataaaacaaaacaaaacaaaaaccaaaccaatatctttcttccaacaatatgattcagtggtgagattacagtggataaaaggtaacttcagattttttctgtggaatgagatggggtaaagcatacaaataactaaggtggtattgttttctttttaaaatacaaaacaaatacctatatattaaagacaaattgcaaaagtttctgaaggacagagaagaaataattggcacctgatcttttttgtgaacctgttttttgaacagaacctgttttctaaaacttagttgaatccatacaatataaatactgatttctatcctacttttaaattatgccattattggtttttatattatgtagttttcatgatagcagtcacctggcatcttaccaagcagatttactatagtccacttaacagtcctctgtgttaggatattcaatagtttttcaccgtgggaaggcaccattataactaatgcagcaaggattacttttattttaagtgggggtattgttaaggagaaaataaataggcttatgatggagaatttggaaggaatatctttttccaagaaaaatgtatcactcctttatgccactaaggagtgatgagccacttaaataattatgcaagggaatcctttctgcaatgtagttgctaccctcctgctgcaatgcctccttcactaatctagttctctgtagactgaatcacatgctaatttttttttttttttttttttttttgagatggagttttgctcttgttgcccaggctggaatgcaatggcatgatctcagttcactgcaacctctacttcccaggttcaagcgattctcctgcctcagccttccgagtagctgggattacaggcgcccgccatcatgcccatctaatttttgtatttttagtagagacggggtttcaccatgttgacgaggctggtctggaactcctgacctcaggcaatccacccgcctcgcctcccaaagtgctgagattacaggcatgagccaccactcctggccatcacatgctaaatttttaactcttttcttgctgccactcttcaagaaacaaactttaccatgggatagatacaggcaagattatgaaccaaaattaatgttattaatattttgcttgtatttaaaatttaacaaaacatgcatgcttaaggccttggttcgtggtgggcattccaattagagtatggtaatatgacttggtcaaaaaaaaaagaaagaaaatataatcttcaggataacatatcaacagtatacaataaattcaaatgtatattagtgttatttaacatgtaagcatatattatgtatgagtgcctttattcatccgtttattttctttaatattcatttaattgacaatgtattaccaggcactgtgagagatcagtgaacaagatatatcaagtctctctttttgtcgggtttacctctagctcaagaggcagataaaaaaaatcagaatacctatgaaatttgaaataatttgaagagtgatatgaatgagaatatctgtaggcggcatattttggtacattaatgggcaaataatgatatcaggtagcaagggctatagagaaaaaaataaggaaataaagaatggttgggcagagtcagtagctattcagatatacatgaatacttgagtgtgttctgacagttgcacaaattaaattatccacatttagtattatttctaaggatatatcatttatttgaataccatctaaattaatgcatttgtggcaaataaattaaatatgctcatttgcttgagaatttctattgttgatctgggaacagacagtgagctctcacagttgcagctttaaccttgccaatcacagacttcctgtaagtgcactgcgttatctggaaccttttcggggttggcgctggcattcttttactagattacatttatgcattagtgccatctgtgcctgctgcaccttctgtgagttagccctggccaaatgactggcatttatactggaagttggagtgggggtggggtgtttggggagaaagagagagagagagagagagagagagagagagagaagaagcgaggaaatcctagaacattttactcactgttggcacaagtggaattaggaaagaagacannnnnnnnnnnnnnnnnnnncattggtaagcacaaaatatttgcagctggtgtccctgacttaaacccttataaagctaactctattcatttgctctctcttgaaaaataaaatataatacctatttatttttaggcaatgatatgcaaaagaagctaaaaccaaacatttaaataaggaagtacaacaaagcacatttgcaagattttcaagtttggcaaaattatgtacacaatttgaatatgtgtgcacttatatgacaaatatacataatgtgaggtttggtttagttgattagatttggtagaccactcgaattggactttgtattgataaatgggctgaaatgtagatttactaatattacaattctatttaggaaaattatggctatattcaacatataatcaggatactaaattattctgtagaatctttctgggattatattattttaaattgtattgcaaaatagatcaacaactctcatatctataatacactttagagctgtaagcggaaataaatagataaataattctccaatcagtaaaaatagatgttgaaaagtttcagctcgtttacactatatctatttttatcttatacctacttttagtatgcttgattatctggtttccatactgcttccaaattagaaacagtgaaatagaattggggcagaggggctgctaaagatgggtactacacgttagtgggaggtaatagttgcaaggaaaagaaggagagaatgagaggacagacacatgactcagacaagcactgcagtatggggccattcagtgcaagaagaaacagcttcttattccccagtatgccctgacagcactgatggaccacatcctgataatcaacgttcataattataaaactttatcttcagcatgaaagcatgtgcagacaacacattttaggaagatggaaatgtgaatatgttcttgaaaagaattccatccaaaatgaaaaatatatacttttagaacttaatgtagttaatccacagctttccttgagtactagcttgtgttgtactgtaggttttagggatcagagttcactttctacggtctaaaataggtaaggcctctcttatataagttctcctaatatatcttatattcatcttcataatacatttcagatttaaattgtaatgtatttaatttctgtaataaaggtaggcttttttctgttttcatttgataatattttattatctctaatatagttttaaaagaactatacaagtatccaagacatagaaattcattagtgctatagtgattatgattatgggtgttggaggttgattcttctgtgtgcaaatcttggtcctgccacttacttgctaggaagatttgagtaaatgacttgcccactctgagcatcagtttcctcatctataaattcagtataatagtacttgtcacaggaccgttgtaatgattaaatggttccagagcttataaagcatttagagaagcacttggggtataaaaagaactacattgtatgatggttagtcatttttattattgctcttgttgtcggaaaactattatatacatgtggaacttagaaggttatagttcaaattatactttaaaagatgtttgtaactggtttccctgctttactttttttttgtatatttgcatatatatcagtttggaaaggtcttcagaatcacaacagtattgttctgttagctgtaggggaaaagatgccataatgtaaaatgcctgggggcctatctcagctgagaatcttgtccttgcagcaacattaagaacagctagccacaactttattctttctcctctttcactgacaacactcagaatatttacttttgttgttgttgttgttgttgatactgagtctcgctctgttgcccagcctggagtgcagtggcgcaattttggctcactgcaacttccacctcccaggttcaagcaattctctgcctcagcctccagagtagctgggattacaggcatctgccaccacgcccggctaatttttatatttttagtagagatggggttttgccatcttggccaggctggtcttgaactcctgacctagtgattcacccgccttgtcctcccaaagtgctgggattacaggggtgagccactgcgcctgccctcccaacacgcctttttaaaatttatttttatttttttatattttatggccaagtctgtgagcccagtagtggtcatctatttccaccagaaattgtaggcaatagacagggagacccgtattatggccaacttaaacgactgagagaagagggctggtgagaaaacagcaattcttttgccccgcactctaaattattaggataattgtaccctgaaatacttcttctccaattattacatagagctaagattttgttggactctgttaaccattctcttgggattaggataatgatgtttctaaaatataattttgagttacacttgagttttgaaatgtcaggtattttcttggctttatgccttgcaaatatatgtatatataaagcactaatttctttgtacatgccctaattggttttgttagattaaaatgaattgaccacatgataattataataactatatttatagataaccatgcattagtaatttataaaaaagattgtcataacttttaaaagaatttagtaaatgtttttttattcaaacacaaatctttcatactattcttattactggcatatagattttttaaaatttgtatatatctggaatgtaccttattactccattttatgaattatgataatttttcagttgatttttaaaatgctataaataatgacaatatttttactatggtaaaacatgtataacataagacttacgatttgaataatttttaaatatacgattcagtagcattaaatatattcacattgctgtgcatctgtcaccactatccaactctctttttcattatcccagactgaaactccctacccattaaacaataattcccaattctgtccttcccctaattcccagtaaccactattttattctgtctctatgaatttgaatgttttaggcaacacatataagtgggatcatacaatatttgtccttttgtgtctggcttatttcacctgccatagtgccttatggttcattcatgttgtaacatgtatctaaatttcgtttctttttcagactgaataatacttcattgtatgtatatgacacattttatctattagtccatggagagacacttgaattgtttctactttttggcagttatgagtaatgcttctatgaatatgggtgtacaaatatctgtttgagtccctgctttcagctctttaggtgtatacacagaagtgggattactggatcatgtagtaattctatgtttaattttttgaggaactaccattctgtgttccacaatggctacaccattttacatttccaccagcaatgcatgaggatttcagtctttccacactcctgccaacacttgttattttctttatttttttcttgttcttttgaatagtagccatcctaataggtgcgaagtatgataatggcagttcttttcagcttctacttttttgtatctgtaaacaggtcatatgcatttttaaaattgtattttattgcatatatttaaggtatacaacataatgttttaatatacacatacagacagtccttcttatctgtgggttccacattctcagattcaatcaaccaaataatactataacgataaaaataatacaaatttctaaaatatagtataaagtatttgcatagcatttacattgtattagacactataagtgatctagagattatttaaagtatacaggaatatgtaggtaggttatatgcaaattttatatcagggacttgagcatctgcagattttgatatctgccaggtgggtcttggaaccaatcccttgtggatactggggaacaactgtacataatgaaatgattaatacagcaaaacagatcaacatatccatcaccttccatagttactgtgcacaggtgagtgcgtgtgtgtgtgtgtgtggtaagagctcctaaaatctactctctttgctaatttccaatatatgatacagtatttttgtaactcttttttgttgtttagattttgcatttaagtgaaataaatagtacagtactttttctatgtctgtttttgttcgcttgccacagtgtcctttagattcatctgttgtcgtaaatgccagtacctccttttttttaaggctgaataatattcatatatatatatatacacacacacacgcacatatatatacacacatatatacacatatgtatatatgcacacgtgtatatatacacatatatgcacacgtatatatatacacatacatgcacatgtgtatatatacacatatatgcacacatgtgtatatatacacatatatgcacacatgtgtatatacacacatatatgcacacatgtgtatatacacacatatatatacacacatatatatgccacaatttctttatccatttatctgctgatggatacttacattgtttccatatcttggctactgtgaataaggctgtaatcaacatgaaaatgcagatacctgtgcagttactatacattcccagctcaggcatttttgcttggcataggaatacaaagagaaaagacttagataataagttagagtaacttcacagcagatttcctatgtaagaaatgtagttggacttcttagtttatttaaaaatacctacagatgtgatatgttcaactgtttccatatttgatgaaatatgtatttttaataatcgttactttaatatgcaagtctttacaaatctttttacattttcatgtttctttctaagcttaaaatcagatttctttatttgctttgatatggcaatcatcttcctcctcatcccacccatgtaagctaacacaacctgctagatggaaactttgatctgtagtttgtgaaatggtaggattagagctagagccttctgacatcaacataggcacattcctatctcatcaataacatggtataacaaacttttttatagaaatggttgggattgctatgttttggtaaattgaatatcatggttaactaaattccttcagaaacatacataagaacatgtgaaccaaatatagggtgttaattcttaaagatattggatacatattcttatttaaaagtatttattgatttattgaacataaactaatcaattaattcagcagaaacttaattatctagaaagtttgccatagccattattttgaatatcaattttgatgtacaatcattccaaggtaaagcacatacaacattgaagtcattgtttaaggatacactcattgatggtagatattttctgagtccactttgttaggtatagttcgtctttttctcataaatgtgaaaagcaaccaaagaaaaatgctttaaaaattcttcatgtctgaagaacagctgaatgacattaatattttctttgtcagacttcagttgcttaaaacttaacttgttcatagacaccacctctgtgataatgcaattaagcagatagatgaacattgttacactgatagtactcagtggttactgctaattaatttattcactggctgatttgtaaaggtgttatttttaatgtcactcaataagatgtgaccctagtcatacaaagagaatgactctcttgatataatcttttaaaaactggaaataaattttgcagaacctgaacaatgtcaaatcaactgtggaaaatgtaggtcctgaaaattagtattattatagcaaagagattatgtttttgttaattttgagtctcaataaccttcccgattgaaggttactataaagtaatacatttacatggtgttagcattttaaccaatatttgtgcctggaattcaaatttgctttttcttatttccgtatgctctgttttaaacatatgttaaattggatatttaaaaatagaagtgcccaagaaacctgcataaattttttttattatctaaggctttaatgccatcatcattaaaaaaaaaaaaaaggaaagagtgactataatttaagtctgtaaaacgacttttaatagcaccaaatagaatgaacagctggcttgctttttgcaaggtgcattgatgttgtcagaagaaactaaataaaaatgctgatacagttgtccaggtttgggttttgccagcacaagaatattttattcattcagccttctctaagttcaaaagattggtgttgactttgatgaaaagatacaatgatacatatttagaatgaccgatctttcacatttaaatcttaaaaatgtgctgctgcagctggatttttctcagggatgccattcaaacaaaatgttacattgtcatctcatatagcttttctatctgtaatgataggatgttaggtgagagtatgacagttcagcacaatttttattatggcattgtactgatacatgaacactaggaccttttttgtttgtttcagtcaacaaagatgtattttcaagtgaaaatattttgaaatagaattttagttgtttcacttaaaaactatagcagagattaaatttaaaggaagtaagctttgtgaacactagattttttgtagttgcagttttctgtactttcatgttcctaatgctaaaaaatctctgtgttctagtcctgccatggagttactaatttttataataatctcttgccaaaagaagaacaactctgataatgcattagagattaagaactttttcattaactttaaaagtgctatagtaattgaaattggtttatccagttatgtttcatttctatttatttatttattttagacacagggttttgctctatcacccaggctgtagtgcagtggtgtgatcatagctcactgcagcctcaaacttctggtttcaagcagtcctcctgcctaggcctcccaaagttctggaattacaggcttgagtcactttgcacctggcctttttcgttattttaaagaatgtttttaaccttttaaaatttccaaatctttacttgttgatgaagtacccagtatttaaacctttacacttgtcagcaaatgctatcaattttgagagcattttaaaaatatgtatttgggcatggacataaagatagaaataatagacactgaggactccaaaagaagagagggagagaggagggaaaatgttggaaaaactacctgttggctactatgttcactatttggtgatgggttcactggaagcccaaaccccagcattatgcaatacacccatataacgaacctgcacatgtactccccaaatctacaattaaaacaatatatgtgtgtgtttttggaaatcttcatgaattgtgctttattttcttttccaaatttaataatgttaataattcataaatacagaaggattcctccctgatgcataacttggtgtctggagttgtatcaacacacatagagacagcgcatgtgctctgccacttgtgtgaagaaaaaccatgcttcttctacaaatatttatttatttgacagggaataacagaggcataaaggaaaataaatacctatgaagtcagttaactgtgcactgatttaaacactttcactacttcattatatgtgtacatgtgttaatgaccacttttgcttgtcaaattgtgtgttgtatttcgatctaaggctcacaatggccttagaatacatatttcatccccatcttttctgtctcttggtagcttcagcatgaagcagaccccacttcctaccatctgctttctccttggaactgacaccaaggtcagctcctctccgatgcctacttgtttcctggtttagaacacttgcatcctgtagttcagccacttccctattaattgatgggccacacatacaggaagcagaacatctaggcctacttgaatattcatgtgactaaataagccaggaagacttttgcctgtggaatgtttaccactattgtttccttacaagtcagttagcaaaaactgaaatatcattttatagttttgtgtttgtatttttagacaagtcgaccattgtattttgttttatggcttgctagtcattgtgttattgcactgaaactttcaatattcatacagatgcaatatcaattatatgctttagatagctattgactacctagatcaaatttaatatttcaagcccagtagtgatcattcattcagctaatatttttaagcactcatcctataggatgagcactgttttaagcacttgttaaatgatagtgaaaaagaaacatggagcttacagtctaggaaagaagatggatgttaaacaaattagatttgtttgctaaaaaatattagaagtgtaaacactgaatcaactttgctgttatccaaagtctaattatattatttgatttatctaagataatacattaattatattctttttgttttagaaagccattttggcttagaatataattttttgcagctaaccttgtatttgtatctctgtctctatatatctgtgttatctatgtatctacacgagctctggacccaaatatttgacttgtaggtagacctaaatttcagtttcatgttcttggatttatgttgagttattacatgtatgtcttcagcattctttagttctctggatcaagaagcaaactgttctttttacataaagctaacttaatacatattagtttttagtcaattagtattttgaaacactatcataattatgtctctacttatttgaatgtatctatatgcttgtatgtgttaaatgtttaacctttgaaaggttacatttttcattttagggattaattatatctctagagatggtttaatatttccataacttttttaaagacttactcatgttagttaacataagttgtttagactaggagtgcctgcattcattaaggacaaaattgatgtgtgtttagtttctttacaaactgtgagcaaggaatcaccattaaatgccattgtatattcatnnnnnnnnnnnnnnnnnnnnnnnnnnnnnnnnnnnnnnnnnnnnnnnnnnnnnnnnnnnnnnnnnnnnnnnnnnnnnnnnnnnnnnnnnnnnnnnnnnnnnnnnnnnnnnnnnnnnnnnnnnnnnnnnnnnnnnnnnnnnnnnnnnnnnnnnnnnnnnnnnnnnnnnnnnnnnnnnnnnnnnnnnnnnnnnnnnnnnnnnnnnnnnnnnnnnnnnnnnnnnnnnnnnnnnnaagtagggatttcatgctgttatcagcctaattttagcctatagaatttcaagtttgctagaggttttgctctccatggtataagtttagcaagaaaagtcatttgtctgctgctctagcagtttagaatgtggaagtatagtgtgcagagttttaatccgtatatgttattaaaacatatacatcattttatatcatacatctgtaataaatattcaaaattaaatagtgatttgggatttattacatcttattactagatgtaataaatgacctcagtgattgtttaaaattgtttttctcaaatataataaaaatacctaaggcataaatcgattgtccaaaaattgaatatatatacacacctcttccattagaactaaatatgtgcaatgtgttcactaaacacttgctgtggtgaaaaacaaaccaaccaaccaaccaacaaacaaacaaaaacacaacatcacagtaactaagtttccagttaaagatttaggcatatttttcataaaaaatttttatttgtaagctttcagaaagtaatccataattgcccttcaaaataaagcttcaaaaactatacatttctacaaagtcttatccataaaacatcaattcagaaacttaaagtgaagttttataatatttgtgctaaatcagttagtctcaaattgtataggaatttagctgtttggcaaaatgacccaaagagctatggacatttttaagtagagacagctaatgaaaatctatatgaatccagtggaggcttttagttattaattttttgactaggacagtatacattgctttagagtcctaaaagtgaggatttaattcttagaaacctaacttagctaggaataaatcaatgtatcactagagccatatacattaggaaaatctcaataaatgtttttcaatgttgatatataaacattcagaatttctctttaaatgtgccaaaagcaacttgataaggcaaatgaattttcttaatgcctaattttctaagaagaaatacatgaattgcatgtaaactttttgctatgtggtgttaacaagtgaggttaaaaaattttaagtctagaaatactgtagcaaaaaattactattttcatgctagcattcttccactctaagcaaactaatttatactgtttcccacctgatagtgatgtaatatgcctttcatttggatttttttctaaatgcatgattcaaatatagattttgtttgcaattagccattatttgacatgaagattgtagtttggattctttagtctgatattgtctgatgggtattttttgcttgttttgtgttgtacatgtgaatcttaagaatttgaaatataagtcacttatcttaactccatctgcagtaaaagagatgagaatggatccagatgttaattttgtataattagtaatgtgctttagaaaaagatttataggtgactgctaccaggctttgtatagtaagatctctgccttctgtttgaccacatcttctactttctgcattgctcactgtgttcctgccacattatctgtctgccttttccacagatatgacaaagatgttttccccacagcctttgcccttgctggtttctctactacctatatactttttataaaattgcaacttctccagcactcatccccaacacacgtatatactgatattctgtgccctcttactctgattcagatttgccttttaattttggcatagattattcataggtggtgctatgtactttacattgcatcacataagatgttacatgtttaatgataccaagattgatcagaggaggcaggtagtaaaagcctgatccatcatattgattgctgtatatttttgacaagaagccattagtctttgattaatttctttcattttggcataatatgtcccagacacatcgtttgcattttctgttccaaaactggaatcaatgattcaactctaaggagtcctagatttgtttttagtagataatggtatttagagaaaacattttgagtactaggggtgctaatttttactgtcattgcttttaggcctttccagcaggcagagctaggaaattcagtagttttgggaaaaaaatggtgagttaatagtatatttataattcccacttagcattaaaggattttactgaatatttttgaatttatatttacatctgttttctccaacatgaaaaatcttagtcttaacaatattaatgtaattacttgtctgccctatcattttttatatatatatatatatatatatatatatatatatatatatatataaaatatgtattaggattctctagagggacagaactaataggatagatgtatatataaaagggagtttattaaggagtattgactcacacgatcacaaggtgaggtcccacaataggccatctgcaaactgaggagcgaagaagccagcccaagtcccaaaacctcaaaagtggggaagctgacagtgcagccttagtctgtggtcaaaggtccaagagtccaaaagctgaagaactcagagtctgatgttcgagggcaggaagtatccagcatgggagaaagatataggccagaagactaagccagactagtctttccatgtccttctacctctgaccatgctggtagctgattagatggtgacaacccagattgagagtaggtctgtctttccaagtccactgactcaaatgttaatctcctttggcaacacctttgaagacacaccctggaacaatactttgcatccttcaatccaatcaagttgacattcagtattaaccatcacattatataactatgaattaataacaaatagtaaaattaagactggtgaattaagtgaaacatttctttgcttctccatttatccttcgttcatattctaatgttgctatacaggcaaaatactgcgttaagtcacttgaaatatttattttctgtatgtggtcttgtgtccagtttatttgttccagttcttaagtttactgtatttgatttctatttgccatatccattcttttttcttctgttcctttcttcctcttttagattaacaatttttttcttctatgttctatctcctctgttatctttttagccatttctctatcttgtttttcattgcttgctcaggaaataacaatatactttaactttcagtataacatcaaataatattaaagtagttcaagaacaatatgcgaacattgcagtggtataatttccatttttttctttctgttccttatgctcttgtcatgtattctactactacatatgttatgaattcaatatgttattatttattcctttaagtaatagtgtcataaaaatttattttctttatttatattacttgtgtatttagtcacatatttactattctgtttctctatttcttcctgcaaacctgagcttccatccccagtgtcttttttcttctgtctcaagaacttttcgcacttgttaaaagctattgtggataaatgatctcatattttgtttgtctgagaatgtctttagttttaaagggtattttctctgaatggagacatcttaattgatatttttccccatttactattttagagtgttccatagcctcgtgtccttcattgttttttaataaaaagtcaactgtcgtgcttatcaccattccctctttatatctcattgtggggcagggtaaggggaaagagttatgctttcatgacattcttggttttcagaagtttaactctatattccctgggtttctatgtatttatccttctcatggttaactgagtttctttgatctgtaagtttgtgtcttctatcaattctaggaagttctgagcatttatttttcaagtagttttttagccccattttttgtcctctccttatgggacacttattacttatatgacaaaccattggatattgtctcatagggctcagattctccttagttattttcttctttattttttaatttgaacaatatctattctcctaccttcaaattcagtgagtgtttcttctgctgtgtccgttctactttaacaccaatcaaatacattttttatttcggatattgtatattttctctttagttttggtatcctattattacagtttcttatttatagtttccatctcttctgatgttcccagtatctttatgcatgttacctgccttttttgccagatcttttattatttttatcatagctatttgaagtccatgtctattaactgcaacatctaaaccacctgtagatttgcctatattatctgtgttttcattgattatgagtcatacttttatgcttctttgtgtgtaccataatttgtaattttatactagatattgggaattaaaaaagagactcgtctggtaacgtttacccttagaaaagcacataccacttcctttgtcctgttgctaatctgtagttaagttttactcttacttatttttagttcactagtagctttcatgaatttgaggataggattaaggatttgccttcagtagagagttatctctatctctcttgctttttccattacagttcatcagcaagcttgtaaagttgcagcggaggtctcttttgtctctaactgccacagtccccttaactggccaaactttctgtaccttgggagacccactttcaaactgattttctgcctgcagacttggactggccaatgacttgcaatctgagagggccccatgagttttggtgggatacttctcagttctgcttccaggtttcagcaggctgccaccttgtggttggggaaggctctgggtccctcagggctatttttttttctttcctcttgccatgtcccaaaccttcagtgggctgcttctattccctttgagaaggctccatgtgcctttggaggaggaaatatttctctaccctcttgcctttctcccagccttcagttgactacttcttggctctcaaagaaagcctcagatactgtggtaggacctctccacaccagctttcctgccatgttctatgcttttggcaggcctccgccttgcacttagtgaagtttattttaatttgttgggatttctttttattgtgtaactgtttttcaaaagtcaaacatttacatgtttgtatttaatagcatataacaagatatattgaaatttatctcatttacattcttattcagtctactctgtacctctcacctgttgctaaccaattttattttcaaacgaattatttttttctttccctttaaaaattaagcatatgttaatgccagtgtatctttcttttttgtaatataaaagatgctatagtgtgtatactatatgctccttcattttaacccccttcataaatcctgttcatcactccacaatggtgtatagaaattttcctcattctttctaacagatgtatattatttatagcattccattttctatctgtatcttaatttattcgacttttctcttcctggtggacatttggatcattttcaatttcttgttaacaccagtaatgctacaatattcataaattgctttctgtttttttattgctttaaggtcatattatgagcaatttttttactattgatttaagatctatgaaatgatctgtattctaattgagattagaaagcagaaaacaatttctacattatctactatgtgcctcacaaaataaatgttaagcaactaaaaaggtatatagaattctgtcctgattatatctatatctatttattaatacctttggggcatctacctcccattttgacttattaggaagcacaaaagaaggtatttccaacaaagatttttatagatatctatatctacatctagatatgtatcttacttggaattaataatttagaagcatctatttcatcttatgaggtgtggtttaggtgtaccattaactgccaactgtatgcctgaatttcaacaaatatttaaaaatgggtatttgcaaaataaatattaaccatatgtatagagtcactgaaattttgcaggtgccatgacagattaaagatactgaacaaaaaacatttaaaggtaaatttttcagccaaactcagaacttctcttcatgacatctactgaatatccatatggtgcgtggtctctactgtaaaattggacatttataggttgagcttccattagaaaagagtatgtggaatttatatttcagctcaaaattttgcagttttatttagagcaaaagatagcacagattctttatgtatatatatatatatatatatagagagagagagagagagagggagagagagagagacagagacagagacagagagagaaagatgtgatactacatgccttttcttcagttctgtatctccatttgctacagaaaatctctactcaaaatggctattgtgttctcaagtctctccttatatcagtgatttcctggacctcttgatttgtctctgtgtctatgcgtgtggatgctttgtatacaattttaaatttgaaacactctttactgtcgtacacaacatgaaggtttagtaacctttttttagaagtgatttataaataaatcagctaactgtgtttgaaaagtctaaactaaagtgcagttgtttgcttcagcttgtcaatggatatttatgaggtgagcataatcactgtaacagttatagcagtgaaatacatacctgtgcagatagctagtaaaggagctcacaagcgttaatgccagtggaattttaatgctcaagagatgggagacatgacacttgctctggttaatgctgctattaccggccatggtgaaaatgagacagtgaagtcagttttaaatattgcagtggagttggggtctctatacctaggcaacagcaaatatgtcagttcctactgttgtcatattttcacctcttggtttatttaactgcagagtagtaatgtaatatcagacatttttcttcagggcatctccattcccttcttacttattatgaggctcatgagaaggttttgctagcaacaatttctgggaaaatgtcaataagcttcccactctaagatatactaatcattgcctgaaaattatttgagtgaagttaaagattccgattgtgagtttagcctttattatgaccagacttttgtttctgtcatatccttggtacattctgtatcttcttatacagaagaaaagtgtgtaatagaataaagtttccacacagagctgtgctctttgtgatgaattgaaactgttaatacattccaatttgtaaagaattatattgtgcttacttttgcctagcaggcaaagaaaatgaagttttcagtcttcagacagatttgttatcatagaagaactttgggattatgtgaagaatagtatggtttcaccatgcttgcatgtataaacttcaagttcatattaatttttcaacttagttcaggttaagttcaaattaatgataatttgacatcatgaggtatctacagagtacctcattaagccctaagagaataagaaaaagcaacacagaaagcatatggtctttttgcataaggtacaggtttaggcaattctttattggaggattgtagaggttaagaggggttcagatattctccgtgactgagaaagttaagaatcaagaaagaaacctttattagtttacatttgcttatacctagtctacttctaaagaagtattgagaaaaaaaatagtcaaacctcagaagaacaaaaattgggaaataataataagccgaagtcaagatatggttataacagaaaatgtacactgaggctagcaattgcttttaggacatcttataaatctgagcttcctaaaagccaagacataaagagaaagacgttaagttgtatagttgccattatataataaaagggaaacatgagcttaccagtattgacaaactttttcctagctctgaacaccaaggagaattggtcccttaatatcagtatccttaatagcaattttccaaaatgataattctcctcatatgaccaaaattcacagggctcttcatataaccaaaaaaaaagagagaatgctatattgtttatgtagatcgnnnnnnnnnnnnnnnnnnnnaatgctatattgtttatgtagatcgacgagaagatctaaagaaaagaaatcaagtctatatatacagatagtttactagtgatctgacttgacacaggcatgaaaatatctggactattagttatcaaactacatttttagcacagacaaaatcttatactgaattgcaattttaaaagatagataagagtggagcattaggtttgagaggcctgcagttgtgcctgcttgttcccttctcatgcactaccccagccacagtgacctctgagtcaccttgcagaaaagccacaggacttcgtggtttacactatgaaaaaaccattgacctagagaaataaatggctagcattccacttagagtcaactgggagtagttttgcaaactgatagggagagaaaggattctaacattattacaggtaaatacctgaggtataaatattctatattgttaattgcatagagaaattatatgccctagatattgggtatgtggttaaaagtttgatgtggtatgaaaattaaagagcctctcttatatttatttcaatgtaatgaactccagcatgcacaggacatgaggtaggttgtacatgtgtgctgacatgcacttatagacatacacacaaacacatttttaacaattagatagccagttgtgaccttgccaaatgctttaacaggcattttattgaaacttttataattttgtatgataagaagaaaatgctgatggtggattataaaatttattaataaattttctaccatataaatgtgctcttgagtcaaactgcattacagtgggtacaccaagatagtaattgtaaaatacagcccaaagatgagtaaaagagttaacttatgggcacattcagtgctgaaaagctttggcatagctggaagttggtggtgattccagaaagtgagtagttagtaagttcttgggctgacttttaaaaacataaatatagatgtttaaaaatgattgcatgtttgctgaatgaattcactctttgaaaactaatgttaccttttaagatagcaaatatttgaatatgcagaaaaggtaaaacatagaatgcgagaagtcatgtgctatcccattacctgcagcatgctggtatattgtctattaaagtctttgcataattacaatcatatcatatttttagttaccatttttttcatctttagaaagtttccttattttaatggctgtagaatagagtaaaatagatgaatctgaatttattcaactagtctctgattgttgcacagaaataaatacaaattgagtatatttttgactactataaaaatcctatagtaaatatttgaaatctcagtctagctattttattaggttagattcctaaagtgaaattactgagtcaaagaatgtaagtttttaaagaccattttttatatactttgcttaccatatagtttttgacaattttaacttccactagcaatgcacaagagttcttttcttgccacagaaattcactaactatgtaatgttttcaatataagtttgcataaaacagtattctttagaagggaggcagttttatttctttaaagtcataatttctattaggcaaataaaatgtttccataaaaagatcataatttaatgattgaattattaatatttacatgcacttcttatatgctatacaaattttaagttggtaaacatactcagagtaatcttatttagattaatttgcctaattctttaatatatggagaaaggtcagctacaacataactgatatctgaataattataatttctaaattaatgtactttaaatgtatttcgctatagcataaagtcagtgataaaattatctttattctgccgaaccttaatttttataaatatttaataaattctacttctaaatttttatgtcatgcaaaattaataaatttaacaatgattttattgaatccaaagagtattatattcccaaaccaaaataaggtaatatatttatagttcattttgaactaatgcagacactaatttaattcaattttatattaactaaatgttgttattgttaaagtttatgattcaatgatttataaggcatgatatcaaattcaagttggttgtattgattgcctaattgagtaagtagtgtgggtgctacctaaagcattacaacaacagtatatttagattttactcatgatttacatgcatgattagggcatgattttaaatcaaaaaagttatttagaaagaatatttaattaaattttcagaaaataaagaaaatattttcttcataataataacatatattacatgttatattattctctaaacacttatgccacctgagttccagtttatcgaattactttgtgaaatacaggcataatattatacattcattcattttaactcttgctcatggaaatcttatgttcctctattttggcatattaaaatgttagaatggtttattttagaagctatgtaatcctgtcacctgatactagtattagcctctatatagagaataaaatattaaaattataataaatataggtctatatgtattcttctatatatttagcttacatttaatagtttcttattaaaccatttagttaacttttgttatttttagcactcgtattatttgttataaaagtgaaatagtctcagaaaaagaaacattattaactaataatactttccattctgtacagttctttgatgagttgtatgttcaagctattttatattgctttgcttgctaccttgataacatacctttattgtgtaggcactataagcatgaggatatgacagacttgtaagccttgtcatattccatttcctgcaaataaaaattgctctgcagtgttctggcattgacttcttgctgtaatataaatggcagcccaaacatccatgaccttaaacataattagcgttatcactaatgtgtgttttgtaagctagtattaggtatagttgaaggacgatgctatctgatcatggtcacttacaaccgggatgcattgccttgtttttagaattttctggtaagcggatggcagcagccaatgtgaagtagttgcctggaagtaagactcctaatggaatactgaataaaatatttccctttagccaaaagtttccatttttcttgattcttctttcttaccttttcctcttttgtgctactctcatctattttctccgtattttcttctctcctttccactgtttttctccttggtaatcctctttctctccctcagattcatacttattctgtcttctcatttttgacatctggctccaccaccagtggaggtctgtgtgattgtgtactcattcattcttcatccatccattcacttgttcctaagtaagaaattattgagtctgctctatgttagacttatgcaatgacattatagagggaatatggataacaacaatatctgttttttttgtttttgttttcttttttttttcttttttttcttttttttttttttgagacggagtctcgctctgtcactaggctggagtgcagtggtgcgatcttggttcactgcaacctccgcctcccgggttcaagcgattctcctgcctcagcctctggagtagctgggactacaggcatgcgctaccacgcccagctaatttttatattttcagtagagatggagtttcaccatgttggccaggatggtcttgatctcttgacctcatgatctgcctgcctcagcctcccaaagtgctgggattacaggcgtgagccaccacacccggccaacaatatgtgtttttattgagagtttgctatatgtcaggcactattttcagtgctttatatatcttaacaaatttagtctttacaacagccttaagaataggcccattttttagtcttcattttactgataaaagaactgaggtacacagtagttaagtaagtcgcccatggtcacacagttaagaagtggcagaggctagaagacatactccatctttagagtgctcagatttaaccactgttatctttccttttagatatttgagcacgctattatggcacgatgtagtgtggctatagtggagatgcagtgggatctttgggagaaggagccccacaactgggaaaactgggaaatgcttaacagtgactcttgaacagatttcccgaagtcacctccttttaaatttttgaaaaataaaattacacccagacattatcagctgttgataaaagtaaaaagcactgagtccatgattagaaggggagaagagcatttgcttgtttttgttaacgggtgtgtgttaaaacatataggtgtatattgcatttaataggtttttctttatttttttttttttggtgcttatatctagagacatttggcagctgataattgatacttaataccaagctttggaagagttgtaataaggacctcagagtcaaaatcagcagagttttcttccttcaagtttccatatctttaattaaaccacatcaaatgaaataaataatttaggtctggaataatttaggtattgaagtgaatttgagaatttgagtagattgtgaatctcacttgttaaactatccagttgcttaaagttaacactctactaaccattactagtcatcacacactaaagttaatatggtatatagaacggaagtggtcacagaagaatcattatatctatatccatttaataagtgataaaacacaagtgaaaatagaggttcataattattttcaaacttgtacagaaaagagaaaactattactttttggtctacaaatacacaagaaaaagatgtcattaatttatatctttgctgtcataatatcattcctcatatatttgttcaattctggaaaattgccagaagataatattttaaatgttgatcactgttgaatttgcatagttcaaatctatttctcattgaatatatatactactgtgttttagaagcactactttttttgcctcaattatttatgtatgatgtcattttcctacctgtccctcttgaaaaagtatttctaaccatggaacataacgtgttgtgaaaaataacacttttattgttttattgtgttttggcaacacacatagctcccttagctaatctagagaagagcacctcttcacttaatatgcactctgaaaatcttgtttgaaagttctaggtaacacaaaaatacagtctggagtacatgacctatgacctgtatcagtaaggaattttgacctcattttaatctgatcttctatctgcttttttcctacttccttttgcactgatatgatttgtagacattaacacaaagtaagtaataaaaattggcaattgtagtaataatgttgcttccaaaagtatttaaaagacagataatttgatgaatgtttgccttttagcaaaaactaatggaaactcctagctctgttttgtttttatgcttttctgtttcttcactaatttctgaaattttcaaatttattgagcagtcatttttggaaaaaatggaaaaaaattctgcttttatattccaaccattcttcttcaacaatgttttgttgcttttgaattttatcatgctttggatattaaaaacaaacttacatttagagggaaataaagagacactctaaaatctaaaacactttgagagcagctattgtaagaaatacagaaatgtcaatagggtgataatcctgaccctaacttagaaagcactatgctagcttttggctggttgaggaatctgggaatgatttaggtggtacagtggatcagtagtatcataccaaagagagaaaaggaaagtatcttttatcactaattggaaactttgttttcaaatatttcttggattatttacaatacacatggaacagtgtgtccacacaaccttcacagaagtgttaagaaattagaatggcaaatcctccttagaaatgtgtaagtgcagatagtcaccatttgaaatgaacacatcatggtggtgtgcagtggtgagaaatggtcagtaacgatggacatgattttgcaaaaatccttcataaaagggaattacaaagagatgacaataccttttttgggattcctcatcctcagtctcttactgcttactaaatgtgatcctcatgtatgcattttaggagcatcagcttgcataagaaaatattttcattttaattcattacataaagaagtatattgggttgtggctttgatatttttatggccgtgatagtaatgctgtattttagataatagtaacattctatttccataattgtttttccatattaattataccataccatctcataggtgaacttactgtggaaaagatctgaatgaaccatcatgctttaacccaagaaaaaaaaattatgacttcatgtctcaagttaacatggtactttccttgggtaatcatttattatcatggtaggaaaactagatgttctcatgcttttttaaataatggcttcaatatttcaatatggatttatttctttcttcagggccggtgcataaacttctcccgagttccatctcagtaaaagggaagcaggaagaccaagaaggtacgaagatggcacattttcacatagctgattttcaaccaaatgaaaaaaatcaagtgcatttcagaagcttttggaagagcagcttaattcctctcagtcgggaaatgttttctctgccttctgctttgcttgcaccaaacatttctaaacacttgttctgccatctacatgggaggtgatgaaactcagtggtaactcatgatttatgacattgaaaataaagaggaacattgacctgcagactatggtttgtacaagaaagtttgtttgaatgtgtagaagaggaaaaagcaacaacagcaacaacacgaagatgataccaaaacaaggaccacaaaacaactagccatgatgggagacaggagttttttacatggaaacatggcacttgtgtttttatgtggcaagatctttatccataggcagagtatgaaatttcccaccaggctaagcaaataaagaagtccattgccttatagctatgtcagatcacagaatccttccaagtgctctatcacagtgtgccttatgggaagtttctgactggaaaatcttgtcattctaacactgaaaagtgcacacgcatgacaaaatgtagacaagatgcctcaaggtattggtagcaagcaagattttgccctttagttttcgaagacacctttctttcattatgcactcgggacaagaaaattaatagagcgttattccacagaaggcctctagccagagatcttgagtgtagtgcaagggactcatgctttgcgaacttgtccctgtgactagtagattcccccttttcctgtgtttaggatttagtagtgcataaagcattaatatccataaacatacctagaagtttgttttgcttttaatttaaaggaagcagtaaccacaaagcttccgctcagggttttttctttcttcaagtctccaagggctcttcagcgtcacaagccagcaactctctttgcattaaaatttcaaagtttaattaatataattaaaagcaacagcaagcagcagcctgtgaagattttgctcatcttttttatgccttttgacattgaatgacctattactgtatgcgcattacttggattttgaggggcactctaccttggttatgattcagtagaggaaaaagaccacctttcttcaatttacaaattaaatcttctggagggtcgctatcacaaaacattgacgatgtatgtattataattttttagaaaaaccaccatcgtgtcacgtcgacgatgccaaattatgttagcgtgagcagaaacaccgtgggggaggaaggcagcagctgaagaaaaaagctcaaatgatctagtcactttcgatactgtacttcagatgcgaaatggatattcgagtggaaacctgacaaagtgcgcctgctttgatgtgaactggtatagacaatgaccagtggctgggtcagtgggatgtctctctgtgagcacaaaggcttatcaaatgacactaaaaataagttcaacaaccatcacattggaagggagaaggcgaacatttcatgtttggcgggcatgtgagtgcacaagatggaaagagcgattggagcatcctggtataattacccccattgtgctcttaatggaaatttcaaaggacgggagtattctgttggttggtgtccaggtttgtggcactgttccaagaggccttacacacacacacaaatatataattttctatacatatatatcctctagcttgaaacttttgctcaagtttatttatgtcactggctggctggatccaaagtcatgtgtccacacattcataaataaaaattttacctatgcctgtgctaccatttctttaagcccacataaagctaatgccttcttgggttgaatatgcagttgttatgcttagtttcagggatggaattctattcagttccaaaatgtccctcatgttcacagatgatactattggcagtagctgcatatgcaagtgtaacttggaagcctgatatagtatacccaaccctttctgcaatgagttattgtatccctttgttctgcatttgcatctggaacaagacctaatgtggcttccttaaatgggcacttcatttctgatgagtgcacaccaattattgctattttaatatcattgagaatactacagaagctaaggctatgtttctttggtaactacttcaaatttctctagaattatgtagcatacttacattttgctgcatgaacaatgaaaattaacctctgcctttaaatggaaaaataactttctgtagattgttatacagctactatgaagagctcttaatgaagaggaagtggcagtggtctatatgtagactgaaaaaatatcattaataaagttcaaagactgatggaatttcattgcccttaaagatatgaaccagatctgttttatgcttttctccaattatactaactagcagttgaaaagaatttgttttgaagagtgttattttcttaccaaaagaccagatcaaaaatccctatacttttccaccaaaaaaagattaaaatgaagccatttctataaatttaatggcactttatattttatatagagaaatagcttctgtttgattttctggacaccatgtcagtcaagatctactttctgtgtaaaaatgaataagtcttgcacataatccattcgtgttgcataaggttgcaaaaacaattaagtgggaaatgactcctaacttatgtgtctactctgcctagaaagaaagttttgaaggcatctatatatatttcataacaatgtctgttctttatggatttgatccataaatatttatctatctgaaaactttgatacttggaatgttttccttagagcatttggtgctccaagaaaaaacatttggtgctaagagttgcagcactgatgcctttccctaagttaattctattttaaaaatttatatttccttcccaatgagatgcagagtaaaatttgagaccctccattgactagggagcagcatctgtcatctatggttaattactattttgacaaaaatatagaaggtttaaacccccatgtatttcagattgttagagaaagaagtagtttgcttatatttcccttgaactttattctaaccatttaaataataaattattcaatatttgttataataaatccttactagatacaagatttgggtgtttctgtgaagttaactttattatctaaatatcactaaccattgtttactgctcagaggcagatacatttgtttagtttaaagttgaaacaaattctatattgtggataattaggtgtttaaaacattttgatagaccagcttatatatgttatttttgaaatttaagaaggcagaatgtaattaggtcacatttacaagtagaaggaattataacttcctactccatgcatatattgtatattggttagcttttactagcattttctagcatcacattactttagaaagtttttgagagtttcattactactggaaaagtttggtgggtatatgtacacaggaaagaaatatatgcatcatttcaatatgaaaggaaatacataatctagaaacatagaataactcttggtacatctgttacatagttaaggaaagaaacaggcaggtgaggctggagaacgttgtctatttgtaggaaataaagtcagtgcagacgcatattctagtttagagttagattaatattgtgcttagtgaatttctatgacatatttctgagaacactttaatatatttccacacctactggaatctaattcagtcgatcggataaaagaaagacttttttgttgttgtttttgaaaatccataatgtagcaggttctgcgctggttttttaatgtattttatttttgtgctctcctgccaaaagaaaaggctgataagtaagtacacagtacaacatgtaaatttgtataaaaatatgcttgtttagattgctctacaataactatattaaggtaaattgtgtgtgtgtgtgtgagagagagagagagagagaaacagagggagaattgactcaatgtgttttctatgaagagtcttagcttaggaatcaggtaacagagaggtcctagaccatagacccagccatcaactagcttgctgatgttgaacagatcaactctcaaccatagactgaagatggaatgaagatatcaaaagttccttttagcactgactagattttttttcttttttttgaaacagagtctcactctgtcacccaggctggagttcaatggcatggtctgggctgactgtaacctcctcttcctgggttcaagtgattctcatccctcagcctcctgagtagctgggattacaggcacataacaccacacccagctaactcttgtatttttgtagaaatggggtttcgctatgttgctcagactggtctcaaacacctggcctcaagtgatcctcctgcctcagtctcccaaatgctgtgattacaggcacaagctactgcaccaggcctctgactacatttctattaatatggttaggttggaggttttagtatttttgtatctcatatttgtatcaatatgactggcttctttgtctgtagtgtgtggtaatattagttctgtaaactgtcagttgcaaaaaaaaaaaaataccttgaactatagtatatgttgataattagccataataatttcttagttaatttcttataattaaatttgtcaaagaggaaacttacagtttatatctgatgaaatctctaaaaagatgggtaaaacattgggaaatgtatgcatgtacttcactctggtttcatagggttagcaagtgtcttaaaaacatatataaagaagcacagagattgttaggagatatttatgctcccagttttaataattgggatactttgtataccacagaaagaaaaattactaaactcctctttttttagtcaaaattggaaaaaaagtcttaattgacagttactatgcctgtgctacccatagcaagtattcagtggaaaatactttactaagtaagtaatttgaacacagcttaaaatccatagtatgttacaattgctagcctttcacaaagtttgcattgtcttaatgtagaaggatactgtgatctaagaattcacaattttaaaaagtggaacctaaatagggtttcctaattgccatgaagttatttgtatcttagatgaattatatttacaacattgtaaatgtcagtgggtgatccaaaataaattgttaaagttattaaaatgtacatttaagtaggtttcagtttgactagaaataattggcaagaaggcaagaactagtcttctagagcagggatcccatcccccaggtcatggactggtactggtccatggcctgttagaaaccaggccacacagcaggagatgagtggaaagcaagtgaaacttcatgggtatttacagcaattccccgtcgctcgcattaccacctgagctgtgtctcctgtgagatcagcagcagcattagattctcaaggagcacaaacccttttggaagtgtgtgtgagggatctaagttgcgcatttcttatgagaatctaatacctgatgatctgttgttgtctcccaccacccccagatgggaccatctagttgcaggaaaacaagctcaggctcccactgattctacattatagtgagttgtgtaattatttcattatatataacaatgtaataataatagaaataaagtacataataaatgtaatccacttgaattatcctgaaaccatccccaccccccaccccccggtctgtggaaaaattggcttccacgaaactggtccgtggtgccaaaaatattgggtatggttgttctagggtgtagactatgaaaaagatatgcattgtctccatgaactaaaaggcaaggtgattttaaacaatttagatgccaaacaaagaaaccaaaagcttccaaagtaataaatgatagagaaaggaaattgttacatcatgtgccaaattagaagcaaatctaaacttcttatcatgtactccaccatctgatttgtataagtaattggggaaagaaaaactcacaatataaaacaagattgactagttctagcagatgacacctgtaaatagaatttttactagttgaaattctgatgtgaaatgaagccattattattatcacaataaagtgttctttttagttctttttttaatatcctctagttctgaaagtctctgttaattaaacagcaatgacagacctgcatcttctgtaaatactttgtttgtgtgaggctgtcacatggaaagaaagattatattttaaacaatatgttcaagtgtaaaaaatcttcaacaaattcttaatgttttacaaaatggggaaaaattttagtagttttaacatcttggaattcttcataataagctaggtgtctcagaaagcttgaaaggattttaaataattattttaaaggatatcaaagactaaattgtgacctggaatattcagtgtactttttctcatttttagaggtagtgatatgattacaataacacaatactaaaaaaagagaagaaattacaatgacattattggtagctcagcatctctgtattactgtcaacactcaaaaagctctgaggtggtgaatttatacagttaaatcaatgatttttaaaattctaactcaaaatgatagagaaaagccaatctataatttattttaaaactataacatttattgagctggcagagtaaaaatatcatactcctcaaattattcctttaaaatcattaataaaacagaaggtatcactttgccttaaaaatattttccttaatttcaaaaatcagtctgataaatctcaacccagggtcattactgcatatgtttatcatttctaacttttcaagaacactttgaacatcaattaactcgagaagagagggcttgtattagtttcctcttgctgctgtaacaaattaccacagttgcttaacacaacacaaatgtattctcttacagttctggagatcagaagtcccaaatctatttcaattaggtaaagttaaggtttcaagaggactagctctttctagaggctcagagagaagaacttatttctttgcctgaagtagcttctagcggctgccagtattccttagcctgtggccccttccttcatcctcaaagcctagcactccaagctctgcttcagtcattgcatcccctgttgtgactgctctgctgcctccctcttataaggaccactctgaccacattgaacccacttagattatcctagataatctttctgcgtcaaaacccttaacataatcatgcctgcggagtcctttttgccgtagaaggtaacaatcacaggttctggggattaggatgtggacatcttgagggtccattgttcagcccacaacaaagcttataatcattttcatttcattgaatatttgcttgtatctgacaccataagaagatatacaagatgaattctgctttctactttagaaccttacctgcccaaatttcttgttacactgtttttttgttttgttttgttttgtttttgtaactccatttgtcccctttctactgctttatattttacttgagatttttctcagaaaaggaaaaatgccagggaataaagttttttcgccagatgaaaaacttcgtccaaaactgagaaacacatgtcaggttattgttgcctctggagcatttacttggcctatctgcacatgcccggaagttaaacctagagtcagtgcctataatattttcttctgtcatactgaaaatccacttagaaggtattgaaacatcaccagcgacaaagaacaaaaataagttgacattctaatgttaacatcagtaatagacatatgaatcttagaaagctttccccacctgctaattgttttttctagaataaaaaaaaaaaaaaggagagtgattttaaagtcgataaaactaggccgagtgtggtgcctcatgcctgtaatcccagcactttgggatgctaaagctggtggattgcctgaggtcaggagttcgagaccagcctgcccaacatggtgaaaccccatctctactaaaaatacaaaaattacccaggcgtggtggtgggcacctgtaattccagctattcgggagactgaggcaggagaattgcttgaacccaggaggtggaggttgcagtgagccgagatagtgccactgcactccagcctgggtgagagagcgagaccctgtttcacaaaacaaaaataaaaataaataaatgcaatagaactaacacccattttaaatatttttcaagtagtaatctcaaagaagacatcaataaaattgagaaactttaaaatgaaagaagtaaaagggatcagattctcccggtagattttccctaaaacataacattatgtgccatgcaccttgagttctcagaaagaaattattgtatacacgcaataggaatagtttccacatctctcatatttttgtactttatatagctacacatgcacacacagacactcctttctaagtactgttacatttgaaaatgctatgaatgacctacaatatgaactttcatgcactttgtgatcctaagcctatccctgattattcatgtgaagtaatttgacatctctaaatagtgagttcctaacatgtttagaggaaatcaggcaaatcacttgataacattaataacatattattttacaattttccaaagtatttttatatattttttgttgtttttatttaataaatatataccagatgcacatgacatatacagtgctaatttgggcaaaatctaggcaaattttatgataaattgcattataagggtatgggtgaagggtggaaggaccttctcttgaaactcagtaaaaaagtcttatagcatgaatcctgagtggcccatttaaagataaaccctgatcacataaaatgagatttaatgctaaatgaggcctgttttatacaggtgcccctagataaactgtgcggctgagagtatctcattttgctgccacacaattttcagtgtacattaacagccttcccgtgaaatcaaaatgcttttaaatcattctatttgttgcaaaacattactttggcctatgtacagagaagtttagccacataaaaatttaatatcccctaagggtaaacaaaacaaaacaaaataccataaaaatgatgaggttaagaaggtttacatgattcctagcaaaaagcaggggttcctaggaaattattttcagggctagctgaaggaccttttgatagcgatcattgctttatcacaattgcagaagcagttaatgttggacaagaaaggaaagaaaacccaagacagtgaaaggataattaagagtcttagttttaatttccaaggattatatggtgacgtgattatttcacaatggaaaactgaacagatagatttatattttgctgttttaccttgtgataataagctatcccaggtatttattctattttaacagcaacatgtgctcctcattttaccaactgatccacacaaagcaggtaaagaaaaatgttgctttggatgaaaccaggcacttcaactttacagccctccacagctctctacttttctgatagcccctggagaatggcatgaatgacgtctctggggtggagtcctggatgttagctgtgcttaatagccagaagtgaaaaacccttccaattaagcaaaagatgataggtcagggagtctggttttattggcgatagaaaggagccaaaaactgaccaagaaggtcagccatcatgcagcaattataccagggatgaagaccaacagtaagaacaaagcagagagaaaggaaactgccttgaatttgagcatttatcagcttaattaatgaatattggcagatgcctgtcttgtgcccgtctctgcagtagacaatgggatactgcagcaagaaagataactattctcagcaatcttgtctgcaagtgaagacagacactgataagatgcaagtgtcatgagatctgtaaaggggaaatttagaagtgcggtgagaacatgtaatgggaaggggctagcctagctggagtcattagagaaggcagtgaaatgtttgctgaaactgggaaaatgagtacatgtttcnnnnnnnnnnnnnnnnnnnncttccttccttccttccttccttccttccttccttccttccttccttccttccttccttttccttcctttcctacttacttagcaacacacctggcaaaatgtctggcaaataataggctcttaataaatgtattgatgagctggaaaattattattcagacttctagtttctgcaagagaaagaagtcccattcttactaggtcctgcctcttacaatgaaaaaaccctggacaacaacaaaaaaagagtcccaacaacaacaacaacaaaaaagagtcccaacaacaacaaaaaaagagtctctgaaatgtgtcaagactgcttaaggtcctcagacttgaggaacaatacgaaggcgaatcctgggtttctttattgttccacatatttcagacaggatactgcagagacctccaacaaggaatgtcagcaggcacagacactagtacctcccttgagacagaacctatattgatgggtacagagcacaagtaggcgtatcttgtcacctagcgtacaccttgaaacatgaattaaacaacagagattggcagagtggattaaaaaaagattccctaacaatatgctatccacaagaaactcactacaaatataataacatagatttcaaataaaagatgaaaaaagatatactatgcgcatataaatttttaaaaaagcaagagtgactatactaataatcagataaagtcatcttcaggacaaagaatattactagagacaaaaagagatattatataatgataaaagagtcagtcttccaaaaagacataatatccttaacatacacatgccaaaaacaaaaaaaaagaggagagcctcaaaatacatgaagcaaaaattgacagagctgatagaggagaaataaataaatcaacagttatagctaaacactcaaatacacaaatcccaccaattgatagaactactagatagaaaagtcataagaatatagaattgaacaacgtaaccaatcaacagtatttaattgacatatatatatagcaccaactaccaaatagcaacagaatatacatttttttcacatgcccatggaacattcattgaaacagatcattttctaagaggctgcattatcccacatattttgatatgcagggagggaaatatgtagcactaaatgcttacattagataaaaggaatagtctcaagtcaataaattcttgcctctggaaactcggagaaaaagggtaaaataaactaaaaacaagtagaagagagaaaacagtaaaaataataacagaaatcaatggaattgaaaacagaaacacaatagacaaaaatcaatgaagcaaagagctggttcttcaaaagaatcaacaaaattgataaacctctggcaagactgacaaagattttttaaaaagacaataatcatcaatgttggaaacaagatagataatgtcactggagattcttcagccgttgaaaggataatcagagaacataatgaacggctttccttagaaatttcttaatgacaagcaatggaccaattcttcaaaaaccagaaactaacaaaactcaactaagatgaaacaatctggataatcaataaccattaaagaaattgaattttaattaccccaagccccaaaatccagttctacaccatttcactggtgaattctctcaaacatttaataaggaattaacaccaattttcacaatctattccttggaaaaataaaggaagtactttccaactcattttatgaggctacagaaccagaccaaaaatgtatttaaaaaaacacacaaaagtaaactataccattatctctcataaacttaggtaataaattgtcaacaaaataatacatgttgaacccagcaatgtataaaaataactgtataccatacaaagtagtagtagtttcagatgtgcaagggctgatcaactttaaaaaatctatgtaatctatgatatcaacggactaaagaagaaaaactatatgctcatgtcagttgatgcaaataaagcatttagccaaatc

SEQ ID NO: 273 - DNA, 1892 bp, Homo sapiens
gcccagacccggcccgagcgggctcctgccctcggcgtggcttctctccagccgggagtcccagggccagctagcctcctcccctaaaggggacggcctgtcagcgcagtgccagagtccagcaccgggaggaaagtttcggagtgcggagggagttggggccgccggaggagaagagtctccactcctagtttgttctgccgtcgccgcgtcccagggaccccttgtcccgaagcgcacggcagcgggggggacttcagccctccaggcggggtgggttccaggtccgggtccgaggcgggcgctggaggctcggccccaggccggagaggaactcctttcgcgagctgtcgccgtgggcccgcattgtctgcaggaactctccggaatcgggagggggaggactggatcgcgcttccactgggattcgtcaagagttccggcggcagctgcggcggtggcggagactccctttgtcctctcaggacctccctctctccctccctgtcagctggtgggtcccgctgccgcaggcgccggcgtctcagctgctcgccgccccccaccccagagtgcgtgccgggtgactcccgccacctttgcgaccctcctgagcttaggggactgcgagcgggagggagtctcaggcccccggccgcaggatggtggcggagcggtccccggcccgcagccccgggagctggctgttccccgggctgtggctgttggtgctcagcggtcccggggggctgctgcgcgcccaggagcagccctcctgcagaagagcctttgatctctacttcgtcctggacaagtctgggagtgtggcaaataactggattgaaatttataatttcgtacagcaacttgcggagagatttgtgagccctgaaatgagattatctttcattgtgttttcttctcaagcaactattattttgccattaactggagacagaggcaaaatcagtaaaggcttggaggatttaaaacgtgttagtccagtaggagagacatatatccatgaaggactaaagctagcgaatgaacaaattcagaaagcaggaggcttgaaaacctccagtatcataattgctctgacagatggcaagttggacggtctggtgccatcatatgcagagaaagaggcaaagatatccaggtcacttggggctagtgtttattgtgttggtgtccttgattttgaacaagcacagcttgaaagaattgctgattccaaggagcaagttttccctgtcaaaggtggatttcaggctcttaaaggaataattaattcttctaacgggatcgcagccatcattgttattttggtgttactgctactcctggggatcggtttgatgtggtggttttggcccctttgctgcaaagtggttattaaggatcctccaccaccacccccccctgcaccaaaagaggaggaagaagaacctttgcctactaaaaagtggccaactgtggatgcttcctattatggtggtcgaggggttggaggaattaaaagaatggaggttcgttggggtgataaaggatctactgaggaaggtgcaaggctagagaaagccaaaaatgctgtggtgaagattcctgaagaaacagaggaacccatcaggcctagaccacctcgacccaaacccacacaccagcctcctcagacaaaatggtacaccccaattaagggtcgtcttgatgctctctgggctttgttgaggcggcagtatgaccgggtttctttgatgcgacctcaggaaggagatgaggtttgtatatgggaatgtattgagaaagagctaactgcttgagtcagtataatggaggcagggaaatagtaataaaaaatgattttaaagccctattgcacttgaggaagg

SEQ ID NO: 274 - protein, 386 aa, Homo sapiens [sequence omitted]

SEQ ID NO: 275 - DNA, 3341 bp, Homo sapiens
gcccagacccggcccgagcgggctcctgccctcggcgtggcttctctccagccgggagtcccagggccagctagcctcctcccctaaaggggacggcctgtcagcgcagtgccagagtccagcaccgggaggaaagtttcggagtgcggagggagttggggccgccggaggagaagagtctccactcctagtttgttctgccgtcgccgcgtcccagggaccccttgtcccgaagcgcacggcagcgggggggacttcagccctccaggcggggtgggttccaggtccgggtccgaggcgggcgctggaggctcggccccaggccggagaggaactcctttcgcgagctgtcgccgtgggcccgcattgtctgcaggaactctccggaatcgggagggggaggactggatcgcgcttccactgggattcgtcaagagttccggcggcagctgcggcggtggcggagactccctttgtcctctcaggacctccctctctccctccctgtcagctggtgggtcccgctgccgcaggcgccggcgtctcagctgctcgccgccccccaccccagagtgcgtgccgggtgactcccgccacctttgcgaccctcctgagcttaggggactgcgagcgggagggagtctcaggcccccggccgcaggatggtggcggagcggtccccggcccgcagccccgggagctggctgttccccgggctgtggctgttggtgctcagcggtcccggggggctgctgcgcgcccaggagcagccctcctgcagaagagcctttgatctctacttcgtcctggacaagtctgggagtgtggcaaataactggattgaaatttataatttcgtacagcaacttgcggagagatttgtgagccctgaaatgagattatctttcattgtgttttcttctcaagcaactattattttgccattaactggagacagaggcaaaatcagtaaaggcttggaggatttaaaacgtgttagtccagtaggagagacatatatccatgaaggactaaagctagcgaatgaacaaattcagaaagcaggaggcttgaaaacctccagtatcataattgctctgacagatggcaagttggacggtctggtgccatcatatgcagagaaagaggcaaagatatccaggtcacttggggctagtgtttattgtgttggtgtccttgattttgaacaagcacagcttgaaagaattgctgattccaaggagcaagttttccctgtcaaaggtggatttcaggctcttaaaggaataattaattctatactagctcagtcatgtactgaaatcctagaattgcagccctcaagtgtctgtgtgggggaggaatttcagattgtcttaagtggaagaggattcatgctgggcagtcggaatggcagtgttctctgcacttacactgtaaatgaaacatatacaacgagtgtaaaaccagtaagtgtacagcttaattctatgctttgtcctgcacctatcctgaataaagctggagagtggggtctcactgtcacccaggctggagtgaagtggcatgatctgactcactgtacttttggcctttctggctcaggtgatcctcctacttcagcctcctgagtagctggggctacaggcataactcttgatgtttcagtgagctttaatggaggaaaatctgtcatttcaggatcattaattgtcacagccacagaatgttctaacgggatcgcagccatcattgttattttggtgttactgctactcctggggatcggtttgatgtggtggttttggcccctttgctgcaaagtggttattaaggatcctccaccaccacccccccctgcaccaaaagaggaggaagaagaacctttgcctactaaaaagtggccaactgtggatgcttcctattatggtggtcgaggggttggaggaattaaaagaatggaggttcgttggggtgataaaggatctactgaggaaggtgcaaggctagagaaagccaaaaatgctgtggtgaagattcctgaagaaacagaggaacccatcaggcctagaccacctcgacccaaacccacacaccagcctcctcagacaaaatggtacaccccaattaagggtcgtcttgatgctctctgggctttgttgaggcggcagtatgaccgggtttctttgatgcgacctcaggaaggagatgagggccggtgcataaacttctcccgagttccatctcagtaaaagggaagcaggaagaccaagaagaaaaaccaccatcgtgtcacgtcgacgatgccaaattatgttagcgtgagcagaaacaccgtgggggaggaaggcagcagctgaagaaaaaagctcaaatgatctagtcactttcgatactgtacttcagatgcgaaatggatattcgagtggaaacctgacaaagtgcgcctgctttgatgtgaactggtatagacaatgaccagtggctgggtcagtgggatgtctctctgtgagcacaaaggcttatcaaatgacactaaaaataagttcaacaaccatcacattggaagggagaaggcgaacatttcatgtttggcgggcatgtgagtgcacaagatggaaagagcgattggagcatcctggtataattacccccattgtgctcttaatggaaatttcaaaggacgggagtattctgttggttggtgtccaggtttgtggcactgttccaagaggccttacacacacacacaaatatataattttctatacatatatatcctctagcttgaaacttttgctcaagtttatttatgtcactggctggctggatccaaagtcatgtgtccacacattcataaataaaaattttacctatgcctgtgctaccatttctttaagcccacataaagctaatgccttcttgggttgaatatgcagttgttatgcttagtttcagggatggaattctattcagttccaaaatgtccctcatgttcacagatgatactattggcagtagctgcatatgcaagtgtaacttggaagcctgatatagtatacccaaccctttctgcaatgagttattgtatccctttgttctgcatttgcatctggaacaagacctaatgtggcttccttaaatgggcacttcatttctgatgagtgcacaccaattattgctattttaatatcattgagaatactacagaagctaaggctatgtttctttggtaactacttcaaatttctctagaattatgtagcatacttacattttgctgcatgaacaatgaaaattaacctctgcctttaaatggaaaaataactttctgtagattg

SEQ ID NO: 276 - protein, 320 aa, Homo sapiens
MVAERSPARSPGSWLFPGLWLLVLSGPGGLLRAQEQPSCRRAFDLYFVLDKSGSVANNWIEIYNFVQQLAERFVSPEMRLSFIVFSSQATIILPLTGDRGKISKGLEDLKRVSPVGETYIHEGLKLANEQIQKAGGLKTSSIIIALTDGKLDGLVPSYAEKEAKISRSLGASVYCVGVLDFEQAQLERIADSKEQVFPVKGGFQALKGIINSILAQSCTEILQPSSVCVGEEFQIVLSGRGFMLGSRNGSVLCTYTVNETYTTSVKPVSVQLNSMLCPAPILNKAGEWGLTVTQAGVKWHDLTHCTFGLSGSGDPPTSAS

SEQ ID NO: 277 - DNA, 3337 bp, Homo sapiens
gcccagacccggcccgagcgggctcctgccctcggcgtggcttctctccagccgggagtcccagggccagctagcctcctcccctaaaggggacggcctgtcagcgcagtgccagagtccagcaccgggaggaaagtttcggagtgcggagggagttggggccgccggaggagaagagtctccactcctagtttgttctgccgtcgccgcgtcccagggaccccttgtcccgaagcgcacggcagcgggggggacttcagccctccaggcggggtgggttccaggtccgggtccgaggcgggcgctggaggctcggccccaggccggagaggaactcctttcgcgagctgtcgccgtgggcccgcattgtctgcaggaactctccggaatcgggagggggaggactggatcgcgcttccactgggattcgtcaagagttccggcggcagctgcggcggtggcggagactccctttgtcctctcaggacctccctctctccctccctgtcagctggtgggtcccgctgccgcaggcgccggcgtctcagctgctcgccgccccccaccccagagtgcgtgccgggtgactcccgccacctttgcgaccctcctgagcttaggggactgcgagcgggagggagtctcaggcccccggccgcaggatggtggcggagcggtccccggcccgcagccccgggagctggctgttccccgggctgtggctgttggtgctcagcggtcccggggggctgctgcgcgcccaggagcagccctcctgcagaagagcctttgatctctacttcgtcctggacaagtctgggagtgtggcaaataactggattgaaatttataatttcgtacagcaacttgcggagagatttgtgagccctgaaatgagattatctttcattgtgttttcttctcaagcaactattattttgccattaactggagacagaggcaaaatcagtaaaggcttggaggatttaaaacgtgttagtccagtaggagagacatatatccatgaaggactaaagctagcgaatgaacaaattcagaaagcaggaggcttgaaaacctccagtatcataattgctctgacagatggcaagttggacggtctggtgccatcatatgcagagaaagaggcaaagatatccaggtcacttggggctagtgtttattgtgttggtgtccttgattttgaacaagcacagcttgaaagaattgctgattccaaggagcaagttttccctgtcaaaggtggatttcaggctcttaaaggaataattaattctatactagctcagtcatgtactgaaatcctagaattgcagccctcaagtgtctgtgtgggggaggaatttcagattgtcttaagtggaagaggattcatgctgggcagtcggaatggcagtgttctctgcacttacactgtaaatgaaacatatacaacgagtgtaaaaccagtaagtgtacagcttaattctatgctttgtcctgcacctatcctgaataaagctggagagtggggtctcactgtcacccaggctggagtgaagtggcatgatctgactcactgtacttttggcctttctggctcaggtgatcctcctacttcagcctcctgagtagctggggctacagaactcttgatgtttcagtgagctttaatggaggaaaatctgtcatttcaggatcattaattgtcacagccacagaatgttctaacgggatcgcagccatcattgttattttggtgttactgctactcctggggatcggtttgatgtggtggttttggcccctttgctgcaaagtggttattaaggatcctccaccaccacccccccctgcaccaaaagaggaggaagaagaacctttgcctactaaaaagtggccaactgtggatgcttcctattatggtggtcgaggggttggaggaattaaaagaatggaggttcgttggggtgataaaggatctactgaggaaggtgcaaggctagagaaagccaaaaatgctgtggtgaagattcctgaagaaacagaggaacccatcaggcctagaccacctcgacccaaacccacacaccagcctcctcagacaaaatggtacaccccaattaagggtcgtcttgatgctctctgggctttgttgaggcggcagtatgaccgggtttctttgatgcgacctcaggaaggagatgagggccggtgcataaacttctcccgagttccatctcagtaaaagggaagcaggaagaccaagaagaaaaaccaccatcgtgtcacgtcgacgatgccaaattatgttagcgtgagcagaaacaccgtgggggaggaaggcagcagctgaagaaaaaagctcaaatgatctagtcactttcgatactgtacttcagatgcgaaatggatattcgagtggaaacctgacaaagtgcgcctgctttgatgtgaactggtatagacaatgaccagtggctgggtcagtgggatgtctctctgtgagcacaaaggcttatcaaatgacactaaaaataagttcaacaaccatcacattggaagggagaaggcgaacatttcatgtttggcgggcatgtgagtgcacaagatggaaagagcgattggagcatcctggtataattacccccattgtgctcttaatggaaatttcaaaggacgggagtattctgttggttggtgtccaggtttgtggcactgttccaagaggccttacacacacacacaaatatataattttctatacatatatatcctctagcttgaaacttttgctcaagtttatttatgtcactggctggctggatccaaagtcatgtgtccacacattcataaataaaaattttacctatgcctgtgctaccatttctttaagcccacataaagctaatgccttcttgggttgaatatgcagttgttatgcttagtttcagggatggaattctattcagttccaaaatgtccctcatgttcacagatgatactattggcagtagctgcatatgcaagtgtaacttggaagcctgatatagtatacccaaccctttctgcaatgagttattgtatccctttgttctgcatttgcatctggaacaagacctaatgtggcttccttaaatgggcacttcatttctgatgagtgcacaccaattattgctattttaatatcattgagaatactacagaagctaaggctatgtttctttggtaactacttcaaatttctctagaattatgtagcatacttacattttgctgcatgaacaatgaaaattaacctctgcctttaaatggaaaaataactttctgtagattg

SEQ ID NO: 278 - protein, 320 aa, Homo sapiens; identical to SEQ ID NO: 276

SEQ ID NO: 279 - DNA, 2523 bp, Homo sapiens
gtctgggagtgtggcaaataactggattgaaatttataatttcgtacagcaacttgcggagagatttgtgagccctgaaatgagattatctttcattgtgttttcttctcaagcaactattattttgccattaactggagacagaggcaaaatcagtaaaggcttggaggatttaaaacgtgttagtccagtaggagagacatatatccatgaaggactaaagctagcgaatgaacaaattcagaaagcaggaggcttgaaaacctccagtatcataattgctctgacagatggcaagttggacggtctggtgccatcatatgcagagaaagaggcaaagatatccaggtcacttggggctagtgtttattgtgttggtgtccttgattttgaacaagcacagcttgaaagaattgctgattccaaggagcaagttttccctgtcaaaggtggatttcaggctcttaaaggaataattaattctatactagctcagtcatgtactgaaatcctagaattgcagccctcaagtgtctgtgtgggggaggaatttcagattgtcttaagtggaagaggattcatgctgggcagtcggaatggcagtgttctctgcacttacactgtaaatgaaacatatacaacgagtgtaaaaccagtaagtgtacagcttaattctatgctttgtcctgcacctatcctgaataaagctggagagtggggtctcactgtcacccaggctggagtgaagtggcatgatctgactcactgtacttttggcctttctggctcaggtgatcctcctacttcagcctcctgagtagctggggctacagaactcttgatgtttcagtgagctttaatggaggaaaatctgtcatttcaggatcattaattgtcacagccacagaatgttctaacgggatcgcagccatcattgttattttggtgttactgctactcctggggatcggtttgatgtggtggttttggcccctttgctgcaaagtggttattaaggatcctccaccaccacccccccctgcaccaaaagaggaggaagaagaacctttgcctactaaaaagtggccaactgtggatgcttcctattatggtggtcgaggggttggaggaattaaaagaatggaggttcgttggggtgataaaggatctactgaggaaggtgcaaggctagagaaagccaaaaatgctgtggtgaagattcctgaagaaacagaggaacccatcaggcctagaccacctcgacccaaacccacacaccagcctcctcagacaaaatggtacaccccaattaagggtcgtcttgatgctctctgggctttgttgaggcggcagtatgaccgggtttctttgatgcgacctcaggaaggagatgagggccggtgcataaacttctcccgagttccatctcagtaaaagggaagcaggaagaccaagaagaaaaaccaccatcgtgtcacgtcgacgatgccaaattatgttagcgtgagcagaaacaccgtgggggaggaaggcagcagctgaagaaaaaagctcaaatgatctagtcactttcgatactgtacttcagatgcgaaatggatattcgagtggaaacctgacaaagtgcgcctgctttgatgtgaactggtatagacaatgaccagtggctgggtcagtgggatgtctctctgtgagcacaaaggcttatcaaatgacactaaaaataagttcaacaaccatcacattggaagggagaaggcgaacatttcatgtttggcgggcatgtgagtgcacaagatggaaagagcgattggagcatcctggtataattacccccattgtgctcttaatggaaatttcaaaggacgggagtattctgttggttggtgtccaggtttgtggcactgttccaagaggccttacacacacacacaaatatataattttctatacatatatatcctctagcttgaaacttttgctcaagtttatttatgtcactggctggctggatccaaagtcatgtgtccacacattcataaataaaaattttacctatgcctgtgctaccatttctttaagcccacataaagctaatgccttcttgggttgaatatgcagttgttatgcttagtttcagggatggaattctattcagttccaaaatgtccctcatgttcacagatgatactattggcagtagctgcatatgcaagtgtaacttggaagcctgatatagtatacccaaccctttctgcaatgagttattgtatccctttgttctgcatttgcatctggaacaagacctaatgtggcttccttaaatgggcacttcatttctgatgagtgcacaccaattattgctattttaatatcattgagaatactacagaagctaaggctatgtttctttggtaactacttcaaatttctctagaattatgtagcatacttacattttgctgcatgaacaatgaaaattaacctctgcctttaaatggaaaaataactttctgtagattg

SEQ ID NO: 280 - protein, 243 aa, Homo sapiens
MRLSFIVFSSQATIILPLTGDRGKISKGLEDLKRVSPVGETYIHEGLKLANEQIQKAGGLKTSSIIIALTDGKLDGLVPSYAEKEAKISRSLGASVYCVGVLDFEQAQLERIADSKEQVFPVKGGFQALKGIINSILAQSCTEILQPSSVCVGEEFQIVLSGRGFMLGSRNGSVLCTYTVNETYTTSVKPVSVQLNSMLCPAPILNKAGEWGLTVTQAGVKWHDLTHCTFGLSGSGDPPTSAS

SEQ ID NO: 281 - DNA, 27705 bp, Mus musculus
  misc_feature (1)...(27705): n = A, C, G or T/U
gccaaaaaacacatgtaagaaagatggccagggctggagaggaggtcagaggttacaaagcacttgctgttcttacagagggcccaagttcagtccccagcacccacatgatggtacacggccatctacaggcacgtatatggtgcatatgcacacacatgcaggcaaacactctataaaataaaatagttctataaaaaagaaaggaaggaatggagagagagagagagggagggagggaggaaggggagtagggagaaggggagggaaagagggcctctttaacacattgtactgagatttcagtatccaaacacacataactgacatcagacctgttttttactctggacaaaggtcagttttgaatgggttaaagaccttaacaaacttggaaacaataaaatatagggaaagggtttaagatgcagatattgacaacttggtgaataagactctagtatctcaggaagtaattgcaagagctgatgggcagggccatatcaaattaaaagcctctgaacagaacgaaacgcttgccagagtaaggagagtgcctatgttctaggagaaatcctgccagccttttatctgaccaaaattaacatccatcatctctaaagaaccaaccaatgaaatagaacaagaagactcagtcaagtcagcaaatgacaagtgaataaacctctcacaaaaggagctgtgtaaactcaattattatgtgggaaagttcggcccctttaatgacaagagaaatacaaatcaaaactacattgaaaatctctttcactctgattacaatggctgccatcaagataacaaaaacaagaaaaatactggcaagcatttcctttaggaaccaggaacacttaggactattggtcggagtgtggattagcttacctgctgtggaattcagtatggaggtgcctccacaaactaaaacagaactaccttaggatccagccataccattcctgcaaatacgtcagaagcaataaaagctatcgcacaacagagacgcccacacacacatgcttattgatccaacgtccacagtagccaattgtggaattggtgtgggtgttcatcgatgagttaaaaaaaatgtgttagaattttaccatggaatactactcagtcgtaaagaggactaaaactgtgtcacatgcagaaaggtggatggaacgggagataattacattaggcaaatggaactacagttagaaaacaagcatttctgttttctttcacatgtggaatcacgacataaaggcaaaagggagattatgtgggaagaggaagggaccaatgggggctaagagagaacagcaggtataggaatatgatccaagtatattatgtacaggtatatgtgtgtgtgtgtgtgtgtgtgtgtgtgtgtgtgtgtgtgtaaatgtcacgaggctcataaaaatagaaaaaggaatatttaaattctactttcaaacaaactcaagtacaatttttaaaagtcacagtataatttggagtggataaaagaggcagacagacagacagacagagattataacctcctggtaacaataaaatcacagcatatcatcaagatggacaatgatttaatatagccagagcgtgggagataagcacccgggtgtttttataaagaccacacttcaaaatgtccctggtttactaacatggtggaaatggatgtagatgggtgtatgttttaaattttcttttctctttgaaaatgttttactggtgttcaggatgtgcttgcctagtgctcaaagagttctgggttcaatgtccagtaccacacaaagccaagcatggtggtgcatgcctgcaatcccacccgaaggtagacgcaggaggatcagaagtttatggtcatactcaggcacacagcgtatctaatggcagcctgggcttcagaagaccttgttggaaaaatgtgaagaaaataaaagtttgtttgtttgtttatttttcaaagaaagtaacaaagagaatgtttatcagccctgctgcttcagggactttagtgctattattttctgacctcctgttgagagtagaccaaagaaacctgcactgctggggtggcgggtctttgggagaggggagaaaagactatctcctcctagtttcagctcccttcacatctctctctgccagcttaaagctcaaagcttttccactccagtgcaaagagatgagattttgaatcaacagaatttgttggacttaaatgtcattttaattttttaactgatctagaaaagcacaaaggtgcacgtgtttctggggcagcatgtgtgtgtcaatatgcaaacctgggctaattagaccacttcacttcactgaaacagaaaccactagattccctgtgaatccctctcttcaggaggccatgggggcagggagcacccctacatctgtgggggcactggaccccctaagttcctctactccaggattcccttctgaaggccagctcggggcatggaaagattaccagggctggtccccagcttcacctcagagttcccagaacccctaggttctacctccctctagatactgggtcagacattccttccagagctgggttttgtgagtaatttttaaaagttatgatacatagactctttcatttagaataaagtgtttcacctaacatcctgtaggaagtgatgaaactaaaaagaaaaataaacgcattttctctttctctcgttactttttccattcactaaataaaattgacttttttttttccatgagagttcacactgggtctgtctcagtaagagtcacactgttcagcccacacacgctgtgatatgttatttactcattctcttctcaggaaccactctcacatgtgaaccctgaataccagctccctccctcttcagatctgtgaaatctgtcctgtaaaaacgaacatcttagtgatactatattttataaagtagtgcaattttaacatgccagccagaaaaggatcattaaaggaagataacattttctttgtgtttagaagattcttagcattaatatatgagagggtctcgctcagcctggtgtctggtcaaacgataccagcccttgagattgactgctcaaggatcatcagcagttctgaagacagtttggtctacagagcagcttccagcactactagggctacttagtaaaaacttgtcttaaaaaaaggagctggcagagctctgttatacaaacgaattttaagatttataaatgggaaaagctaagatttatcagcaaataaaagctaatgctaggggctgaagagatggctcagtggttaagagcactagctactcttccagaggtcctggtttcaattcctagcaaccatatggtggctccaaacatctgtaatgggatctgatgctctcttttggtgttcatgaagacagagctctcatgtgtatataaaatgaataaataaatctttttttaaagttgattctgtgtaacagaggacaaaagggaacaagggagagaagttctaagatggctcagtgggtgaaaatatttgatactctgaaggtattccatacacacaggagaggcaggagtctctcatgtacgcacacagggtggagtctcccatacacacatacaagtctcttatgaacacaaatggggagagtcatgtacacacacaggggttgggtctctcatgaacacacatgggggtggggcctctcatgtacacacactgggtctcttgtgtgtatacacatggggggctcttttgaatacacacaggagtctctcctgaacccacacacagatggagtcacaggggtggggactctcacgaacacacattgggggagaaccatggagtacagtaaaacgttttaagagaggcaggttttactcatagtggacatagtatgtcaatttgtttgttgctgaatttctccttaacttactctcaggcttttgtgttgcctattgacatgagtgatggccatcaaatcatactttgactgatgtcattatttgaatattgttttgatcagttgctactcataaaaggaagatttttattttaattgtatatttgggggtgagcatttggaagtcagttatctccttccccacctaagttcctggagattgaactctggctgtggggtttgctggccagcacatttacccattgcccagagataattacttatctcattggcaagttcagatgtcacacaattatcactttgtatttgtttgaatttaaatattttagaaaaaaaaaagcactccttcttctttcctctgcactcactaagatgattcctccaaagataaaaatcaaatagacttatattttttaataccagaaaaatactgtgacatgacagggtgtgtccactgttctaaagaacacttctactaaaataaagaccagttctacaatggccccttccagtctttttagctatttattgatatgaattccctgccttatgtatcatccaggattctacctaaaatagttccaataagtatcaaggaccactcaaatattcactattggacttagaagctccactcttaaaaatagattctatagaaagagcctgaaatgggggcatgaaatgggtccatctccagcgtcacgcacacatgaacaaagaaaaggaggaaatggtgttaagaaaacttacatcatactatttaaaaataaggaggaaggagggaggaagagaaagagagaaagctcaatgcttaggcaagagtgcttaagaaaattacagttaacagatcatttacagcatttaaaatggcaaaagattattataattctaaaaatgtattttgctgacataaaacattatacatacaataataatactatgtagtgttttaatgtcgtgattttcccccctgaagtaaagtttactatagaaagtatgtgttctataaaataaatatgctatcaaaaacaataaacaattatagctatgattttttaaaaaagttatagctatgagattgctttcttttttcaataagactaaaacacctggaaagttttgggtgggtattttttccttatcagaggggaagtaatacactttataatactctaaaaaatctccataagcctcaggtctcttacctacttcagtctcatatcccagatgaatctgtgaagaggaacactgaaggacttccccaccgccattctgcagtgcaggctgattgatggttggactcctggtgagaaacagctggcaaaattgatctagcttgcccatggtcatgggttgggttttggcagaacacagactgataatcatatctaccttcaaagtcatgaagcccatttccctcctggtaacatctctgagcaactcaaaagaggcaaacactaccagaatgcatgctgggagtgcgagtagcgccctctctgggctttcccaagccccagtcttcccaaaccctgcaagagaacattatagatagccttcccatggaaaaaaataagtagccaggattaatatcatctcatcatctttattcacatttcaagtcttttgttgtttatgtgtggccttcctgcctcggcctctcaagtgctcaggagatttccgtcaagtgagtacccatcgtctttatcaatagctatgcgagatggtcctgcagataaataggtgactagcaaataatgtttggaaggtgagagtatttggcattaggcatctacaggtgcattattaatattactttaaaaaaaacccagtatactgcttgaaaacagtgaatgcaatgggttctcattcaccttcctgctctcaatcaatctccatctctaaagcaagaagcggggcccttctggctgagcgaggggtaaagggaggggtaaagggaggggtaaagggaggggaagagatctcctggcaccttggttctctctttacctccagtttagcaataaaataagcaagaggcatgtgagactgctgagcctgagagacaggtcttcctaacatctctgagcctggctccctgctcctccttgtaaacctcttaacctttctgggtccccttctcccttccctgccttcctcctatgctccccaagtatgggaatcactccccaacacctcgatatatctcagagatgtcccatcctcacttactaactgctttgatgtgtatttacttagtttaatcacgggattcaacaaccatctgcctctgacctgctccagttcttactggtcaagtcagaaatcccaagaggccacaacagcaagtagaaagtgagatgattagggttagtcagagaagggcttagtgttcagtgctggtgccttcacagagcctccagcagcacttaaactgctcactagtcacagagcctaggtgggaaaatttgactgagcttctattgaaaacaaaaacaaaaacaaacaaaaaaaactgttttactctatgttttgcttaataagaaatttaattgtattattctttttaattttcttttgaattttttattttccctgttaaaaagaatagaagataacaaggtaaagatttgcgttgggactattttgagatagtcacaacaggacacgacaaagcacacaataagtgaattgttcatagaatatgccgttagctaatacagtgtgtgcagcccctctaaaattgcatgcctctgcattcatctataaagaaagggtgtgttgagaatcctgcatctgaggactggttaacagacaggatgtgtgtcatagcacatagcagtgatatataggccctatggataaaatgccaaatttattaaaaatcttaaagaaatgctatgctagtcaaatattttgcataaattcagattttttttacagttaaaaatatcactgactttttttccccacagaaagggctttttcttataacgattttgactaatctaaactataatagttgcagggctagttcattgtcaggtgcgtggcgaaagagtgcaaatcccgggggttctttcttcagaatcaacgaggcaatacacttgaacatgtatgtttttgtaatctgcggggcatcacccgtcctccaggatctcatttcataattttggttcacgaaataacgctcaaaatccagcccaactcatttggaagaggactgtgctgacaatggcttcacccctgcgaggagagggtgcacacccacagacacacagcacaatagtggttggattttttatttgcagaagagtgaggtttgagctcctctccccgccctgccatcaatagtgttaatcccacgcctccattgagggcaagaccacggtgggcattattctgaagccttcattttgcaatgactccaaaagtccacatggcctagtaccctgctgcagccccaggcgccacgcctcccaccccaccccaacctggaccaagcaagactcagctgagccgcagctccgaagtcgcctttaatttcccagctccgaccaccggaagcgagcgcgaggcgggggccgggtggggaggacgcgcccaccgatgccgccggcgcccgcgggacgcgccaccagcccggcccttgttcgctgggctcgacgctcgcccacctcttccaaatttaaccgttacctaaatccgaagggaaatgagcaaacctctgggattgggtgtcaaggtattttcagcttcgttgggcgtatttatcctcaagtgtttccacaacaagttatttcggggcccgaggcgcaggtttctttctgcggacgcggtggccagtggccggactccaggccggtggcaccggggtccggtgattcacggccgcgatcggggcgatgctgcccaaacagtcgacaggattggggtgcccacgggagccgtgcgagctgcctgctaccagcgcccgcagctcctgtcaatctgtgtcctgaatctgtgacttctcgctgcggaagtctccaggagccaagaatacttcgattttctttctagtcatttctagtgctgatttctcagacatcccggggactctatagatagccccgcgatcccacagacaaacaaattgggggctgctcaggggtgcccaaggagttggcaaggatacccccttcctgtcacctcctgaccccttgcgcaaaggaggctcgtggcccgctgtcccactgggggatggggctggggttgagaaggctagtgagcgcctctaacgctcaggaagtgaagtttgtggttttgggggctgagctccgaaggagattaaaaaaaaaaaaaaaaaaaaagtcagagagacagatcagtctctcccgaaagcaagattcagtttgcacactctcagagctcggtgcccgcgccctgaccccgaaggtaggtttgctgaactgctgtgcctcccgctcaggcgggggtggcctcgaggactggtaggagtacattgacactgtggggacgtcccgagggcgcaggcgggtccccacctgctgcagagcatcggctgctgggttctggagccacccaagcggtggagcgaaagatctggaatagaggggcacacagtttagcggttagatagcagagtgggatccacgcaggaagaaaacatctggtgggcatgtggcggcagcgggcttctggaggcctccttctgagcgccttgccttcagctcccgaatttccagcctcagatgaccaggggaagcctggcgggccgctgtgccaggagcgtgccgccccgccccctggacgccagctgcagcacgaggttgccttcccacgcgctgggcctccttgccatccccttacccctcctacccggaacccagcaaagccctccgaagcgtaggtttgtggcctgggcgaggacgccacctctgtgtctaccctgtcccgcgtggtgctgacgcgcagacccagcgcgggaccagacagccctgcttcccacgggtcccgttcttggctatcgcaggaccgaacctcatcgaggcctccagaactcttgccctgttttcttgctcttcatgcttgctttaagaattgtcctctggttggagcgtctggctgtacagacagggagtgcgggaaaattaaagcgccggagcctgggttctgggagccaaacccgaccaaggcgtgtgactatacattatgactgggaatctgaagcaggagtccttgggctccttttaagtgggtacaacagggtgtgttctgtacgcgctcctgggggggggtggcgaagaggctcgggttcctcagtctgaactgcacgaagcccaaagacccggggcgtgcgccggcctgtgccccagtctttgagcccgccgccgccgttcagcctctattgccttggaccttggaggcaggcggattcgtttcaccctaggcctccctagggtcgcccccggagcgggccaggagctgggacgcagtctcagccccgcctcctgcagggctcaggtttcgacccgagattaggtgaactgattgggggttaaagagagcgacgccagctctcggtcatgctcagggaccctggcctcctggccaggccttctggccactgctcactcgtgcgcgctccggtttcatcttgctggcccgcgaagtcgttggcactcattaaatttgggcaccgcgtgtttgccagtaagcacgcagtttaaactcaacttccctaggacaagatttttggtgagcagatcagaaaataattctttctgggacttagtttctgaagcaaggcctacaggtctggaatgtttctcagtggtcgccgtcctggccggtgccacaccactattccagtgggcgtttctcctgggacaagtgttggtcctttgccactcccacctcactttcctgtgcctctggcttcctgacttctgctccagccactgcagcacatagtccctaggcaaaccagtccctagtacgcccctctttcgcttctgttcgtcgcggggctcctggaggttttggctccaagccccttccgggtcccaaacactgatgccccctgactggctaaactaagccacgcatccctggcgtgagccacaacccagaagggagcaggtgggcttgcagggttgacttgggataacggaccagttgtggactactgctctcaggagagtgatgatctagctttggtagggaaggggaggggctgaggcgtgggcagggcagagcaaagggaccagagccagagcctggggacaggttttaccactgagctgttgcagtggcggcggaggccgggattcgtgccacctgtccgagtgccacctggtgagcgtggcgcctgggtccaggcccctcctcccgcggcttccctctctcctccctggcccacactcttccttggcctgggaacctaccacaaccgccatcggtgctgaccctcgtttccacccaattttcccccttctctcagaactcagagtatccgagggtccaaacattcgtccagcggctgaccaccatgccgcgctcattcctggtcaagagcaagaaggcgcacagctatcaccagccgcgttctccggggccggactactccctgcgcctggagaccgtgcctgcgccgggcagagcaggtgcgaagcgcgcagaggccgggtagggcagctgccgaggacaccgactctgctccaagccacctcgtttcctaggaatcgggggaggctatcctaacgcccctcgggtgcttttttgtttttgtttttgtttcccggtgctcagatttgctgagcttgccagagatgcccctggcgctcgcagtcggctcttgaattcgggagggagggctcccggttgggtcagagtggacagaggaggacacgggcgccacggtggaaccacttcagttcggccaggtttaggtttatttctctcctgaatcttttccgcagagggcggcgctgtgagtgcaggcgagtcgaaaatggagccccgagagcgtttgtcccccgactctcagcttaccgaggctcccgacagggcctccgcgtcccccaacagctgcgaaggcagcgtttgtgacccctgctccgagttcgaggacttttggaggcccccttctccctccgtgtctccaggtaagccttgattcgaggtcttgtggcagagttctggagtcgcagcacggagggaagcccgcacaagggatgcagagggtcggcctagggatctggctcctaagggaacagggttcaggggaggcatccagcttttgtgctggacaccttgcccaaagtgtcctctgcctccttctaagtcccttagctccaggctggcccttaattcgtttgcctggaactaacaggcgaggtcaaacgaactggtccttctctggctggcatttcttttatgtccagaattcattgtttagaaattgtcagatcccagaatccaggacccagacctgaatacttcaaacaagagacctgggcagtctgagcgggacagaactgggcaccacactggagtgcaaggctgctgctgaaaatctcagctcgctagctctgtcttcaaaagtttcattttctccccttctgctaagagggcccaggcaggggcaccagcatgctccggctcatttccagggagcaattgactagagttgatgggggtggggtgggggtgggnnnnnnnnnnnnnnnnnnnnnnnnnnnnggtggggtgggggtggaggtggggggggatatactcgggtcacagcagaagtagaaaggagaccaatccaaattctactaagagcaggctatttccctttcacactattagctcattcacccccacaagcagagggttggttcttcctagctgtgtgaccaagctgctatgggacaggtccgcccagaatggagtgtgcatttacttgcattcattcaatatccaattttagcaaaattcacgtgtgtgaagggagaggagttcttctgaaggtagtgtaatttttaactgtaatttttcatcagaaatttatcagggatgggcatacttcgcgcccttgtctgctgccccttgcgtcatagctttgagaaatcttggggacattccagtttgtttagtctgatactcctagataacctggactcaacgtggatcggccttctccgttcttcctaatctattgcaaagagaaaggaattgagtagaggagtacttgaaaggagtcaggaccctagacctaagttctcctgtctgtctcaatctttctagcaggttctggggactgggggtgggtggggtccagccagagaaccatcaaaacgaatttacccacctcttcaacctgtatcattttaagtatcactttactgctctgtcactggtcctggaagccccgcgggcctacctgagtttcaccccgggtgtcgggggtacttggctttctaatcagctagggcgcctgacaatagtgatggtgcactgcgggctccgcccagcagcctcgaacttgactcaatggcctcctgtgccttcacagcgtcggagaagtcactgtgccgctctctggacgaagcccagccctacacgctgcctttcaagccctatgcatggagcggtcttgctgggtctgacctgcggcacctggtgcagagctatcggcagtgcagcgcgctggagcgcagcgcgggcctgagcctcttctgcgagcgcggctcggagccgggccgcccggcagcgcgctacggccccgagcaggctgcgggcggagccggtgcgggacagccagggagctgcggggtcgccgggggcgccaccagcgctgcgggcctggggctttacggcgacttcgcgcctgcggcggccgggctgtacgagcggccgagcacagcagcaggccggctgtaccaagatcatggccacgagctgcacgcggacaagagcgtgggcgtcaaggtggagtcggagctgctttgcacccgtctgctgctgggcggcggctcctacaaatgcatcaaatgcagcaaggtgaggctcgcgcgcgcctggcctcatcagccctgtgtccccagcccgtgaccctccagcatgcgcaccccgcgacccccctcagcggccttctccctggccccccactcgccctcaggtgttctccacaccgcacgggctggaggtgcacgtgcgccggtcccacagcggcacaagaccctttgcgtgcgagatgtgcggcaagaccttcgggcacgcggtgagcctggagcaacacaaggcagtgcactcccaggtaagatcggcgctggcggcctgacgctgcactggggacctttcagcttgtcctccgaatcggcaccagccattttcccactgcctcccggtgccccctctgcttgctcctatttgggggtgcagagaaacctgggtgacagaagtcctggagtgtgctgcaatcttagattgcagtgtcgcaccgctgtgagtctccagcagtggaattctgttggagatttgttgacatttgctgctaatgcactgactttactgtttatgttcccttcatccttcctgactggcaagggagggtctcagttcatgcgcagcgtccagtagcgaatgctggtcattcattcattcattcattcattgctttataacttgcctaaatctaaggctttaggcacctgagaatcctgtagcacagcaggtcctgtatggtggattaaagagagggagataagcaaaatactacacaagtgtctgtgacagcagcccatctggtccaaaccccacagtgactggggaggaggggcaatctaagtggctgaggtcctgctgaggagggtgtcaatgggtgtcaaaaatgcagggcggagctacgcttttgtcctggggtgtggagggttgtggctgtaaagtgttttagtagttaatcagtaggtgttgaatgatggggtggagggagagaggagagggtttctggctctgggagatcagtagatgttggagagagagagagagagagagagagagagagagagagagagagcacaagcgccaaggaggctgctgaaggagcggcacatttcttcctcctctcttcctctctgctctgcaggaacgcagctttgactgtaagatctgtggcaagagcttcaagaggtcatccacgctgtccacacatctgctcattcactcggacacccggccctatccctgtcagtactgtggcaaaagattccaccagaagtcagatatgaagaaacacaccttcatccacacaggtgagctaaacctgggcttgtaggagatgcttgaaggacatgactcccctctgatagtctacctccaatgagtggtagatgagttctcccccagagtgaatctggtttgtccttgagtctgaaggagtatcttcctctatgtcaacagctgtgcggcatcaagccctcccagagggtcaatgtaaatatttactagagatatgggtattcatatgtgtcaactaaacttcatttttataagagcttcctttgtttgagcaggaaaagaaaggcaaatgttaccaagtttcctgctgagtctgtgttgacaactccagagacagtaactgtttctttagcctcattttaaaaatgagatgaggaaatcaaggctcagaacgtatccaggattacagggctcaagttcaggtttgttggtctgagctcccaaattcatagtcgtgacttgttccttgtgtagtagaggtttacagccgtgggaaggtggttaatgaggaaactcctattcgtttggtgttctttttgaaatgccaaaattttgttccctaacagtgacaattccttaactatacaatgctttaagaacacccaagtgtttcagattgctcatttcccttggtcctttcctcctgctccacacagtaaattgggatcctcttactcagacagcaagtcagtttcagtaaatttcaattctctctagcttccagcctggacgcctgccttccttaacacttcaggaacaaatgtgcaggcttactgtcaggagcttgtcaactaaagtgattcccttgccccaaaagcatttcctgtaaccgtcaacatgacagttatatgagaccacaacttctgactttaggaacatttctttaaatcaaatcacagctggatacagtggcacataggaggcagagacagatgagatggaggctagcctcggctacatagagagtcctaggccagctaggacaatacagcaagatcctgtatttaaaaaaacacagtgccttccaggatcccacaattaatgtttgtaaatatttgtgagcagtgtagacatttgtatcagaaaactcaggaaaaaaagcctcactttaatcatgccccctgtctgaaatgtccatgtaattcactctttataagttgtttgagacacttatcaaaatgcaaatagaatcttgactgaatgacacatttaagtctttactaaacatttatttaattaaacaattattaacgcattttattaaatcttggctagaattaatttcacagacatatttgactctagagggacagggtaatttttgtgaagtgagtctttatcaagaaatcttaagcacaaggagagatggaagttccttagaaacaagcaaacagatacttggttgttgttgatttgtttgatcccataaggccgagtaccaaccggagagccatgaggggattagttgggaatgtgtgccatttactcacattttaaccagagcacaagaccaggaaagacaaaacctgttggttttcttcctgttgcctgctttaaaaatttttttagtttattgttctgttgtgaagtgttggcatattaagaatcctgtagtttaaaacctcaaaggaagaaagaaagaagtaaaagttagaatagacaaccttaacaaattatttgtggctcgaatgtggatttaaaaaaaaatagacattggacaaacctgtgttcttcaagagcaagaaggaagacaacttcagtggccacacaaaacaacacccacttggaaactcagatttgaaaacttcctctgacgaaagcagtcatagggtctgtaggacagcccctcccacctcctgctgaacatctgctctgggggccctgtgcttctaaaagtcagcaggctagtcctcgggggtgaattcagctggggagggcacgtggcctttactcagtttccgtttagcaggaaaccgtttgagacctttggctgggagcctccactcaaaaagtctcccttccacctggtatacccgtggcttactggtaccaagttgcaggccaggagttggttcgtgttgcaacctatcactccccagcgtgaaagtcttagccagctgttagcaagagcatgtgggtcgcaacgggtctctcccagctttatcataggctcatacttcctgcccttggtcttccatccttgcaggtgagaagccccacaaatgccaggtgtgcggcaaagccttcagtcagagctccaacctcatcactcatagcagaaagcacacaggcttcaagccctttggctgtgacctgtgtgggaagggcttccagaggaaggtggatctcaggaggcaccgagagactcagcatggactcaaatgagtaccctggcagcccgcaacaccagctgtgtaacactaccgtgagggatgtcttccctgcctccctccagccccttctcaggccctgagtccagtgtgcaaagctcatcatggttagtccccttcaccttccttcccggagctgctggaggagatgaactcccgtttctaaggtcaacccagagtgggaaccgcagcagcagcagcagtcgtctgtgctttgggcttccctacagctgaagatggggatcaaatgagatcttgcacctcccagttcttcccttttttgctgtctcacaggccagaatgaactctgggcagctgctacaagaggaggcatcacctcttaagctttgagcgccactgatgcatttattgagaacgaatgaacattaattttctcttctggggagactgctgactcctttatcctccaccagactctggtttagggaaggaacctcgttcctttgaaatcatcagatgcaccatcaagcctgccacgagaagaaggggacttggtgatgagagggagtcagaggtcctgtggtgccatcagaggaggtgaagctgtggagcagctccggggaacagggtcttcacttactcagcgagtgattattggccgcaggttatcagagtaaggaactgtgctaggtatgggagagccagagattaaagtcataggccctaacccccaaaagctatcagttggacttcaacatagctagagcctgtgttctgtgcttccaagggagttctgaagaaggccacacaaacattgggacttctttttgacacttacggagtttttcaagtgtaaacaaataggaactggaggattatttctaaagttcatgagtaaatccagcttttattgttaggtgggactttattagatgcctgcgctgggagatgtggggtgaaggctatggcctcagctcctgccccttatcatcttaggaacaacttatttttcctgtgagggttgtagacgttcctaaatcttcttgagtgcattatgtattagcataatcatatttattagaatgttgttttaacttaataaagtattaagattattacagcttgtctttcatcaggccaggaatttcgtgggaaggccgttggtgtgtttgcttattttttcttttccctgtgggatacaccaggacaggagaactgcagaggaaaaccagagtaaatcacagtttctccagtttccatattttcctccttcttttattcctgagaactttttaaatgatttaattttttgttagttttaattatgtgtccatgtgtccctatttgtgtgtgtggatatgtgcacatgagaggctagcgagggcgttggatctcctaaggctggagtagttttgggccattacaagctaccagacatgtgtgctaataaccaaacgcaggtcctctgaaagagcaggaagcaactctaagctgctgagctagctctccagccccccatctatctatctatctatctatctatctatctatctatctatctatctatctatctatacctatgatcttcctttccttttaaaaacagggtttcactatatctatatagtgaactcatagagatttatctacctcctaagtgctgggattaaaggtgtatgcctttaatacctggctaatgaaaacttaggaggtatgtaaaactcaactcctatagccttatagagtcctggatggatccacagggatatcaattcttacctttgagaatttcatcttttgtgtgtgtgtgtgtgtgtgtgtgtgtgtgtgtgtgtgtgtgtgtgtttcatttacacagtttactattcagctattaagaacgttgacatcatgannnnnnnnnnnnnnnnnnnnaacgttgacatcatgattttctaggcaaatgcgtgggactagcaaaatatcatcctgagtgaagtaactcagacccaaaagaacaagcatagtatgtactcagtaataagttgatatcagcccccaaattacagaataactatgatacagtccattttttgtgtctatttttttattacgtattttcctcaattacatttccaatgctatcccaaaagtcccccacaccctccccccacactcccctacccacccattcccattttttggccctggtgttcccctgtattggggcatataagtttgcctgtccaatgggcctctctttccagtgatggccgactaggccatcttttgatacatatgcagctagagtcaagagctccggggtactggttagttcataatgttgcacctacagggttgcagatctcatcttaacaaaaacaaacacacaaacaaaaaccaaaccaaaccaaataaaaccacacaaagctaaacaaaatcaaaccaggacctagacttctagatgaaagcatagacctttaattcagagatctgaatgctttaaaaatatttatgtatgtatatatgtatttacttgtgtgttggtatgtgtaaacatgtatgtaataagtgtgcagatgcctgagatggccaggaaagggagtgggagtccttgaagctggagttataggcagatgtgagctgtctgacataggagctgagctcaactcacgagctctgtgagtagcaggtgcttctgcgccgcctcttcagcccagatttgagtctcagtgtaggctctgtcactgatgcattctgcgtcttggcaaatgttattacttcctagtttccttaaccatacagcatagctgtggtccttcaccccaacctaattctgactactcagactccttggaagctggagagaaggggagaaagagggaggggaggggaagagagagatcgattggctggccactgtgtggaagggaaattacaatcctaaaatgtgagtgaaatgtgaaatggggcttggagcttgtcttggggtcaccctgtgattatcacatgtcacattctgctatgacttggataccccaagttccatattccagggcaggaactcagccccgaggcaggagctgatgcagaggccatggagaacactgcctacagacttgctctccatggcttgttcaacctgctttcttatagcacccaggaccacaacccacaatgggctgggccctccctgtcaatcactagttaagaaaatgcaccacagcctgatgttatggagatgttttctcaactgatgttccctcctctgagacaactccaacttgtgtcaagttgacataaaactagccagcatagggttattctgttctggtcccaaaagactgaaaccaggataaagtcctagccttctctactacctgtgcgctgaaggcttctagccagagcttcagcccacgtggcccaggggaccagacaacactatttctagtgatcaatttctcacatgtcaactgaatacccagcctgtgtttgggaacacagaagtgagggcaagtcccacggagctgcattaggcactaggtggtacgaagccacctgcttcctccacagccagctgcatccaggaatcacacaaagctttctcattgtaggatggggaggttgaacctctcaaatataagtccttggcttatattcttgttggttttccatgactaactctttccatgtcagttaattcaaagtttactccagtagaggtttgaaggtagcatctcagaaactgtgggtgataaagtagcccaagcttaggggaatcacttcacaaaatcctaggaggcaaagccctatggaatgaagacaagaaggcatctcgctcacaagtcagtgtgtgcaccgctctcttagttccaacctgattgaaaagtaaaattataatgaaggaggagtcaagctgattgaaacccgtgggttctgtcttctccccatcttgcctgcctgatgacattggaatatttgctccactttcatgggttttgattaagttattaggagttgttctcccccgccctctctcttcctctctcttctgtttgttttgtttgtttgctttgagatcttactatgtagctcagtctgggcttgaactcacaattcttactctttagctactcaagtagttgggataacaggtatgtcccactatgttaaatctagaaattataattttggcgttcattttttttaaatgtgaaaaacatttgtctctgtatccctcagtttagaatcaaaacaaattactgtgccagttgccctgtgaaatttgaagattgaaaatatctctcttaatgttattacttggctccattaaaaatggattgtgaatattccatgttgcattattcacgaggtgggctctatgccttttgtctgccagagtaacagtagaaagggtaacgggagacacccagcgcacctttgtttcttccactaaatttttaataacacctccagctagccagttggtgaagctcagctcttgcacaaaagtggaaaagcgcagctaaccctgttagctgagtctttcaggagctaatttgagtttgtgttcatctacaccagacatgattagattacctatcaagtgtgctgagctatcaggattcaagcccagtaaaaggtgaattccatctgattgatttgagacacaagtggaacaactgaggtctcataagcaccaccttcattaaaggggcagcagagcatcaccccgtgcctgcccccgcccctgaaaactgcgcgtgcatagtgatttgacccatgtcattctgctgggagcctttttgtttaacctggtcatctaacagaaagaagtaagctaagagcgaggaagccaaaaggtcttcatgcactttctttgcatgtcaagagttctgtttggttcaatctgcacttttgagttattgccaaagtcaaaactttctatggagttcattatatatttatttaaatgttatttatcattaagtcagattaaaacataaaaacttcagagacatttcacccagcacctttctaactttaaagtccgtgggttaatttttaatttgtttgtcaatcctttatccataggcttatatacttatacatttttaaaaaaattttgtggtcagagtacttataatttgtatcaaagtacttcattcatttacttgcagtatagacatatgcttaaaactgaaatatgtctcacaatgagaattttggaccttgttttttctttattttgagacaggttaggctctgagttaggaagattgtctctgcctccagagggctagatttacaggtgagttctagcaatccttgcttggacaatttttgtggttaaggttttttgttttttgttttttgatgtcttagtacttatttataaaatttcatcatttttgaagacttcttaggaaaaatgaaaacttttgtattgcagggctttttcactctaagcaaaacatttaaaccacacgggaagttacagagaagaaataatacttcaggtacacccaccattctgttgtatttacttcatgagctattttattcatttaaagttttttgttatatctttatttctatatctgaggggcatattatgactggtacattcagtttgtccttaaaccctttagattctggacaccaggcttggttggcaagccccataactcactttattttgaaatagaacaagtttctatccccaagacagcaagggagaattcttgccccacatcttccaagcctaaaaaatgtttggaaattgggtgtaaatgctgttgtaatttgtatttcatggttatctcttcacaagtttatgggcttgatgggtctccctctctgtgaaatgtttgctcatgtacttttttttctgccagctttttatcagcttgttctttctgtgtgtactaatcactcacttgctagaacacaggctataggatgaaaggagtctgtcagcctacatgccgtgcacgtctcccactgtccttcctcttttttaccctttgtttgttttttgatattttcaagatagagcttctttgtgtagtcctggctatcctggagctctatctgtagaccaggctggcctaaatttcagagatctgcctgtctctgcctccggagtgctgggattaaaggtgcgggccaccacctggtgtcctttgccttttcactttgatgagaaggtcagtttggtttgggtttttgtgttattgtagtcagatgtactggcgtgttcctgcgctggttagtattttgtcaacttgacacaagcttgggtcgtctgggaagaggggacctcaattgagaatatgcctgtaccagattgggctgtaggcacgtctgtgggtgcattttcttgactggcgatgaatgtgggtggtgccacctgggcaggtggttctggattgtaggaactcaggctgcacaaatcatcggtagaaatccgggaagcagattttcttcctggtctttgccttgagttcctgatttgcttgagggaagccttggcttcccttaaggatgtgctctgatcctgacttgtaagccaaattaaccctgtccttcccaagctgcttttggtccagatttttttttttttagcaacagaaagtgaatcannnnnnnnnnnnnnnnnnnnnnnnnnnnnnnnnnnnnnnnnnnnnnnnnnnnnnnnnnnnnnnnnnnnnnnnnnnnnnnnnnnnnnnnnnnnnnnnnnnnnnnnnnnnnnnnnnnnnnnnnnnnnnnnnnnnnnnnnnnnnnnnnnnnnnnnnnnnnnnnnnnnnnnnnnnnnnnnnnnnnnnnnnnnnnnnnnnnnnnnnnnnnnnnnnnnnnnnnnnnnnnnnnnnnnnnnnnnnnnnnnnnnnnnnnnnnnnnnnnnnnnnnnnnnnnnnnnnnnnnnnnnnnnnnnnnnnnnnnnnnnnnnnnnnnnnnnnnnnnnnnnnnnnnnnnnnnncccctcccctcctctcctctcttctcttctcttctcttctcttctcttctcttctcttctcttctcttctcttctcttctcttcttttcttttcttttcttttcttttttccctcgagacagggtttctctgtgtagccttggctgtcctggaactcactctgtagactaggctggcctcgaactcagaaatctgcctggctctgcctcctgagtgctgggattaaaagacttgtgccacaccacctggccgttgttgcttttcttaacttaagaatctctggggctggagagatggctcagtgcttaagagtacttgcttctcttgcaggggatctgggttcagttcccttcccttctgattgtggtagcttctatttccttccttccttgtttttcacctttccttttgtacttccaggatcacatttatctacctgcccagcccaagtttctgttctacatggttctctctatggatctgccaccggtcctactgtctacttctccttaagccacagttccataaataattagaataaaagttagtttctaatgactaatagaggaggcttccctctgacctgcttcattctcttcagaatatctactcgtggcctttattcttgcacatgattttggcgtgtgttactgtcatgactctgagtctagcaacttccatctttgggggttcagttatatcccttggcaaaggtttatcccacctgagcttgttgactccccctcccccgcatggaactgtgggaagggtcataactgagtatcctgttatctgtggtttgcgactctgtcttaattgctcctgggccctgggaatataggaggagctagagtgtatgggtaccaaagacgaggggaaatgagctcagctagggaaaagcatcacccctgctgggggaagactttccagtgtggaggattgcggaggagcatcggtaacccctcttattgtgctctgtaaattcactagacttgttgatttcccaaagtgacctgtggtagaatctggcctcagtttgttagtttgttgttgggactttagggagaagagtaagtgttgtttatggctacccgggaaagaatttattaacagagacattgtttactttgaatagagtaggacttattttgatactaaatataacatagcaattatttatttggttttaaaaaagtctttaaagtttctttgtcatattctccctacataaatatatacctctatatatttatttataaacatgtttgtaggcatgctgatcttaaaaactctgttaaaacttttacatttgctatatataattttaaatagcctgtataagataataatactaagataggaaaatgattatagctttttatccccctccttttaagttattcttcctgtctttgtggtagcaatggccaatactgtgttgaatgggagtagtgaatgcttttaattttttaaatttagcgtgatgtttttggtagggtgctggtaaccagcttttaaggaatcaagctcagggatggagagatggctcagttgggaaagtgcttgttttgtaagcataaggagttgaatttggatcccaaaaaaagcatgggaaaagctggtggatctctgccagttctagtctagccagagtgagctggtgaaagcctgcttcaaaaaaaaaaaaattctacttgtattagggtaagatttctatttccctcccttctttgttagatgcgactagaacctggggccgttcatctgcagcatccactgctgagctacacctgggccctgtagtgaatgctttcctcctctggttatatttttgcagataagatcttactgtgtagcccatctgcctttgtctctcaagtgctgaaagttcaggtgtacaattacccagatacatgagtttttctaatagttattaagtatttattcttattgtatgcttttcaaatttcttggaaagttttccagctcttttctttaatttgtttatttggcaaatatttacatttaaaagatgtgttaaattatccctacttcattatgaccacccaaatgctgggacttaggggtgggctactatggcccactaagtgttagatttttactttgttagattgcctatatgtttgctgttctctgatttctaataagcatttatcaataaaatttacatgtgtatgaaagacatctcatcatgggatgagaaggagaaagagagaaagattgagactgaattattctgccaggttccaaacattgacatactgtgttagtatgtccgtccattttctggtattttggggaggatcctaacttgcaaggctctttaaagcctgatttgtaactgtggggaagaagtgaaatcaggaagccagatttacttcttaaagctttacacacttcattgagaaatttctgattttgttaaattaagaagcctagtttcaattctgtttttttttttttgacattttttttttcacatgaatcagacattccctggttgtcctttctgagaagtccattgagctggtctaaggtctgtagagacaagtgtagtcatgaggaccagccgggtcagagcagaacacccacgtgacttgtgggtagtcgggagccattctttctttaacatttagtagactcctgtatatttcacctcttgactttaccttccctgagatttcacagaaactcaacttcctctttccctgcactgaaaccactattcatggatgataagaatcccaccctcccctcgctgagggagaacggccacagcatagtgtttctgcactgcgcgtttgtggccacagcatagtgcttctgtactgcacgtttgtgacttgcttttgcctggtttttggttatgccatgcagtatataaaagaatgcataaaaattaaaataaaggtagaactagataatgttcaaaactcctttatttgtaaatcctcctctttaaaaaaaaatctaaacatgacaactatcaaagcttgcttgagatgtaactagccaagtcctttcactccagaagatgtggaaaaagagatttacattattcctccattgtgcttgatcctctttctctccatgtggttcatagaacagctgtagtcagtagatggttatacatttttgtgaaaggattttgtcctgtgcatgcatttgcacactccttactgaattttcaaaagtagggttaaaagttagcaaagtcggacagcactgaacatgtactcagtattggaagattcatagttcagtctgtcgagtgatttctcctgagaagctctgagcaagcatctgttcacccagatggacgccaatgacagtccacagaaaagaagtctaccaattctagtagcctagcgaaccaatgagcccgttgcatgagcatgggtgacttgggcagctgcatcactgaaaagcccaacccagcatgggtggactatgctttaaagctgtatccctggaatttcctgcacagttggtgggcgggcggctccatgaaagagccctcattcctcccccaaatcacttactgcttataggacctctgggggggggggctggggggggggatcannnnnnnnnnnnnnnnnnnnactgtcttgtgagttcacagaacctttctccctttgtcttctctgtttggggatgtttcacccagaaggaagtggccgcccagtgttttttcaagcccccgttcattttcaggtaggccaagcaccattcaggggaggttttggctgacagacctgtaggtatttcttttcttttctttctttctttcttttttttttttttttggtttttcgagacagggtttctctgtgtagccctggctgtcctggaactcactttgtagaccaggctggcctcgaactcagaaatccacctgcctctgcctcccaagtgctgggattaaaggcgtgcaccaccacgcctcggatggtacttattttcatattgggtagatggaaggtaagtcagcagtggactgggagatatgtaggagccccaaaattagggccaaacatctaactagtccaggaaacccaccaatgcgctctgcgcaccatagcaatgccctaatagtttcttggaggactgtcttctgctagtcattgttggt

SEQ ID NO: 282 - DNA, 2858 bp, Mus musculus
gctccaagccccttccgggtcccaaacactgatgccccctgactggctaaactaagccacgcatccctggcgtgagccacaacccagaagggagcaggtgggcttgcagggttgacttgggataacggaccagttgtggactactgctctcaggagagtgatgatctagctttggtagggaaggggaggggctgaggcgtgggcagggcagagcaaagggaccagagccagagcctggggacaggttttaccactgagctgttgcagtggcggcggaggccgggattcgtgccacctgtccgagtgccacctggtgagcgtggcgcctgggtccaggcccctcctcccgcggcttccctctctcctccctggcccacactcttccttggcctgggaacctaccacaaccgccatcggtgctgaccctcgtttccacccaattttcccccttctctcagaactcagagtatccgagggtccaaacattcgtccagcggctgaccaccatgccgcgctcattcctggtcaagagcaagaaggcgcacagctatcaccagccgcgttctccggggccggactactccctgcgcctggagaccgtgcctgcgccgggcagagcagagggcggcgctgtgagtgcaggcgagtcgaaaatggagccccgagagcgtttgtcccccgactctcagcttaccgaggctcccgacagggcctccgcgtcccccaacagctgcgaaggcagcgtttgtgacccctgctccgagttcgaggacttttggaggcccccttctccctccgtgtctccagcgtcggagaagtcactgtgccgctctctggacgaagcccagccctacacgctgcctttcaagccctatgcatggagcggtcttgctgggtctgacctgcggcacctggtgcagagctatcggcagtgcagcgcgctggagcgcagcgcgggcctgagcctcttctgcgagcgcggctcggagccgggccgcccggcagcgcgctacggccccgagcaggctgcgggcggagccggtgcgggacagccagggagctgcggggtcgccgggggcgccaccagcgctgcgggcctggggctttacggcgacttcgcgcctgcggcggccgggctgtacgagcggccgagcacagcagcaggccggctgtaccaagatcatggccacgagctgcacgcggacaagagcgtgggcgtcaaggtggagtcggagctgctttgcacccgtctgctgctgggcggcggctcctacaaatgcatcaaatgcagcaaggtgttctccacaccgcacgggctggaggtgcacgtgcgccggtcccacagcggcacaagaccctttgcgtgcgagatgtgcggcaagaccttcgggcacgcggtgagcctggagcaacacaaggcagtgcactcccaggaacgcagctttgactgtaagatctgtggcaagagcttcaagaggtcatccacgctgtccacacatctgctcattcactcggacacccggccctatccctgtcagtactgtggcaaaagattccaccagaagtcagatatgaagaaacacaccttcatccacacaggtgagaagccccacaaatgccaggtgtgcggcaaagccttcagtcagagctccaacctcatcactcatagcagaaagcacacaggcttcaagccctttggctgtgacctgtgtgggaagggcttccagaggaaggtggatctcaggaggcaccgagagactcagcatggactcaaatgagtaccctggcagcccgcaacaccagctgtgtaacactaccgtgagggatgtcttccctgcctccctccagccccttctcaggccctgagtccagtgtgcaaagctcatcatggttagtccccttcaccttccttcccggagctgctggaggagatgaactcccgtttctaaggtcaacccagagtgggaaccgcagcagcagcagcagtcgtctgtgctttgggcttccctacagctgaagatggggatcaaatgagatcttgcacctcccagttcttcccttttttgctgtctcacaggccagaatgaactctgggcagctgctacaagaggaggcatcacctcttaagctttgagcgccactgatgcatttattgagaacgaatgaacattaattttctcttctggggagactgctgactcctttatcctccaccagactctggtttagggaaggaacctcgttcctttgaaatcatcagatgcaccatcaagcctgccacgagaagaaggggacttggtgatgagagggagtcagaggtcctgtggtgccatcagaggaggtgaagctgtggagcagctccggggaacagggtcttcacttactcagcgagtgattattggccgcaggttatcagagtaaggaactgtgctaggtatgggagagccagagattaaagtcataggccctaacccccaaaagctatcagttggacttcaacatagctagagcctgtgttctgtgcttccaagggagttctgaagaaggccacacaaacattgggacttctttttgacacttacggagtttttcaagtgtaaacaaataggaactggaggattatttctaaagttcatgagtaaatccagcttttattgttaggtgggactttattagatgcctgcgctgggagatgtggggtgaaggctatggcctcagctcctgccccttatcatcttaggaacaacttatttttcctgtgagggttgtagacgttcctaaatcttcttgagtgcattatgtattagcataatcatatttattagaatgttgttttaacttaataaagtattaagatt

SEQ ID NO: 283 - protein, 476 aa, Mus musculus
AWRLGPGPSSRGFPLSSLAHTLPWPGNLPQPPSVLTLVSTQFSPFSQNSEYPRVQTFVQRLTTMPRSFLVKSKKAHSYHQPRSPGPDYSLRLETVPAPGRAEGGAVSAGESKMEPRERLSPDSQLTEAPDRASDNSCEGSVCDPCSEFEDFWRPPSPSVSPASEKSLCRSLDEAQPYTLPFKPYAWSGLAGSDLRHLVQSYRQCSALERSAGLSLFCERGSEPGRPAARYGPEQAAGGAGAGQPGSCGVAGGATSAAGLGGDFAPAAAGERPSTAAGRLYQDHGHELHADKSVGVKVESELLCTRLLLGGGSYKCIKCSKVFSTPHGLEVHVRRSHSGWFACEMCGKTFGHAVSLEQHKAVHSQERSFDCKICGKSFKRSSTLSTHLLIHSDWYPCQYCGKRFHQKSDMKKHTFIHTGEKPHKCQVCGKAFSQSSNLITHSRKHTGFKPFGCDLCGKGFQRKVDLRRHRETQHGLK

SEQ ID NO: 284 - DNA, 32083 bp, Homo sapiens
  misc_feature (1)...(32083): n = A, C, G or T/U
taatcccagcactttgggaggccaagccacgtggatcacttgaggtcaggagttcaagacctgcctggccaacatggtgaaaccccatctctactaaaaatacaaaaaaattagctggtcatggtggcaggtgcctgtagtcccagctgctcaggaggctgaggcacaagaattgcttgaaccttggaggtgaaggttgcagtgagctgagtttgtaccatggcactccagcctgggcgacaagagcgaaaccccgtctcaaaaaaaaaaaaaaaaaaattaatcaggtgtgatggcgtacgcctgtaatcccagctactcgggaggctaaggcaagagaattgctagaacccaggaggcagacattgcagtgagctgagatcatgccactgcaatccagcctggatgacagagcaagactctgtctcaaaagaaagaaaaaaagaacgaacctgaacaatagaaaagttttcctagatgagcaacacaactcctttctagtgtagaaaacagaaaggcatgcactattctatatgcagataagataattcttattatctgaaactcagatctcctgataaaacccttttggctaatcactgtcagaaagatttgatatttacaaaataaaatatatattatatttgcaaatttacatttggtaggtatctggtaggtatttttcatcttttaattgatttagaaataacaatgttataaaagtcactttgtttaattaccttcctgtacatcacaaataatcctggagggcgtgacaggaagtagccctactcatactaataactcttgattaaattaagatttttttctattggtgttaatgttttaaattttgtttaatgttaaaattatgttgatgtcaaatctagttggattatttggaagttcattgtacccattctttaaacttttctctatttgcaaatttggggaaatactattttggtcctgttctatggatgtgaccttgtagggtctcatttgtgtgctatgcagactcaaaacaatttcctggggtaaagcttacacctgactttggttttcccttgtgggtgagaaagcctttgatacaaccagctgttcttaggtacctcagctttcacaacaggtcaaacctacgtttgaattgtctattaaggcatatggatctgaattttaaacaacacagaatagaattccaggatttcgctgagagtataatctcatcctgtcatcaaatatttattaaaaactcagtaaggagaagcaattttcagagaggattatttgaagcatataaggattatttcagacagtctagtctcaaacacatccatggattaaaccagatcagtagacagctggtaccttgctagacagtgtcatagtttcccaaagtatagtttttatcaaattgcacttttgtgtgatgtcaacaatgtatattgagtgttatgggaaataacatttgttgcatttattttaagattgtgtaagaacactattaatttctatcacaataactactttttaggatcgcagtgggaaatatgtctgttcttcctggtaccaagaacagttaatagtcatagttatctcaattttgtgattaaggagagaagtggggaaaggagggagggaagagagggtaagaggaagggagggagggaggaaaggagggaggaaggcaaggaaggaaggaaggaaggaaggaaagaaggaaaacatttccacctgccctccaacttcctcctcaaagaatcccagcaaaaacaatgagtagtttgggttagagaagcattgtggaatatgccaaatgctttctacaatccaaactgctaaatgcttctcaaaccagaggcaaaaatatctttgtgcaaaaagtagatctcgttattctgcagccggtagaatattttgatgctgcaaaatcctaaccccagcctcatatcaggtgggtttcagaactatagtggcaactgtgcaaagtgctgactggtcaaaagaaaagtcttgtatcccaggccagacagccatctcagaggcctgggataggagggaaacattctttatttatttgctcctttattcaccttccttgctacattcacttctgagtgagttgaaggagagcagagaccccatatccaatctatgtacctcacatctggcatggcgtatgacaaagattgttcagtaaatatttgttgacttgaactgtacaactgagtccacaaactctgtcctcctttaggacatgtgccagcactgggactttccattcctcaggcctcagtgactgcttttaaaccaacctccacactggtcacccctgggtcagcatcctgagcagagtttatgcctggtgtttccttgtctccaccaccccattatttcttccactatcgaacaaagtgactgtgaggtacatgagcaaatctctgatttgtacagaagctctgttcattctccagctgatgaggggtggggggtatgtgtacgtgtgtgtgtgtaggtggcgtgtatgttcatgtgggttttttgtttgtttgttttttgtgttttttgttttgttttgtttttttcagatggagtctcgctctgtcatccaggctggagtgcagtggcacgatcttagctcactgcaacctccacctcccagtttcaagcgattctcctgcctcagcctgccaagtagctgggactacaggtgtgcaccaccacacctggctactttttgtatttttagtagatacagggtttcaccatgttggccaggctggtctcaaactcctgacctcaggtgatccacccaccttggcctcccaaagtgctgggattataggcttgagccactgcgcctggcccttcatgtgttttaattaaagctcaaatgaaaactcatgacagtccctactgataaattgctccttgccagacagtaagaacagttgagaatattttaggaagaggcaatgatcccctagcacttctctaccagcctcagctcagatgaactgcttggctttatggggacacagaccatgacagttggaagtgatccttggaaagcctcctgtgggagataaggtccaggagctcaggaagggagcctgagtctctcaggtctaattgggatatcagaaatccatataaaaatggccggtcatggtggctcacgcctgtaatgccagcactttgggaggccgaggtggatggatcacctgaggtcaggagttcgagaccagcctggctaacatggtgaaaccccctctctactaaaaatacaaaaattagctggacgtggtggcaggcgcctgtaatcctagctactcaggaggctaaggcatgacaatcgctggaacccaggaggcggaggttgcagtgagccaagatcgcaccactgcactccagcctaggtgacagagcgagactctgtctcaaaaaataaaaaataaaaaaaaaaagaaatccacataaaaatgcttcctggcaagtctcaggggctgcctgcagtgcacaaagctactgcccctacaatgggaggccttgaggcctacctcctgcagcagtccagggtcaggagtcaggctggcctgcgttggaatcaggactctgtccttctctggctatgtgatctggggaaggcaagcctctctgagtctattcccacagcctgttcattgggatggttagagataatgtacataaaaagggccgccaatagtgcctgttgtaatagtgacaataactaacacttagtaaatgcctactctatgctttacatgtattaactcattgaatctgttccagaatctatgaagtaggtgttgttattgtaaccatgtttgcagatgaagaaactgaagtacagagaggttaaggaacttgtttaaggatagaagaaggcagagccagaatttccagacattagaaatctggcttagagtccatgctcttaattgctacactcttctgcctcttagctactgtggtatttataatttttcttggcaggggtgtaattattacaatcattcaggaaaataatttctcaatatgtgtccatagacttgaaaatgttcctagcctttagctgggcatggatgctcacacctgtaatcccagcagtttgggagtccaaggcaggaggatcaccttgaggccaggagttcaagaccagcttgggcaacatagtgggcctacctctacaaaacaaacatacaaacacataaaaaacaaaacacaacaaaaaggaggttcctaacctttgatccaggaggggaatcacttctggttatgaatcctaaagaaagaatcctacatatagaaaaacccaggtacaattaaaaaaaaaatcacagcatcatttatagtagggaaaaagggaaataatccaactgtccagtaacataataaataagatcacagcacatcatctaaatggacaattatacaatatcatcatagtagactctttttttaagactggggggaaaacactctgaaatattactagaggttgaactaaggtagtgagatatggagctgtatttttactttttattttgtctactttacaaatgttctattgaattaacataactatgctgctttcagcaacttaaatactattattttctgacctttggatgagcagcatgcctgccaagtccacactgttgggagtgatgggttgggccttgcagcaggagaggagggaatgtgtctctcctccaccatcccatccttactacctctcaagtctgtgacaggcacgtgacttttggctccaggcttttctaccctatgctggatgtgaaacaagtaatgtgatttggtggaaagaaacaatatttggaatcaacagatttggttggaataagaaagctgctagttatcagaacctgggcttcttaaaccactggtgtctcccccttttttttttcccttcctttcccacgtatggaccactggtgtccttatccataaaacagaaatgaccagaatgcctgccttggagaactcccagcatttctttctcttctatgaagcccaggatagcagctgaggtggaacatccagtgggctgcatctacctatcatcagttcatgctgtccttctgtctgtctctttgggcgagcctgaggttgttcatgtgggatgatcctccaagccccgcctcatgcagacagcagcggccagagattttcagaagcctcaactcccaccttacctccagatatggggtcatatatttcctttaagggagttgtgttttgtgagtaatttttaaaatttacaatatataggctgtactattttaaagtgaagtgtttcatctggggtagggtgaactaatcaccaaacatactggaggaaatggtgaaaaactcaaaagaaagataatttttgcattttctctcgtttgattttccattcacaaagcaaactatactccttttttttcctataaaagttcacactggctgtgtttctatgaggagtcatatcacatagctcacagtaagatgacacttcgttcaatctattcttaggaacaatgtaaaaatacgtatgtggtgagattaacaattttcttatttgaactctgaacaccaaagctgacagtctcctccctcttcagatgtttgaaatcctttatgtaaaagcctaatttaaactttatagtaatagataatatttttaaatgtaatgagatttaaatatatcagtcccaaaatgtttattaaaagcaaatgtttttcttcatgtttgaaaagtaaaaaatattaatacaaagttggttcttataccttaagtcttctattaacttatctccatgtttctcctttacttaatttcccaatttttgcatgagctggtacaaaaaacattacccacttcccacaaatgatggtaccattaaatcgtattctgacttatggtgtcagtggaattctattttgatagcctgcttcttataagattagaaggggataattatattacctgtcattcaagttaaggcatcacacagttatcagtttgcatttattttctttgaattaatacaattaaaatatatgtaattcttatttcagtttgactacacctatcatgacacctaatccaaagacaaaaattaaatagtttgttagtatacatgaggataaaaccatggcaatatgacagggtgtggttctaacaagtacttcctgtacataaaataaagaccagttctatatctggtctttaatccaagtcaaacttttccttagtttatttttgtagtcttttaactgttaagtggtatgaattcttttggcttatgcattacataagcgccatccataaaacttgttctggtatgtatcaaggaccgtacaaataatcattgttggatctagaaatttcacccctaaaaatatatcctaaggaaataattccaaatgtagggaaagctatattcaaaaatcttttcattgtattacttaaaatagtaaaaactcgaaacaagctaaatagtaagatgagagtgattgagtaaattatagtaaactagctgatagaacttttttatagcaattgaaaatgaaagattgtatataaaaagcaaggaagatgattgtcatgatttttatttaaataatttttactataaaaagtttatattccatttaagaaaacaggaaaataaagagaatagaaaaaagaaaaataattataatattcgggaagaaaagcagactactcagttgtatctgtaatacgattataatttttgttaaataatagagcaagaatacttgaaagttgttttacagagttttattcttttcttatcagatatatgtagcataatttgtaatatagtcttatttatattattatttataatatacaaataatatagcataatttcttatacgtttatatttaaaactcagaaaccctcatttggagcattctcccattcttgctgcccaaatgaacaggtaaagagtgcaaattaaaagattgttccagctgggcattgtggctcatgcctgtaatcccagcactttgggaggctgaggcaagtggatcacgaggtcaagagttcaataccagcctagccaacatggtaaaaccccgtctctactaaaaatacaaaaattagctgggcgtggtggtgcatgcctgtaatcccagctactcggcaggctgaggcaggagaatcgcttgaacccggtaggtggaggttgcagtgagcagagatcacgccactgcactccaacctgagcaaaagagcaatacttcatctcaaaaaaaaaaaaaaaaaaaaggttgctccacagtcttgcgtggtaggtaccagtattccgactttacaggtgagaaacaggctgagagttgagctaacttatccaaggtctcaaagctggtactagcagaacagagattgacaatcacatcttactagcttttgaatgcctgaactcttttttcccttcctggtatcatcatggtgagaatcaaatgaggcaaacatagaaatgtattctggaaatgggggtattgcccctccctggggtttcaggatcacccacttttcccatgccgtcccacaaaggacagagatcataattgtaaagctttgtgaaaaaataaacaagatactggtaatatcctgttacaattttctttttgaaaatgtctcagccaggcacagtggttcacgcctgtaatcccagcattttgggaggctgaggcaggaggatcatttgaggccaggagtttgagaccagcctaggcaacataacgagactccatctccactttttttttttaatgtctcaaatcttctgttgtagggaaattctgatctatgagaggctgcttgaaataaatgggctactggccaaggcttggaaatgtttgtggtatgagaaggtcagttgttatttggcatcgacagatacattattattgctatttagaaacaattagtttctaaatatttgaaacaattagtttcaaattattgaaaaggcagtaaatgtaaaattattcctttggaaagaccctatttatagaaaattgtgcctcaggtatacattttgcttaccattagatctatttcaattccaaaggaatatatggagggagagggagtatttgtagcttctaaaaatgttcatggaggggtggcttattctctttgcccttagtttaatagaagcaagaggtagtttggagtagcaggaagtcagagatgggttcattgtatcgttatttctagtcctagctcttcactgtccttggcaaggttcttaacctctctgggttcccctcttcttacctttctcctattcttccccaagtgtgggagtcacacttcaacactatacacccgggagtgttgtgttgttaaaaagtattgttaaatactttttaaacgtgttgaatacttgttaaatactttttaaatgtgtatttatttatttgagttagtactacatacacatggttcaacatgtaaaagacataaagggaaattcagtgccatctccctcccacctgctcctttctgcgtgtccctgttccagttctcagttttctttttcaaactcagaaatcccaagaatctgtgaagggcaaatgaaaagcaaaatgactagactaaatctgaatgaaagggatttattctaaggtgatactgctcactgctcaaggtgcttatctgcccccttcatgggctccctcaagttttctgagacttcaaacagcaacactcaactaaactataaaatagtcacagcaccttttcgagaaattttgactttgaacttgctaatatgcaaaggaaatagtccaaccatttctctagaacttggttgataagaaattttattttgtcccatttataattttattctaaaaatttgtttttttctgctatcgagtaggagagaagggaataagggaaagatttgtttttgcactactgtgagatttttataccttaggccaggacaaagcacacaagaaataaaatattaacaaaatgtccttaattttcctttctgaccaaaattgcttgcctctgcatttatatataaagaagggatgtgttgagcaaatgaaggaggacagctaggcagacaagatttgcccagcgcctggcatacaataggggcacaggtcattgcttaacaaaacgtataatttattaatacatgctcgaagcactgctatactaaccaaatattccctgcaaaattttaaatttacagtgcaaaataagaataatttaaaaactgtttctagaaaaagagctttaagggcttcccccccataacaatttaagattaacctagaacatggtagttattttgcaagaactggggagcaccactctcttctccttgtgcatgtctgacattggaggcctattgtgcacgaagttgtgatcaaaatccaagtcaattcattttgaaaagtaacatgactacaacatccatccactccaatgagcaaagggtgtaggctttgagtatacacagcaggccacacactatgggtcatggcatacagtctagcgttggaggttgctgcatttgttcatgtatctatgagttaggttttaagttttttccccctgttctattaatataattaattagttaattaaccccactcattcatttactcagtccacagccttttgttaagagcccgcctaggacataaagatgaagatccagtgcctaccctcatgaaacatagaatccgagcgaagaaggcttactttgcaatagtcatccaagtggtgcttttatggcgctttactgctcccgccaacacccagtgcctgggtatgacctcaggcggtggcagagcccgcgtgcgaggtcccgctctccctggcttgccccggcagggcggagtcagcctagcagccgccggcgctgcccccgcgcggcctttaattttgcagctccgaccaccggaaattagtcgaaggctgagcggacccggtcgagagccggcgagctccgcgcagggagggtgcgcccaccggtcccgccgggcgcccgcgggacgcgccgccagggccctctccgccgggggctcggcgctcgcccacctcttccaaatttaaccattacctaaatccgaagggaaatgagcaaacctctcggattgggtgtcaaggtattttcagcctcgttgggcgtatttatccccaagtgtttccacaacaagctatttcggggccgcggggcaggtttcgctctgnnnnnnnnnnnnnnnnnnnnnnnnnnnnnnnnnnnnnnnnnnnnnnnnnnnnnnnnnnnnnnnnnnnnnnnnnnnnnnnnnnnnnnnnnnnnnnnnnnnnnnnnnnnnnnnnnnnnnnnnnnnnnnnnnnnnnnnnnnnnnnnnnnnnnnnnnnnnnnnnnnnnnnnnnnnnnnnnnncgccccccacccctctctcgccagtcaatctgtgtcctcaatctgtggcttctctcgctgcggaagtctccctggagccaagaatagttcattttctttcaagtcatttctagtgcctaagtgtccggacctccaatttcccccatcccctgccgacccacagggagagaactgggaggactactaaggggcgcgcgggacgggctggaaaggccaggccccccaccgcctggccacttgcgcaaaggagcgcgcccggccgcccgacgggggttgggagcaggtctgggagggctatgcgagcgactcagtaacgctcaggaagtgaagcttgtggttttgggggctgagctcggaaggagaattttttttttttttaagtcagagagatagagcggtctctcccgaaagcaagattccgtttgaaaactctcctagcgcggtgcccgcgccgtgactccgcaggtaggtccgccgagcctgttctgcgcctcctgccctggtgggggcggccgcggggactcgcagagcactggcactgcgggggcgatcagagggcgcgggcggtttcccacctgctgcggaccgccgtgcgggagcccagagagctccggcagctgggttagggcgcgacccgcgcagtgtgactggaaatctggagctgggggcgcgcagcaggcggtctggtggttcggcaggggagccaaatccaccagggaaggaaacatctggtggggaggcggcggcagctgcgctcgggaggacgcccccttagcgccctcggctccctccttcctgggcccggacggtgaggagaggcctgagcgcgcggaggggccgccccacctcccgcgccagctgcagcgcggggttgccttcccacgcgctcggcccaggccccggggcccctatctcctccaaactctgtcgctccccacaggaaccagcaaagcgggccggggtgcgagagaggcgtgggcttacagcccgggtggggaggcggcctccgcgtccgcctggtctctggtggcgccagcccagacccagctccggcgctgacagttaccccgcccccatctgtcccgctcccagccaacgtgggtccaagctgcagcgggaccctcgggacaacgccactccgtttttcttttcttccgagtttcgtggctgtttaaagaattgggtttggggtttgtggcgtctaattgtacggacgagaagtgcaggaagcgacaaagctctagccctaggagccaccccggagggaggcggatggcactctcacccctaggggcattctggcgcttgggtagcgggaaacttcgcgggagccccgcgacacgtcccaggcgtcttttctcccaggtctattcccattcctccggagaaggggacacaatggggctggggatctggagcagggggcctgcaccctacagggaccaaggcctgtaggactcgtttgagctgagagcgccaacggacagacgtagactgtgtggcctgcatcttgcctaggaagccgaggggctcctagtccggcagtggaaacagcgcgaagccggaggactgcaggtcctgccccggcccagagttcccagcaccctcgtttctgaaccagccgaggccacggagaactgctgtactgcagctcacgtgtgaacccggtcaccatcgccttcaccccgggaggaaggcagattcgtttactccagaccacctcgactgtggggtaccgcccccggagccggctggagcctagcggcaggcgcagccacgccctcccgctgcgctcagatttcgacctggtattaggtgaactgattgggggttaatgagagcgacgccccgggcagctagttccctcccgggcccgggcccgacccccgctctctgctaatgcagcctgcgcgctctggcgtcctgtcttttttgtctgctaaattgtcggtgcactaccgactcgggacacctagcatttcccagtcaacgttcgtggatcgggctccacctccctaggacaagattttttggtgagcagaacggaaagtgcttttttcccgggacctgattcccgaggttaggtctccatggtctgggatggctcgccgcagcctcgaccggtgcccgccgcagccgggagtccaagggcaaagtttctcctacgtggggcactagtgaggggcgagtgggatcacccagatgcgagtttctcctggggcgggggttggtcgtctgttgttcccctcactttcctgtccctttgctctcccacctcctttctctggcctctgctgtccccaatccctctgctgctgtcctcccgccgccccacagttttatcttgtgttctgttcccccctccccccggtcctttcactccagttggtagctggctcttggaggtcttggctccttgccccttccgggtcctcgaccactgggcatccccggcccctaaaccgatccgcgtgtccccgccctccctcgccagccgtaaagcacagccaggcaggcgatgagtagctgagttggggtaacccacccgatgggaactacagctctccagggagtttgattgccggagcgagcttcgctaggaaaggggaggagctggggggcgtgggcagggaggaggaaaggggcctgagacagggccccgggacaggttttaccgctgagctgtgtcagtggcggcggcggcaacgacggcgggttcgcgccacctgtccaagtgccacctggtaagcgcggcgcagcagggtcaagcccctcctcccgtgggccctctgcgcgcctccctggcccgcgctctccctccgcctgggtgcccagtccgccgcaccggagagtactgacccacgtctccacctggttttctttccctctcaggtctcctccgggctggggctgagcaagccctcggagtgaccgtgggtgacagcggctccagggactcttggggcgcagtggggaaagtgccggaccaccatgccgcgctcatttctcgtcaaaagcaagaaggctcacagctaccaccagccgcgctccccaggaccagactattccctccgtttagagaatgtaccggcgcctagccgagcaggtgcgaggcgcgcgcgggccaggcggggctgctcccccggatgcctactgcacctcggcacaccattagtccggagctgggaggggctgccccaacgtcccttttgctgctgtttttgtttcctactgtcctggttcctccgggtttgtctnnnnnnnnnnnnnnnnnnnncctggtcgggggattgggggagcttttcagcaccctcagactcaaccggtcccagcttgagcccctcacctgcctcctctttgcagacagcacttcaaaatgcaggcggggcgaaggcggagccccgggaccgtttgtcccccgaatcgcagctgaccgaagccccagacagagcctccgcatccccagtacagctgcgaaggcagcgtctgcgaacggagctcggagtttgaggacttctggaggcccccgtcaccctccgcgtctccaggtaggaacccactgggaacctcttgggcgggagctgcagggacccggcagtgctgggggggaattggcgcgaccttgggcgtagaaatgctaacggggagttggagagtctttccgggagaagggagctgattcgtaggggaaggaggcatccggcttctctgggacttggacagcttgcccgctggggctgctgcctccatcccaggcggcaggaccctagctgcttgtcgcttagattcgtttgcgcggagctggccagtgacggaaaacaaaccagtcgtttcgactggcggcaacgctgacctttcattttctgaccagacctgactgttttataaagtgctaggatcctgcaatctagacccccaaacctcaaacagagaacagggcagaacgggccaggcagaggagctaggcgctgggcggcagggaggggggcaggacgaaaatctcagcccgcggcttggtcttcacaggcgcagattgggggcctgtttcatttttcgttttgccgggttaacctagcctcaggggcctgctctctgggtttcatttccagcgagcaatccagcttcaggcaaactaagtgaccacacgttgggtgggggcgtctcgagtcccggccgggggaaggaatgagcagaccagccggattctgtcaagggccggttatatccagaatatgtttgctagttttagaagataccaccacccgtcccacaatcagtgagttgacttggcgaaaaccatagctccagcaagtgtgtctgggagccggcggcgggaggattcttcctgccagggcgtcaagtggccagacaaggattgggcgcgccccgaacccctccgaacgaaactccgggtacagcctctcactgaagtggccagcnnnnnnnnnnnnnnnnnnnnnnnnnnnnnnnnnnnnnnnnnnnnnnnnnnnnnnnnnnnnnnnnnnnnnnnnnnnnnnnnnnnnnnnnnnnnnnnnnnnnnnnnnnnnnnnnnnnnnnnnnnnnnnnnnnnnnnnnnnnnnnnnnnnnnnnnnnnnnnnnnnnnnnnnnnnnnnnnnnnnnnnnnnnnnnnnnnnnnnnnnnnnnnnnnnnnnnnnnnnnnnnnnnnnnnnnnnnnnnnnnnggtttattcaggacagcagcctttcgggtagttcggggccgcatttatggaaccttctccctccttcctcgtggtattctgggaagaaaaagaattgaatgggaacatgtaggggctgggagagtgcctgcgctggtggctggacccttccgcccttgagtgctgtgaggggccgaacggccgccgccttctccttcttaacagctcaactacgggcatttatagatgcgcccttccctgtaggatctccaggtgcgcgggtccagccagaaaagatcctcggaacgccgagcgcctccgctgcactcgcacagaatttacgacctcctctcccgaggtcttttcaatgatctgtttactgttctgcctcctatagtggcctgcgaggccccagggcccgggccacgttttaccctggggcgagcctggcacctggcgcacgcagtgttctacaagcgctgggtgccccgcagtccgcgaacacgccacgctcgcagccgcagcccggcggcctccgctctgccgtctgaagcctgaccggacgctccccttgtgcctccacagcctcggagaagtcaatgtgcccatcgctggacgaagcccagcccttccccctgcctttcaaaccgtactcatggagcggcctggcgggttctgacctgcggcacctggtgcagagctaccgaccgtgtggggccctggagcgtggcgctggcctgggcctcttctgtgaacccgccccggagcctggccacccggccgcgctgtacggcccgaagcgggctgccggcggcgcgggggccggggcgccagggagctgcagcgcaggggccggtgccaccgctggccctggcctagggctctacggcgacttcgggtctgcggcagccgggctgtatgagaggcccacggcagcggcgggcttgctgtaccccgagcgtggccacgggctgcacgcagacaagggcgctggcgtcaaggtggagtcggagctgctgtgcacccgcctgctgctgggcggcggctcctacaagtgcatcaagtgcagcaaggtgaggctcccgagctcaccacctcgcctgccgtgcgcccgcttcccctacccgcgcctcgcctgcgccccgcggcccctctcagcggccttctctctggccccacccgccttaggtgttctccacgccgcacgggctcgaggtgcacgtgcgcaggtcccacagcggtaccagaccctttgcctgcgagatgtgcggcaagaccttcgggcacgcggtgagcctggagcagcacaaagccgtgcactcgcaggtaagcgcggggcgcaccgccgcgcgcggccctgctcggggatcttctgcatctcctcggtgcagcaccagccactctctgcctggaagttttctcctcgacttcccccagtttcctcccccaagccctccgctgcgtccccttgccctggtgcaggtgtgtagggaaaggaggattgtggccggctcaggccttgaggcagccctggattttggtgtcacaccactgtgagcctcgagagtgtgatcctcattgttactttgggcttgaggtaggtttgtatgcactgattcgtgctgctgatatatcagacttactagctctgtttctttgtgcctattcttttcaccaaatggttgtcacttaatttgcattgacccctctcgactgaaaaggcgggaatctcagctcatttagagcatctagtagcatattcaccccgctattcattctttccttccttcctttcttttcttttcttttttcttttcttttctttcagagtctggctctgttgcccaggctggagggcagttgcacaatctcagctcactgcaacctccccctgtcaggttaaagtgattctcgtgcctcagcctcctaagtagctgggattacaggcgcatgccactacagcacagctaatttttgtgttcttagtagagacgggatttcgccacgttagccaggctggtcacgaactcctggcctcaagtgatccaccagcctgggcctcccaaagtgctggggattacaggcgtgagccaccatgccccannnnnnnnnnnnnnnnnnnnacaggcgtgagccaccatgccccaccgccgctatttattcattcattcattaataaatatttgttggctaacttccaggtgccaagtacttaagaatcttataacacatcaggtccttgacagcatgcccacatgaagattatagtttagctgagagacggagagtagatgagcaagtaaatatgccaatagctatctcaggagaatgcctacttacgaaggctaaaaagagtattagcccatctcccccagcacccacactggctggggggaggtggcatctcaagtgactgaggtctaagcctcctgttgaggagggtggagaagtgtgtgctaatgggtgtcaaaaaaagcagggtgtggatatgtatttgccatggggtgtggaaggttgtgggtgaagaatgttttggtagaaaaagtgttgaagggccaggcacggtggctcacgcctgtaatcccaatactttgagaggccgaggtgggcgaatcacttgaggccaggtgtttgagaccagcctgaccaacatggtgaaaccccatctctactaaaaatacaaaaattagtcaggtgtgatggcgtgtgcctgtagtccctgctacttgggaggctgagacacgagaattgcttgaacctgggaggtggagggtgcagtgaactgagatcgttccactgcactcaagcctgggcgacagaggagactgtctcaaaaaaagaaagaaaaagtgttcaagggattttagggtcagctgaggggtgaggagagcagcagtctagttgactgcagtaggagttctgcatctctctctctctctctctctctctctctctctctctttgcaggaacggagctttgactgtaagatctgtgggaagagcttcaagaggtcatccacactgtccacacacctgcttatccactcagacactcggccctacccctgtcagtactgtggcaagaggttccaccagaagtcagacatgaagaaacacactttcatccacactggtgagctaaaaaggcccttggcttgtaggaaacaccctgaggccaacattactcatcttctctgatttctggccccagtgagtggtggatgaggcctttctgatggagttattctctgctctgtgttaaagaaaacaaaggggtgggttctttggttcatttaccggcataattctccccagagccaccttgatttggggttgtgtctgaaaggccactcagcaggtcagctcacaggtactctatacttggaaagaacattttcctttaggttagcagctgcttcccctgctgcctgctctgggtgaaatatgaagctccagggtcctcttagagagttgctctaaagcttacctagagattgaggactttccctaaccacctggccttttgtgggagggactcgtgtggactctccggctgcattttcaggagtctgagagcttattctgattgaagaggaacaaataatggcaaatatgattaaactctctgctaagcattttttaaatgcattatttcattttatgctcacaacaactctgagaggtagcgactactccttctccccattttagagatgaaaaaaatgaggctaggtaatctgcccagggtcacactgctagcaaatgacagggccagagctcaaattcaggtctgacctctcaaatgttcactcttgaccactgtttattgtattttatgttcagagtcatgaggttggtagacagaaagcttctgttcacttattgcccttttcaaaatatctgcaagttaatgccataataatgataattccttacctattataatgctttataatttacaaagtactttcaaatctatcatttcatttgattcttattgccactcaagaaagtagaaggagctgctcttaccatcctgaaactcagaaagagtgaatgatttatcagaagtaagactgaatgaataatgtagccatgtaatgctctggcttttaatcctggactgtttgtctaacactttatgtgcgggtgggagttttaatgccaagaacactctaatagtcaaaagacatttacatgagacccagaatttctgaaaattttattgcagaatatgaatactgatttagaacaaatcacagtgtattctaaacacccacccttgatgtttataaatatacttgggtaatgtatatatttccattgaaaacccagaaaagtattctactttaatcattccctcttacctgaaatttccatgtaattcactccttataagtaaggtattcaggacacttatcaaaatgcaactaggatcttgactgaataaaacattaagcccttatcaaacatttacgttatacctagaatttgttttctcagatttgtttgaccctaaagggatagaatacattttgatgggtggtttcttatcaaggaaatctgaagcatgaaaacagaaaagagtttttagcaaggaggacagagggttcctcaaaaacaaacttcatctattttatactttttccaaggctgagccctgactataatgccatgctgggctattggaaattcatgccatttacccaacaacacatgagatggggaacaagacaaaaccttcttgtgttctcttatttattaatttgtggtgaagaattgctggtatataaagaatcatgtgattaacctcataaaattaaggaaaaatcaagacagtaaagtatcagctgccttaatcctttgtggcccaaatgtggatttttaaaataagatattgaaaaacgtatcctgcacatgtaccccggaacttagaaagaaagagagagagagagagaaataaagaaagaaagaaagtccatgttaagatgttttttcagatataatctgctgtccttcaagaacaagaaagaagacgggctcactgatccatacaaactaacacccacttggaaattcagatttgaaaacttcctctgaattagaacggagtcacacggttttaggacagcttccccctccccttcctgttgaacatctgctctgagtgttcatggcttataaagtcaggggagtcctcccggggtagattcagctggggagggcacgtggcctttgctctgtttccgtttagcaggaaaccgtttgaggcctttggctgggaaccccccttcagaaagtctccctttcacctggtgcccccatggtgcttccagggactcgcattgcaggctgggagtcagttcaggttgcaacacgtcaccctccaagttgcttgaaggccttagactgtggtgcaaccagctgctgccaagagcatgtgggtcacagtgggtcccctctagctttatcatagactcatactttctcccctccccctcccatccccacaggtgagaagcctcacaagtgccaggtgtgcggcaaggcattcagccagagctccaacctcatcacccacagccgcaaacacacaggcttcaagcccttcggctgcgacctctgtgggaagggtttccagaggaaggtggacctccgaaggcaccgggagacgcagcatgggctcaaatgagcaccctggctggctgcaagcagcagctacacaacactacagagggcagcctccctgcttgccaccactctgctccctgcttgcctccactcccttctgactttccagaccccaggtccagtctgcagatcctaccaggttgctcctccttcgccttacctcctggagctgccagaagaaatgaggtaccttttcaaagtgcagccgagagtgagaaccaagtgactctctaggcttcggacacaaataggctcctctacacctgaagacaaaggcaaagtcaaatggggaccagaataaatcttagaccccacagtccttcccatttccagccctaatctacagacaggaatgcccttcaggtttcttccctcccccctcttgacctaccccagatatttgtgtggaagaggaggaatcaccatttacaaggtggacaaatgctaatatttttatctagaaagaagagtgagtgttaacttttatttttttccttctggggggtctgttgactcctttcttttgggtgctgcctataaatcttggaggaatcatttctcctcctcaaaaactgattcagaaactgacttggggaaggaatttaatactttgaagtcatgagatgcaccatcgaggctacccccaagaagaagcagaagagaagttggtaatgagaggggattagaggtcctcccttcagtagggctgtgaaaacctcatcactggaggtaaaagcacaagcaatgcctgtggacaagatgtcattcattcactcagcaaatgttcatggatcaccggctaccaaggtaccaggcaccatgctaggtattggggaagagagactgaagtcacaacccctgactgctcctcaaaagctaacggttgcacctccaagtggctgggtctgttcttactcttggagggaattctgagaagacagcacagaattgtaaaccttcccttttgacccttttggattttatcaggtgtaaacaaaaagctgaacagttacttcaaagatatgtgtgtatattcagttttttattgttaagctgatattttaaagatttctgagctagcaggcatgtgggaaggaaggctctgtcttcaactctttgaccctccatgtgtaccatagaggggggaaaggtggtattttcactttgatgaggttggtaaatgtttttagatcttctggtaagcattatgtttgttaatacatatttattagagtgatgttttaagttaataaagtattaagagtattacagattgcctttcctttaggcagggaatttggggaagacctttgttttagtctgtagggggaaagctggcactgaaggaaactgcaatggagtataaaagtgaagcacacaagctaatatccagaagagtaaaatccaattgctcgggtttccatatactttctcctttgctgctacacctcagagatacttctttcatcttctttcataagagaaaaactaggaggtgtacaaaactaagctactaccttgtagagcccctgatggttccacaggcacgtaagtaagctctttcctctgaaaatgtcaacatatttttttaggggcctgaaggctcccagatgaataaagaaatcacaggtcttaggtctaggttttagttttagtcacagctctgtcaccaacacatcatgtgacttgtgtaaatcttttgacttccccgatactggtttccttgatcaagtaatacggagacagctctgtcattcctgtccaaccctgaccgctttgattctgtggagactggaaaggaaaaaaagtgtgagattggttagctgcctcccctaatgcaagtcacaaatctaaaggcccatgaggatctgggttatttctggttctgtcccacctgtgggagttttttgcataagtcaatcctttaagagaatgaaaccagaataaaatcctggccaaaatccctactactagtgctttaacacctcccagccagacattcagggtatgcatgccccatggtgagaaccagcagattgcccatttccaactcaaattgatttcacacatataattgagcacccagtatgtgctgggcattcttctagggggtggagatatagcagtgaggacaatgtcttacgaagctttatttattcattgttgaatcctcagttcccagaatagtgcctggcacacagtaggagattaataaatatttactgagatgttaagtgaataaacagaaaataagctcctgcttcatcctagggcctggctctgctctctacagcacaaagggaagagagattgcttgacagcctgggaaacaaatagaatccacacgactttctctccaggttggcaggaaaggggggcttgaatgctgcttttctctggtttctccaaatctcagtccttggctgtcctcacctgatttccagcaccatgtctttccatgtcagtttactctcattcagaatttaaattcgtttactctgtaatggagtttaagatagtttttcagaactgatggatgatgaacagttgcagcgtccaggaaccacttcctagtgtcctgggagacaatcctcccagtgaatgaaaatgacaaaaacatccttcccacagaagtcaccctgtgtactggttggttatttccaacctggtttgaaaagtaaagaagttgcactgaggggtaagtagaactgattgaaatctaggtgcctgtgctgtcctgctcttcccttatgacgtttagaacatttggtccatttttgttatccctgtttatgctctaagtgaggaattgtaattttgatgttaactgtatgccttttttttttttttttggtaaaaaatgtatcttgatatccccagttcagaatcaaaacaaattactgtgcctgttaccgtgtgaaatttgaagattgcaaatatctctcttaatgttattacttgactccattaaaaatagattgtgaatattccatgtcacattattcatgaggcaggctctatgccttttgtctgctggagtaacagtagaaagggtaacaagagacaccagagcacacctttgtttctttcactaaatttttaataacacctccagctagccagttggtgaagctcagctcttgcataaaagtggaaaagcacagctatctctgagaagaccaactctttcagcagctaatttgagtttgcgttcatctacaccagacgtgattaaattacctatcaagtgtgctgagctatcaggattcaggccacgtaaaaggtgaatttcatctgattgatttgagacacggatggaacaattgagttttaaaagccccgccttaattaaagggatagaagagtatcactccccggcgacttcttgactgccattgcccttgaaaactgggtggtgatagtgatttgacccaagtcactttgttgtgtgcctgtttgttcaacctgatcatttcacagaaagaaatgaactcagaggaaaacctgaaaggacttcactactttttactgggcatttctacagaaatgccattattatttctacagaaaaaactttttaggaagtatataatacgtttattttaacccccttttcccattcattaagtcagattttaaaaattaaaaagttaaagaaattgcaccctaaatccttctagcttaaaagcttatgttctttttgtatgcgttcctttctagtttgttcctttctagtctttaggcacatgtgcgtatatttatattttataatttttgtctagatagctcttttattatatggacacatacttaaaacagatatttcacaatgagaatttggacaattttatgaccaaattttattgaaatcttagtattttattgggaatcttatcaatcattgagaaaaagtcttttctgaagtttaatgttatcactttttgaataaaacattttaggcatactggaaattgcagagaataataaacatcagtgtacccaccattctgccatatttacttcagattttatttttgaaataacatgttacaggtatagttgaatttcttctgggatatattcctctctagccccatttcctttcttttctcctcagaggcatccattataccaaaatcagtatatataattgccacgaatatttgtatgcctttaatttatacataattccataaataatatataatcatataaatatataattaatataaaaatataattgtatttatatataaatatataattatgtaaatatataatttagcatattaacttcatgtaaatggatcatagtttatacttctgcacttttctggtttttttgcttaacacattgtttttgagatttatccatgttgatatgtgcagtttagttcctttattttaaccactgcatatggaattccatgggatgaatgcttggtaatttattctcctgttgggagagtttgggtcatttccagtttttcctattacaaatgattctgaagcaaacaaccttttatgtatctcttttgtgagagattctttaggatgtattcctgggaatgaaaatgctggatattatcaaactgctcttcaaaatggttgttccaattgacagtctccccagcaatgtagaattcctgttactccaaatcttaccaacacttggtattgtcaaactttaaacatgtctgccaatcagatggatgtgaatgtcattgtaatttgcatttcctgattcctagtgaggttgagtatctttttataagttgatgggcctgacagatttcctttcctatgaaatgcctcttcatgtactttgtccatttttctgttggttgtttgctttttatcaatttgttctttaaatatattctaaacgctcactgttatgttagttaaatgtgttgcatacttatcccagtctatggtttgccttttcactttgaagagaggattgtttgcttgttttgtttttgtgtgtaatcaaatgtattagtcttttcctcaatggtttatgcttcttacatatcatttacactctttccctagctggtggtcattagattccctatattttcttctaaaagtgtttaaatttctgtttgtaacattaggttttcttttttttttttttttttaggtggagtctcactctgtcacccaggctggagtgcagtggcgcaatcttggctcactgcaaactctgcctcccgggttcaagcgattctcctgcctcagcctcccaagtagctgagactacaggcatgtgccaccacacctggctaattttttatttttagtagagacagggtttcaacatgttggccaggctggtctcgaactcctgatctcaggtgatccacccacctcggcctcacaaagtgctgggattacaggcgtgaaacattagctttttaatccacttgtgtgtgtatagtataaagtaggacctaattttaaaaattttcttcaccattagtaatggataaccaattatcccaacattatgtattgctattttcatccttttccctctgattgtaatgccacctctgtcatatgtcaagtttctatttctgtatggttctatttccaggcttgctgatctgttccactggtcattttgtctatctctatgccaaagccatagtgtcttaaataatttaagttacaataaactcttaatagctagtagggaaggctgccttgtgacctgtttcatcctcttcaggagtatcctggctacctttggcccttcgttcttgcatgtgaaaaactctattggaatttaggtttgtattacatttattatttaatttggggagaattgaaattattttgctattgattcttcctatacataaatatggtatattgattacttatttaatcttcttttatggctttcaataacactttgtcattgtctgcataatttaattactttttaaacttattttcttagttctttttttgaaaattgaattttgtcattgctgctgatgtatgggaacaaaattaatttttctatatgttgatcttgtatcctgcaactttgctgaaccctcttttttggtttttgcagattattttagattttcagagtaagatagccataagatattcaagtgattatagctttatttcattctttccatcttattattgcctcactgcactggccagggctatactgaataggggctgaataatagtcatctttgtcttattcccttattccagggaaatatttttagtttttcacaacttcatgtgatgtttttggtaggtttttggtagataacttgttaaaaatgagattaggaatttctgtttctatttggtaagaatttccacttgtgtatgtgtgtttttaatcaatgggtatttaattatttttgtgtgatttttctgcatctattgagagaataaatatatttttaatcttttatcctttgtcaacatgcaaattatatttataattttctctaatgttttaaattatccttgtattatttggggaaaaaacccccacctagagggaataaattccaacttagtcatttaaacaacattgctgatttggtttgctgacctttacttaggatttttgcattatacttactagtgaaattggcttataatttttatttcttatgctgcccaaggtttaacatgtttcaaaatgaacagggtaacatttcttcttcttctgttttctggatcaatttgtgaaggactggaattatatgttctctgaatgtttgatagaactcacctgggatttttttgatgaaggctagcaaagaggagggtatatttaagttttagttactataggtctattcaggtttttaattttttcttaaatatgctgtatcatggctgggcacggtggctcatgcctgtaatcccagcactttgggaggccgagacggctggatcacgaggtcaggagttcgagaccatcctggctaacatggtgaaaccctgtctctactaaaaatacaaaaaaattagccgggcgtggtggcgggcatctgtggtcccagctacttgggaggctgaggcgggagaatggcatgaaccagggaggtggagcttgcagtgagccgagatcgccccactgcactccagcctgggtgacagagcaagactccatctcaaaaaaaaaatgctgtatcatatatatatatcagcatatttataagtatccaaattaattgccacagacatttcatagagttctctgatttttaaaaaatgtctactccacctataattatgttcaatttttctttctgatattgttcatttgtacctttatcttttttctttaatattgccaaaggtccctattttattagtttttgcagcatattttcattgtcattcatttctatatcttatctaacaatatttcttatttgacagatgtattatttagaagtacatttaaaatttctaaacatctctggcttagagttgcaaaataaaattctaaacatgttttttcagtaatttttgtaagtgatttataatttaattatattttgatcagagaacctgacttgcataatattaattctctaatatttgttgagatttattttgtggccttctccatggtcaatttttatagataatgtgtgcttgaaaagaatgtatatattctaattgccaagtgcaagttccactatgattaagcttgtgattatattgttcgaattttctatatcctaaataattttggtctgcttaatcaaccaatcactgagagagataggttttactttctcatggtgattattaagttataaatttttcctttaagttcttttttttttttccatgtgagcttgagaaaaatctcctttgaattctgttaactctttttcttttacctattttgagggttgttattaggtgcataaaattttgaactatttcgtattcctggtgaattattccttttttaatcatcattctattgtactcattgcctttagttttttgtttggttggttggttgttttttttttaagtttttttttttccttagagacagggttgcctaggctggagtgcagtggtgctatctcggctcactgcagccctgacctccctggctcaggtgattcttctaccttagcctcctgagtggctgggaccacaggcacataccaccacacccttctaatttttgtagtttttgtagagatggggttgcaccatatttcccacactggtcttgagctgctggcctcaagcaatccatctaccttgggccttcaaaatgctgcgattacaagtgtgagccactatggctggcctatttttacatggtatttttaatgtccttttatttttaatctttttatgttcttatgctttaggaatatatctttgtaaatagcattaattcaatattatttacctttttaaagtcagacataagtaaaataaaatttccaattgaaaatataatttctgatactgtttcactatatgtatgtgtggtgtacatgtacctgatcttttcatctctaagcaacttaatctaataggaatctgttgctgttttctcatttccaatgagcttttactgataaaaaagaattacacacacacacaggagagaaaagtactcactctgcccaaaacaatatgatgcttactgctttactctgctagtccattttttggtattcaaggaaggattctatcttgcaaggttttttaaagcttgcatttgttttaactgtaaaggagacccaaaagcaggaagttaggtttgtttcttgatgctagttttacaaacttcattgagaagttttttaatttttggtaaagtaggaagcctagtttcaattctgtcttttaacatgaattagacaatttcctaggttgccctttctgagaagaactgattggcacgcctttataagatttgctgcaatagcagttcttcagtttttcttagagtaaggaaaatctgagtggatgcctcttgtgactttttgggagagccagaaaccatcctttcattaacctttagtagaattgtctgtgtttcacctcttggatataccttcccagagacatcacacaaactcaacttcctctttccctgtactaaaaaccactgttcatgggactctaataaacaagagtaacaggttcttaactgggctgagggagtcccaccacagtgtaatatttttgcatgtcatctttgcatggttattgtttacatgatatatttaggtactatataaaataacataaaataaaaagtttaaaataaaggtagaaccagatgaccttcaaaactctttcaatccaggagctgggcattgtggctcatgcctgtaattccagtgactcgggagactgaagtgggagaattcttgaggcaaagagttcgtgaccggcctggacaacataatgagacctggtccctgatatttttttttttttaattccctgggcaataaagtgagaccctgtctccaaacaaacagacaaacaaacaaaaaaaccagtgggcagtgaactggaagactctttgcaatccaaatgctagtgtcaaaggtttagctgatttgatttcagggcacccacaacacttattctttgtacatcactaaggaccccctggggtctatatggaggtttattttccactggtcactgttggtccaagactggcaggttccaggtgtgagaaatggatctgaactttcctagggaaccttctattagcttggagaagcagaactgtttagttaaaaactgcattgaatttggaggtcaggagatccttaaatatggtatattgattacttatctgcatatagttccagttcaagaccaggagaagacaaagacagatgtcccagatcaagcagtcagacaggcaaagttccctgttagcctttttgttctgttcagatctacagttgattggatgaggcccacctacattagggaaggcagtctactttactcagtctactgatttaaatgttaatctcatccagaaacaccctcagagacataccaagcaagaatgtttaaccaactttctgggcacctgaggcccagtcaaactgacacaaaaactaaccatcatggtctccaaattgccagtatatttatcagagtaaagagcactagtgctgtaacgaataactccaaaattgcagtagcttacataataaataaataattaacatatcacagtgaatttgagtgtgttcaggctgctttcttcactggtgattgagagctcccaattccttctatcttgtaatgctgccatcttccagggatttcttgttctcttctgcattgtctgcatttagctggctgatgaatgaagacagaaggtgtgtagaggatcatatgggacctttgtaaagccagactgggcaatgtatagattgcttctgttcactttcctttgatcagatctcaacacaaaatcccaaccttgctgcaaagaatgctgggaaatgtaattttcctttctgttaaggaagaaaaaatggtgagcctctagtgagtcttttttttttttttttttaaagagacaggatcttgttttgtcacccaggctagactggaattacaccattatggctcactgcagcctcaacaccctgggctcaagcagtccccctgcttcagcctcccaagtaactaagactacagatgtgcaccatcatcccccgctaatttttttattttttgtagagacagggtctcctcttacccaggctggcctggagctcctggcctcaagcaatcctcccaccttggcctctcaaagtgctgggattacaggtgtgagccaccatgcctggtccctagctagcttttaaacttggggttatcctgtctctgagtttgttttcttctttgtaaagtgaggaggatgtgtcaaatgctctcgaagggactttccagctctgaccatctaagtcctatgattctatcaaaaccttggctgggccctggaaacacccagcttggaggtggtctctcccagcccaagagggaagaacaagaatcagagttcccccaaggattttctaaccgacacctgcagtgcctgggaaattcattcacttcctcatgttcccaagaatcaggatgacagccacacccctacagagtatagccttaccctaggtcatagtgccggcaccccttcctgggtgtgtgtgtgcgaacactaatgtggccatgacatttc

SEQ ID NO: 285 - DNA, 2715 bp, Homo sapiens
gatagagcggtctctcccgaaagcaagattccgtttgaaaactctcctagcgcggtgcccgcgccgtgactccgcaggtctcctccgggctggggctgagcaagccctcggagtgaccgtgggtgacagcggctccagggactcttggggcgcagtggggaaagtgccggaccaccatgccgcgctcatttctcgtcaaaagcaagaaggctcacagctaccaccagccgcgctccccaggaccagactattccctccgtttagagaatgtaccggcgcctagccgagcagacagcacttcaaaatgcaggcggggcgaaggcggagccccgggaccgtttgtcccccgaatcgcagctgaccgaagccccagacagagcctccgcatccccagtacagctgcgaaggcagcgtctgcgaacggagctcggagtttgaggacttctggaggcccccgtcaccctccgcgtctccagcctcggagaagtcaatgtgcccatcgctggacgaagcccagcccttccccctgcctttcaaaccgtactcatggagcggcctggcgggttctgacctgcggcacctggtgcagagctaccgaccgtgtggggccctggagcgtggcgctggcctgggcctcttctgtgaacccgccccggagcctggccacccggccgcgctgtacggcccgaagcgggctgccggcggcgcgggggccggggcgccagggagctgcagcgcaggggccggtgccaccgctggccctggcctagggctctacggcgacttcgggtctgcggcagccgggctgtatgagaggcccacggcagcggcgggcttgctgtaccccgagcgtggccacgggctgcacgcagacaagggcgctggcgtcaaggtggagtcggagctgctgtgcacccgcctgctgctgggcggcggctcctacaagtgcatcaagtgcagcaaggtgttctccacgccgcacgggctcgaggtgcacgtgcgcaggtcccacagcggtaccagaccctttgcctgcgagatgtgcggcaagaccttcgggcacgcggtgagcctggagcagcacaaagccgtgcactcgcaggaacggagctttgactgtaagatctgtgggaagagcttcaagaggtcatccacactgtccacacacctgcttatccactcagacactcggccctacccctgtcagtactgtggcaagaggttccaccagaagtcagacatgaagaaacacactttcatccacactggtgagaagcctcacaagtgccaggtgtgcggcaaggcattcagccagagctccaacctcatcacccacagccgcaaacacacaggcttcaagcccttcggctgcgacctctgtgggaagggtttccagaggaaggtggacctccgaaggcaccgggagacgcagcatgggctcaaatgagcaccctggctggctgcaagcagcagctacacaacactacagagggcagcctccctgcttgccaccactctgctccctgcttgcctccactcccttctgactttccagaccccaggtccagtctgcagatcctaccaggttgctcctccttcgccttacctcctggagctgccagaagaaatgaggtaccttttcaaagtgcagccgagagtgagaaccaagtgactctctaggcttcggacacaaataggctcctctacacctgaagacaaaggcaaagtcaaatggggaccagaataaatcttagaccccacagtccttcccatttccagccctaatctacagacaggaatgcccttcaggtttcttccctcccccctcttgacctaccccagatatttgtgtggaagaggaggaatcaccatttacaaggtggacaaatgctaatatttttatctagaaagaagagtgagtgttaacttttatttttttccttctggggggtctgttgactcctttcttttgggtgctgcctataaatcttggaggaatcatttctcctcctcaaaaactgattcagaaactgacttggggaaggaatttaatactttgaagtcatgagatgcaccatcgaggctacccccaagaagaagcagaagagaagttggtaatgagaggggattagaggtcctcccttcagtagggctgtgaaaacctcatcactggaggtaaaagcacaagcaatgcctgtggacaagatgtcattcattcactcagcaaatgttcatggatcaccggctaccaaggtaccaggcaccatgctaggtattggggaagagagactgaagtcacaacccctgactgctcctcaaaagctaacggttgcacctccaagtggctgggtctgttcttactcttggagggaattctgagaagacagcacagaattgtaaaccttcccttttgacccttttggattttatcaggtgtaaacaaaaagctgaacagttacttcaaagatatgtgtgtatattcagttttttattgttaagctgatattttaaagatttctgagctagcaggcatgtgggaaggaaggctctgtcttcaactctttgaccctccatgtgtaccatagaggggggaaaggtggtattttcactttgatgaggttggtaaatgtttttagatcttctggtaagcattatgtttgttaatacatatttattagagtgatgttttaagttaataaagtattaagagtatta

SEQ ID NO: 286 - protein, 310 aa, Homo sapiens
MCPSLDEAQPFPLPFKPYSWSGLAGSDLRHLVQSYRPCGALERGAGLGLFCEPAPEPGHPAALYGPKRAAGGAGAGAPGSCSAGAGATAGPGLGGDFGSAAAGERPTAAAGLLYPERGHGLHADKGAGVKVESELLCTRLLLGGGSYKCIKCSKVFSTPHGLEVHVRRSHSGWFACEMCGKTFGHAVSLEQHKAVHSQERSFDCKICGKSFKRSSTLSTHLLIHSDWYPCQYCGKRFHQKSDMKKHTFIHTGEKPHKCQVCGKAFSQSSNLITHSRKHTGFKPFGCDLCGKGFQRKVDLRRHRETQHGLK

SEQ ID NO: 287 - DNA, 2839 bp, Homo sapiens
tagtcgaaggctgagcggacccggtcgagagccggcgagctccgcgcagggagggtgcgcccaccggtcccgccgggcgcccgcgggacgcgccgccagggccctctccgccgggggctcggcgctcgcccacctcttccaaatttaaccattacctaaatccgaagggaaatgagcaaacctctcggattgggtgtcaaggtctcctccgggctggggctgagcaagccctcggagtgaccgtgggtgacagcggctccagggactcttggggcgcagtggggaaagtgccggaccaccatgccgcgctcatttctcgtcaaaagcaagaaggctcacagctaccaccagccgcgctccccaggaccagactattccctccgtttagagaatgtaccggcgcctagccgagcagacagcacttcaaaatgcaggcggggcgaaggcggagccccgggaccgtttgtcccccgaatcgcagctgaccgaagccccagacagagcctccgcatccccagtacagctgcgaaggcagcgtctgcgaacggagctcggagtttgaggacttctggaggcccccgtcaccctccgcgtctccagcctcggagaagtcaatgtgcccatcgctggacgaagcccagcccttccccctgcctttcaaaccgtactcatggagcggcctggcgggttctgacctgcggcacctggtgcagagctaccgaccgtgtggggccctggagcgtggcgctggcctgggcctcttctgtgaacccgccccggagcctggccacccggccgcgctgtacggcccgaagcgggctgccggcggcgcgggggccggggcgccagggagctgcagcgcaggggccggtgccaccgctggccctggcctagggctctacggcgacttcgggtctgcggcagccgggctgtatgagaggcccacggcagcggcgggcttgctgtaccccgagcgtggccacgggctgcacgcagacaagggcgctggcgtcaaggtggagtcggagctgctgtgcacccgcctgctgctgggcggcggctcctacaagtgcatcaagtgcagcaaggtgttctccacgccgcacgggctcgaggtgcacgtgcgcaggtcccacagcggtaccagaccctttgcctgcgagatgtgcggcaagaccttcgggcacgcggtgagcctggagcagcacaaagccgtgcactcgcaggaacggagctttgactgtaagatctgtgggaagagcttcaagaggtcatccacactgtccacacacctgcttatccactcagacactcggccctacccctgtcagtactgtggcaagaggttccaccagaagtcagacatgaagaaacacactttcatccacactggtgagaagcctcacaagtgccaggtgtgcggcaaggcattcagccagagctccaacctcatcacccacagccgcaaacacacaggcttcaagcccttcggctgcgacctctgtgggaagggtttccagaggaaggtggacctccgaaggcaccgggagacgcagcatgggctcaaatgagcaccctggctggctgcaagcagcagctacacaacactacagagggcagcctccctgcttgccaccactctgctccctgcttgcctccactcccttctgactttccagaccccaggtccagtctgcagatcctaccaggttgctcctccttcgccttacctcctggagctgccagaagaaatgaggtaccttttcaaagtgcagccgagagtgagaaccaagtgactctctaggcttcggacacaaataggctcctctacacctgaagacaaaggcaaagtcaaatggggaccagaataaatcttagaccccacagtccttcccatttccagccctaatctacagacaggaatgcccttcaggtttcttccctcccccctcttgacctaccccagatatttgtgtggaagaggaggaatcaccatttacaaggtggacaaatgctaatatttttatctagaaagaagagtgagtgttaacttttatttttttccttctggggggtctgttgactcctttcttttgggtgctgcctataaatcttggaggaatcatttctcctcctcaaaaactgattcagaaactgacttggggaaggaatttaatactttgaagtcatgagatgcaccatcgaggctacccccaagaagaagcagaagagaagttggtaatgagaggggattagaggtcctcccttcagtagggctgtgaaaacctcatcactggaggtaaaagcacaagcaatgcctgtggacaagatgtcattcattcactcagcaaatgttcatggatcaccggctaccaaggtaccaggcaccatgctaggtattggggaagagagactgaagtcacaacccctgactgctcctcaaaagctaacggttgcacctccaagtggctgggtctgttcttactcttggagggaattctgagaagacagcacagaattgtaaaccttcccttttgacccttttggattttatcaggtgtaaacaaaaagctgaacagttacttcaaagatatgtgtgtatattcagttttttattgttaagctgatattttaaagatttctgagctagcaggcatgtgggaaggaaggctctgtcttcaactctttgaccctccatgtgtaccatagaggggggaaaggtggtattttcactttgatgaggttggtaaatgtttttagatcttctggtaagcattatgtttgttaatacatatttattagagtgatgttttaagttaataaagtattaagagtatta

SEQ ID NO: 288 - protein, 310 aa, Homo sapiens; identical to SEQ ID NO: 286

SEQ ID NO: 289 - DNA, 2872 bp, Homo sapiens
agatttcgacctggtattaggtgaactgattgggggttaatgagagcgacgccccgggcagctagttccctcccgggcccgggcccgacccccgctctctgctaatgcagcctgcgcgctctggcgtcctgtcttttttgtctgctaaattgtcggtgcactaccgactcgggacacctagcatttcccagtcaacgttcgtggatcgggctccacctccctaggacaagattttttggtctcctccgggctggggctgagcaagccctcggagtgaccgtgggtgacagcggctccagggactcttggggcgcagtggggaaagtgccggaccaccatgccgcgctcatttctcgtcaaaagcaagaaggctcacagctaccaccagccgcgctccccaggaccagactattccctccgtttagagaatgtaccggcgcctagccgagcagcacttcaaaatgcaggcggggcgaaggcggagccccgggaccgtttgtcccccgaatcgcagctgaccgaagccccagacagagcctccgcatccccagtacagctgcgaaggcagcgtctgcgaacggagctcggagtttgaggacttctggaggcccccgtcaccctccgcgtctccagcctcggagaagtcaatgtgcccatcgctggacgaagcccagcccttccccctgcctttcaaaccgtactcatggagcggcctggcgggttctgacctgcggcacctggtgcagagctaccgaccgtgtggggccctggagcgtggcgctggcctgggcctcttctgtgaacccgccccggagcctggccacccggccgcgctgtacggcccgaagcgggctgccggcggcgcgggggccggggcgccagggagctgcagcgcaggggccggtgccaccgctggccctggcctagggctctacggcgacttcgggtctgcggcagccgggctgtatgagaggcccacggcagcggcgggcttgctgtaccccgagcgtggccacgggctgcacgcagacaagggcgctggcgtcaaggtggagtcggagctgctgtgcacccgcctgctgctgggcggcggctcctacaagtgcatcaagtgcagcaaggtgttctccacgccgcacgggctcgaggtgcacgtgcgcaggtcccacagcggtaccagaccctttgcctgcgagatgtgcggcaagaccttcgggcacgcggtgagcctggagcagcacaaagccgtgcactcgcaggaacggagctttgactgtaagatctgtgggaagagcttcaagaggtcatccacactgtccacacacctgcttatccactcagacactcggccctacccctgtcagtactgtggcaagaggttccaccagaagtcagacatgaagaaacacactttcatccacactggtgagaagcctcacaagtgccaggtgtgcggcaaggcattcagccagagctccaacctcatcacccacagccgcaaacacacaggcttcaagcccttcggctgcgacctctgtgggaagggtttccagaggaaggtggacctccgaaggcaccgggagacgcagcatgggctcaaatgagcaccctggctggctgcaagcagcagctacacaacactacagagggcagcctccctgcttgccaccactctgctccctgcttgcctccactcccttctgactttccagaccccaggtccagtctgcagatcctaccaggttgctcctccttcgccttacctcctggagctgccagaagaaatgaggtaccttttcaaagtgcagccgagagtgagaaccaagtgactctctaggcttcggacacaaataggctcctctacacctgaagacaaaggcaaagtcaaatggggaccagaataaatcttagaccccacagtccttcccatttccagccctaatctacagacaggaatgcccttcaggtttcttccctcccccctcttgacctaccccagatatttgtgtggaagaggaggaatcaccatttacaaggtggacaaatgctaatatttttatctagaaagaagagtgagtgttaacttttatttttttccttctggggggtctgttgactcctttcttttgggtgctgcctataaatcttggaggaatcatttctcctcctcaaaaactgattcagaaactgacttggggaaggaatttaatactttgaagtcatgagatgcaccatcgaggctacccccaagaagaagcagaagagaagttggtaatgagaggggattagaggtcctcccttcagtagggctgtgaaaacctcatcactggaggtaaaagcacaagcaatgcctgtggacaagatgtcattcattcactcagcaaatgttcatggatcaccggctaccaaggtaccaggcaccatgctaggtattggggaagagagactgaagtcacaacccctgactgctcctcaaaagctaacggttgcacctccaagtggctgggtctgttcttactcttggagggaattctgagaagacagcacagaattgtaaaccttcccttttgacccttttggattttatcaggtgtaaacaaaaagctgaacagttacttcaaagatatgtgtgtatattcagttttttattgttaagctgatattttaaagatttctgagctagcaggcatgtgggaaggaaggctctgtcttcaactctttgaccctccatgtgtaccatagaggggggaaaggtggtattttcactttgatgaggttggtaaatgtttttagatcttctggtaagcattatgtttgttaatacatatttattagagtgatgttttaagttaataaagtattaagagtatta

SEQ ID NO: 290 - protein, 310 aa, Homo sapiens; identical to SEQ ID NO: 286

SEQ ID NO: 291 - DNA, 90187 bp, Mus musculus
  misc_feature (1)...(90187): n = A, C, G or T/U
tagatccagcgagaggaacttgaaaggggggttgtgtaatgtaccttttccaatcccgggctgtatatggagatttgggattctttaaaccggcgctacctggattttattaaaaagcggggagctcggcgggaggaaagctggcttttccgggggctgcgggagcggggccgcgggagggcggaggagttggcgcgccgcgcgcccggcccggggagcggttttctaccaaaaaaaggaaaggcgggcaaaaagtgtgaggcggctgcgggtggcggaggggagcggcggccgagggatggcgggcagtacgggcgcctagccgcgccaggaaccgcggcggttgccggagtcgccgtcggagcctggagcccggagccccgccgcgccaggtacgctccgggccccgatgctccccgaacttgtgcagcgtaccccttgggtccgcaaagcagaaggtccccgaaacagtcggggtccccagaagggaagcggagggcagggatcagggggagaggacgcatcgctgcgccttggactcccacccgagctctcagtctgcagcaccgccgagggcggcggttccctacttggttcccggcaggcggcgggctagcccggggacgccgagacggtttcgattataggctgtttttaattaaaagccggaattcagccattttagctgcatttaagaggggaaaagtagagaaggacgcagtggaaccccgcagatagccacgccagcttctcgaccatggcaaaggctgctccgtagggcttcaccccgacttccttaaagtggggcgcctgggctctgcctttttcaaaacgctgcctttaatgaatattatctttaagtgtatgcgggaagctcctggcgcctttgagacaagtatcccgggctgtgacgatcctagattttttcaaaagtaaacgcgattctggtaaccagagcctgataaagagcgagggcgggcgagaggaagagggggtgttgtaaccaaagccacgttaaaataggcgtccttagcaaagttgggggaagaggacttttgggtctgggcgtagggcggctggtcacccgggagctgtggcttagtctccgtctgctagagcgccccggttctcccggaaccagggggtctagagtagcctggggctggtagtcagggagggaagggtgggctctctgagacctccctaccccctcgggaacaggaaagcgacagatcttttaaacaaacagcttaaataggacttacaggagggtttacccgatgctggggaggcgcccctccgctggcccgcgctgttaagttattttttttcctttgtaggttattttgggggtgtgtgggtcacaaagctagggtagaattgagatctttggagaccccttctttcttctctgatgatccccaaatcctccacaccaagccacgttctccgggcatcggtattcccaggcccgggcgttggaaaatgaaaccaaatcttgttttgaaggagtctttttccagttcacgggcgagaatgccacgtctcggggactcggattctgcgactcccaatggcccaacgggggcagcaggaggggggcggtgatcttcctttaaaaataaacccgtttcgtatctgaccttggtaaacaacaacaaaaagcccctaaaccgaacaccccttttattattattattattattcgcggctcacaaggagaaaaaaaaaagggagacgagggccctaaaaaggttaaacattaaactttgcgaatcagatagttggtatggcgttatggacacatttcaaccaactcaaaagcattcgaagttttaaacctccagagcttgtgacgcctgaaaaataaactacgggtttggatttagctgaacgggcgcggtctgttgagtggccttccccagttagggagaacttcgtaggcaagagacggggctgggacacagcgagccgggccgcttccctgagccacgtccctgggaaccctgaactgctggaggaaggaccctaggttttcgcatttcgaggagagggggcggctactcccgattttatttctggccaccagctcggttcgctactctcctaccctgaagggcgaggcgactttctgaaacttgttttcttttttttctctttcccctccccttttcccccttccctcttctgtgtcttccgcggtcttccctcaccaaagataccgtgtacgcctccttcctcatctccgctcagccgcccggaggggactcaccgcgggcggttcatgcgccccgggccgcgggcccgtggttgagcgcaagccccgctggccgccgccatgcacgccgcggagcgcccgccacccgaggacactaggactacatcgaggccgaacttttaagtcccactgaagcaggccggcgggccgggtggggaggctgatcgcggcactcccgcggaggatggatggccgagatttcgggccccagcggtccgtccacggccccccgccgccgctgctgtccggcttggccatggacagccaccgcgtgggcgcggccaccgccggacgcttgccctcctcgggcttgccaggtcccccgccgcccgggaaatacatggccggtctcaaccttcacccgcacccgggtaagtgttgcgcactgtgctagcacccaccctccagctttgatggggatattagggcgggagcccaggtcaaacctaggcggctggagctgggcgtctctgtccggtttcaccagggtgtgcaggaggctcgctcagctgctagcgcagaggtcggtctccaggaagacagacctgtccctagtgtaccagatagtctcagtcctcctgaggctcaagtgtctgcagtcacaaccactctgggggatcccagtccgagggctcttgaggaagaggagtttgcaaaaataaaataaaaataaataaataaaaacctgtaggcgcgaaaacagcgtgtcagctccacaccccaggagacagacagccgctcccgtatgggtctttttcttggcaagcactggtgggtcttgggttatgtccctgtgtgtagccgcgtccccggcggttccacgcctccaagggtgggtgtgggagaatgaaggagaatagtgaccacagttttaggagcctgaatctgtggtgaacccttaagatcttagggacgctggttatctggggaagatataggtcggtgcaacccagccggcactctagcagagcccgacttcagggggtaccccatggtgacacgcaggaggtggtggctgagaaggcccaatcccttaccgttccctgggctgcacagggaaggagcagagggacaggcgggactgagccaagtcttggtcaccgtgcgccggaagacagggagtctgggacctgcagatctgcctggtggcggcttcgtaagccggtccctcctccccggctgctcctcacttctacgcttggcttaaggagaacacttcagctcttcctttaaaaaacaaaacaaaacaaaacctggtcgatttccccaggaactcgctccctcgtcctttggaacaagacttggacaccctgggggctcagagccaccactttagtatcttcccctgcccgccaggatgaccacggctcgccgaattagcctctgcctttgatatttttctcctggaacttttctagaattgggagtccgggactcagcgggacaaagggcctttgtgaagcgccggcgggggaggggcgagcagagatccccgccggcgggggcgcggggacccgggtcatctcccctggtgtgcgtgtgccccttgagaactagaggcgcgtccgcttggggcttaggggtggtgacaagaccagattcatacaggaatggtgccctgcgacccaggtggggcatcagaccattcccaaggcaggaattggggagggctttgggatacaaaggccatttgggccaaccccgtttgagaggggcctttggaggtttatgggtgtgtgtatttttggacttttgggatctctgggttagttggtttagctggaagtggcggcaggggttcctcctgtggcctgggaatctgacctcagggtgttcctggctggctgaatctcagcttgtcgcctgctccaggtctgcctgggatctggcccaggcttggctgagagcagcgttgatagccattccttgctgctgtcgttctaagtgcacagcattttccaaccttggtggcgtagcatagtcagactgccttccatgcttaacccctcatctagtggatgatgtgacagaggcatagactaggcaatccagctggaagcagccttggaatcctgtgtcatggccttctctgcttggagctgttcgacttctgtacagggtagctcgagggcctggaggaaatgggaggaaagtcacagcagtcgtccccttgaggccttgcttgcccgagagggaagagtggaggccctcgaagctctatgacttcccactcgtcccatctgtcccccacctccagatggggcagatagaccggaccgcaggtcaaggcccagagctgaagccgtacttaatcccattaaccacgaaatgggactgcaccccattcaaaccggaggagctggcggggatggagactccagacacccctcccccacctggctttctttgcagggggtgcaggtgctagacctttgcataggggcaccacccagtgctttttttctggctgccagctccttagatcttggcagccttatcagaccggcagaccggtctttatttgtttacttttgtataaaatgtcagagaaactgagcgatttgctagggtcacgcagcctagagggaagagggtttttgttacctctgggctggtccggttggaggatgcccctgcccgtggctgctggggtgcagaagtcctagtgaaagttcagtaggcagggggagcttggcctggtgacctcaggggagcagcactgttgggtgagggtccgttgtaggcaaagctttctacgttgatgtgggtttgtatgagggctctagccccttcctcaggtgaaattaaaaataaagaacggggtgtcagcatggaggctcacacctacctatgcagcactcagaggcagagatagagggagcaggggtaattggggcagcccagnnnnnnnnnnnnnnnnnnnnnnnnnnnnnnnnnnnnnnnnnnnnnnnnnnnnnnnnnnnnnnnnnnnnnnnnnnnnnnnnnnnnnnnnnnnnnncacatactacgcaaacacaccacattacatacacaccatacatacacatacaccccaacccttacaccacacacatacacccgtcagattgaagcaggggtgacgacttctttctttccccttgctgtaaggtccggctgtagtttgagcagtgaatattcacagcttgtcagtgagacttcatttctggagttggggggccctgggaaggatccatctttcagtgtgaagtgtggctatcgagatcttgtatctggatgcttgttttctctgaacccacaccctggactgaatgaggggcgggacgcagggatgtagactcaggaggtactgcactttgacctggcccttggacaataggcaaccagccttgggctcccaactctggaatccaccctgtcagcctcctgggattgatttagaaagattaatcagttaggactggctgctggagacgagggatgagaagataaggctgtttgtttgtttttttctccttgaaccctccctttggtcagaaggcagtaaaggaaggcatggagaaggttctagaacctaggagggcccgttgggttccctggttcttaacgtgatcacctcctgtttgtcttcttttttttttttaaattctattttcaatgtgtgtgtgtgtgtgtgttcgagtgtgcgcgcacaccgcactgcattgtgtacacaccagcctgcattgtgcacacacctgcctgcagaggtctgaggaccacttgctggagttggttctctcctgcccagtggggaggtcctgggatcagactcaggtgtggccacaggtcactttaccctctggctcatcttggcggtgccttttggagcttcaccagtccaagccttgctttttccttccttcttcgatcgacccgttcatttgcttggcaaatggtttctaagagcctctctgctcaccagggaaccgcactgggccccggaactgtgtaagggaaccaaacacactgaaggctttgcgcctccttggggctaactttctagtgtgggagccaggcaataaacacacaaatcatgaggacacaggccatgtaggaaataaaacgccctgggtctggtctggcccttggggtgaagggccaggtcagagggcttgacctcagccatccccagaatgaactcttttgtgtgtctgaagagcagaaagttgacagaatgcagagacagtgctgggtgagggatcagaggtttgagagcccagtgggagatagactggatggggtggggcggatcttgcccggtccctgaaaaccagcaatgaagtcttggaattttaaacagccattttacaaaactggcatggacttaaaaaaaaaagtcagtggtgtgtaaggcgaaggtaggcagggagctgttagtgttttaggagaaacggaaaaactgactgtggctacaggcagtgtgtagccgagattaggtcttggtttaagggaaaaaccgtctcaaaggatcgtggaggcaattggaaagattggaatatgagccgcagatcagcccacagcggtgagtcagtacagtatccccagacaccagtcgctacctcggctgtttaaatgctgttcttatttcctgggaataaggactcagaatttaggggccagggacaccatgtctgccactgtcttgcagacggctggggcaagtggggaaaaaaaaaagaatactttcaatataagtgtcccggcatcgtcaagggagacggcaggtaacagcagataacaaactaagaggtgtgactagagcctgcgaaggtgatggtagttcattgtaactattttgagcttctctaaagttgaaattcttccaaaataagcatacaaggggaaggatgtgtgtgtgtgtgtgtgtgtgtgtgtgtgtgtgtgtataagatggctcagtgggtaaaggcgcttgtgagtaaactgaggacctgagtttgattttgattccctgggatctacatggtggaaggagctgtgtgtgtgtgtgtgtgtgtgtgtgtgtgtgtgtgcgtgtgtgtatgtatatacacgcacacacacacatacatacaaagaaagagaccctgggttttggtcagagatgttcatagggtgggaggaacagggacaaggtgggttgaggcacctccatcccctttctatttttttaaacaaagcctcactgtatagctctgactggcctggacttcgccgggctgtgtagaccagtctgacctcagtctcaaggagaccacctgcctctgcctccagagtgctgggattaaaggcgtgcaccaccacgcctgacttttatttttcccttttaggacaagagttttatggagctcaggctggcctggaatttatggttcgattctcatcctcttaaatgcttggaatttaggactgtatatgataatcgcttggggtggtggggtgtttttgtattttgttgttgttattgttgttgttgttgatataaatagacacgtgcacacacacctgtatgtacacatagatatcatatttagaagacagggtctgctatagccccggtggactgtcagtttcctgcatatctgagaacataatctggaacttaagatcctgcctcagtctacaagtgaaccatgtgacttagctgtggccagttagggatggtcttgactccttttggtggactggctgccaaatctgattctgcttccactcctttttgccatctcggcaggcattccaaccccaactaaagggaccaggactttcacttcacttgatagaatgtttactaaccatgcatggtgaaacccttggtttgatccgcagccctgcattggtagcatagacctgtagtcttggctcacgggtggactgtctcaaaaacaaacaaaactcatcaacaaaagaaaaacccaccatctaaagctgagcctgtttgtttgtttgtttatttttgtgttgctgacagtgaaacccagtgtcatgtgcacatgtcactgagtcagatccccagccaggagccaggggtccttgccatccctcttgcccagagaagcatcatatctgcctttggtggaagtaaaagctatcacatagtgaggtgctgactgaagataaaaagtaggaccgctgagatgcagctcagtggtagagcccctgcctagaatcccccagtgagggggctgggggcgtggctcaatggtagagcccctgcttagaatcccccagggaggggctgggggcatggttcaatggtagagcccctgcctagaatcccccagggaggggctgggggcatggctcagtggtagagcccctgcctagaatcccccagtgaggggctggggcgtggctcagtggtagagcccctgcctagaatcccccagtgaggggctgggggcgtggctcagtggtagagcccctgcctagaatcccccagggaggggctgggggcgtggctcagtggtagagctctgcctagaatcccccagggaggggctgggggcgtggctcagtggtagagcccctgcctggaatcccccagtgaggggctgggggcgtgactcagtggtagagctctgcctagaatcccccagtgaggggctggggctcaaataccctttctaacaatttcacacattccttagcagttctgaacctggaatcctttgataagaagctactttatctggaggctgcctgttctagggctgatggttatttccatttatttatttatttatttatttatttatattattatgttttttaaagatttatttatttatgagtgattacaattatagctgtcttcagacacaccagaagagggcgtcagtcagatcccattacagatggttgtgagccactatgtggttgctgggaattgaactcaggacctctggaagagcagtcagtgctcttaactgctgagccatctctccagcccttatttatttatttttaatgagtttgtttgtttgtttgtttttcctggaacttgctctgtagaccagggtgacctcaaactcacagagagctgcctgcctctgctttgtgagtgcagggatgaacggcgttcatgaccaatcactatttggattcctcttccttttttcttttctttttgccacttattgtgcatgtgtatgtgtgaatgcgagtgcttctgtgtgcacatgtgtatatgcttcagtgcatattcaagaggacagttggtgtgactcagttctctccgaccacttgggtccagaggactgagcttaaaccatcagcttgccctgtgacctatcacacctgcccaagcctgagactgaagtcttgattttctgcctttgatgagtctgtgagtctcaattttcccatctacaaagtggaccaattaatactgaacgctaccttgccttgtgacatttgatgaggcaggctgaggccaggtgcctgacccaggcccagccctctggaagtcactgaaaaagtgattgctgtaattacggacatcattagcgggtgactcacagatccctcaggcccgtccacacctctcccagggctttggaatttccttctaacgctctctggttggagcatagtccttagccaccgggggtcaacctacgcttttattttatcttgggactggtggatcaaccccagaggccttggagctacctctgagcagtaccccaggtcttcattgcttttcatttgtacccccctttttttttataatagccagactaaaatgcttccatgttatgtagctcagtctagctttgaatacctgatcccccgcccccccccttttttttttttgtgagtacattgtagctgtcttcagacacaccagaagagggcatcaaatcccattacagatggttgtgagccaccatgtggttgctgagaactgaactcaggacctctgcaagaggagtcagtgttggtaaccactgagccatctctccagcctggaactcctgatcctcttgccttcacatctcaaatgcctggatcacgagtatgtctaccatccccacacacccagacttggttgctttcatctcaagtttctggtttatttgactttttaagggtcttcctgtgtggcccaggttgggattcagtagagctcagatttgcctcaaacttgtaatctttaggcttcaaggctgccacacccagtggggtaggcctttagtcccagcccttgggagacagggatcgctattgaattggaggctagcatggactatataatgagagagttccagtgccactaaataatgagaccctgtctcaaaaagttcaaagtacaacaccaaccaaagcaggaggagcatgtagctcatagcatgcatgatgctttggatttgactaagtcatattaactgtcatggtggtgcgtatgtgcctgtaattttagtacttaggacgcaaaggcagatggatctcttgactgagtagtgcaagagcatgatcccttgggtatatagtgagttcaggtttgcctgtgctatgtaatcacagaaacaaaacaagttaggtgtggtggcctataatctcagctctcaggaggcagaggcaggccgatctctgagttctggtccagcctggtctacagagtgagttcaagcatagccagggctacacagagaaaccctgtcctgaaaaaagccaaaggatttttttttttttaaagagaatagaaaagaaaaaagtgtagcattgaaaaaatgaaatgggtgggctggagaaatggctcggcgggtaaagagcatctgttgctcttgcggaggatctgggttcgatttccaacacctacacaagagctcacaccattttgactcctagttctgcagagtctgactctgtgtctggcctctgcagaccctgtaagcatgtgacacatgcatatacacgcagaaacgcctatagtgcacatatgcaaagtgaaataaaatggggtatgataataggatactcggagatccggttcaaggattaagtgttgcaaataaagcatttaacactgcgtctgatatgcaataggggccttgcagatgtttattattatggtaagtgaggtttctttaacctcttacccggttctattcccttctcttgatatatatgagatacaagggaaatttttgttttattttaatgttttaagagacaggctttctctgtgtagccctggctgtcctggaacttactctatagaccaggctggcctcgaactcacagagcatccctctgcctcttcatcactggaattaaaggagcctcggccggcaacactactgttttatttaagccagttttttttgtttgtttgttttgttttgttttgttttgtttttactatggctttgtaagttttgtgcctgttgtgcctagagtcaatggtgtaataaaatcaacttatattttctggagttttcaaggtttttgtttttttggatcggattgtgttttagactgtctgcctcccgttctgtggatacagtttataattgggaacgtctcccgcccagatctcctttgtcttttcttgaagagtctggttctggatggttccatcggcctttacctggttgccagcgactctgttccttggatctggtaccttcctgtctcctgggttacggccgtgcttctgggagcatgttcagcagttctgcctggtcacgtcggtggttagtgctttccagtgtccctctgcctttttctgaaggctgtgatgctgtgcctacccctcccactggtggggctggggaccaaaccagtacaacgtagtattattatttgtttagcttgtgagtggctgtgtatttatttgtgtgcatggacagtttcattcatgtacagagtgaattttagtattttatccccccccccccccagtgccctctcagctgctggctgtcttttgaagttcatcttcctcttagtttcatggctgttttgtgaatgacccactcagtgtattagagtttctctctctctctcttttagttttttgagacagagcttctctgtgtagccctggctgtcctggaactccctgtgtagaccaggctgaccttgaactcaaagatccatctgcctctgcctccccagtgctgggattaaaggctgccccactagcatctctttctttctttgttttttttttcattatgggtggttgtaagccaccatgtggttgctgggatttgaactcaagaccttcagaagagcagtcagtgctcttacctgctcagccatctcaccagccctagcatctgtttcttaagcttggttgtcaggtcccttcttggagcatgaacaacttaaccagtggccatatctctgcagaaacactaaccctccagtaacactaactgtctacaaaccctcagagcctcactcggtagccctggaactcacatggggaccaggctagctttgaactcacagtgctggggttaaaggcatgggccaatcactttgaatcttgatcaccatatgccaagtgtctgtcctctgtgacccccccccccccaacatctttttgatatcacaatagtgacagacatggctacagggacccaggggacagcttggcctcttccttgctgtgtgggttggacattttgtctgactgaccctctgttttttttttctccgctgaaatggctggttaatagtcgcttttcatgactgtgtgaagggtaaatgcggctaggccctgaagctcctagagggttgcgtgactcaaagaaagcctgagctaccattagggattttctcgccatcctagctgtcttgagattctgtgcaggagtgtctgctgtggcctccttttgtgtttgctgtgctgggtgcctgtcaatctcaggattcaatccttccagcctgaaattgtttttgagtttctatttttattcatatttgatcatttcctgtctaccattctttctttgtacgagtagtgagatatcttgaggcctttgctccaataaacacatcttctgtatcatttttttttcctttctcttttttttcccctgagtttttcccctgagacagggccttgatacatagctggaactcctgactaggctaacctcggactcacagagatccgatccgctggttctgcctcctgagcactgggatcaaaggcctataccagcagctccagctttactctttcttttatttttacttatttatttttttggtgtgtgtgtgtgtgtgtgtgtgtgtatttcagaggacaacttttggttttgctaagatcacccttacccactgagccatctcaccagcccacacctacttagctacaatctttctagatatcttcagtggaattttatagccctttaacccttcactatagttttagaagttgtctgtcattcatctatagagtgtatattaagaatgtgggggggaggggagctggagagatgactcagcagttcagagcattggctgctcttctgtaggtcatgagttcagttcccagcaacatggtggctcacaaccatctgtaatgcgagctaatgccctcttctggtgtgtgtctgaagacagtgacaatatacataaaaatacataaaataaataaataaatcttttttaaaaagtgtgtgtatgtgtgtgtatgtgtgtgtgtatgtgtgtgtgtgtatgtgtatgtatgtgtgtctgtctgtatgtgnnnnnnnnnnnnnnnnnnnnnnnnnnnnnnnnnnnnnnnnnnnnnnnnnnnnnnnnnnnnnnnnnnnnnnnnnnnnnnnnnnnnnnnnnnnnnnnnnnnnnnnnnnnnnnnnnnnnnnnnnnnnnnnttctttccttctaccgtgtgggtccctgggatggaactcaatcatcagacttggccgcaagccccttactcattgagccatctcaccagctgacttgtgtttactgaaaaatttgtattgtgtgtgtgtgtggaatgaagggagggagggaaggagagagatggattcccagctgctgtgcaaaggttcttaggtgctgaatctgaggtggagtcttgcaggggaaggcttcccagatcctctgtgtgtgctcgagactctgagattgtgagtagcattaatctgaatatggcctgtgggtttactttcctttttgttgttgtggtggtgatggtggtgatagttttttgagacaaggtttctctgtgtagccctggctgttctagaacccagacctgatggcctctgcctcttaagtcctggattaaaggtctgcagactctcttacatatccgtacctccgattaactgtaagaacaaacacagtaagagctgagtgatggtggtaattaactgcacaatacaatgatcagggtcgggaatggggctccttctgataggtgtttgtcaagcatgcaggaagctctgggttttcccagcaacacagcaaccaggcgtggtggcatatcacctgtaaccccagcattcaggaggtggaggcaggaggatcaggagtttaaggtcaccttctgctacatagggagttttggggtcagcctgggatccatgagaccctgtctcagaaatgaaatagggtctagggagactgcttggcaggcaagagcagttgctgcgtttgcagaggaccttactttggttcccagcagccaccttggatagctcagaaccacttgtagctacaaggcacctttgatcccatgcacaaacccacagagttaaaacaataaattttttcgaggccagcctggtctacagagtgagtttcaggactacacagagaaaccctgtctcgaaaaaaagataataaataaatttttataaaagacagctgtctttaacagccccccctccccccagggtttctctgtgtagccttggctatactgaactcactctgtagatcaggctggccttgaactcagaaatccacctgcctttgcctcccaagtgctgggattaaaggcgtgcgccaccaccgcccggcctaacaggcatactttgagaagtggtttcccttttctttattgtgtgtggacgtcttgtgtgtgtatgcatgacatctcgtacgggtgtaggtcagagggcaactctgtagttctctcccaccaccatctaggtgcgggaggttgaacttaggttgtcagcttgctgggaggctccttttcctgctgagccgtgcttgctggcccacaagcatgttttaatacaagtagtgtgactggtttctcaaaatacctattacctannnnnnnnnnnnnnnnnnnnaatacctattacctatgtctgtctgtctgtctgcctgcctattcgagaatggacttactttatattcccagctggcttcatgttgagtcacccttctccttttgagatggtctcatggagccgacaacacaatcattttgatgaccttgaacttgtgacccctttgcctccacttttgaagggctgggaatcctagagctgagctctacatcctcacccttttgtgaatgagaggagacaagagtgttcgacaagatgaagtgttcggaatggctgggtgccggtgatgagtgagccgagcgagcgtggcatacgcggcttacatggtgttggaaagagagatggttcgcttacgagcagaatagatcagaagggtacaagcaaggtcccatcaagccgttcgttcagaatggcacgagatttaaaactcagccagttgtttatttctggagtttatacctagcacttttggattattgttgaaagcacaagtatggtcacaagtaggctttctcctgatttcatccatagcacaggcgagatgctactggtgcctacagtggcatccaggtctctgagaggattgcaccccaaatcgccacagatagtgtcccttgccatccgtctgttggggtatggtcgacgacaaggaagtgtctggatttccccgcccatgcatgatgaccggggcaagccacactgtctttgctttctccttcctaactgggcacagtgtgactaactccttccgtgatgggcatggggttacaggagccggtgaggtatgcgcttggcacacagcctgttgtggaggaaaacggctcgggaaagttgggagttttatgaatgtcattaaatctttgcccaagaagcagagacaaccaactgcgtgctcttcctgactctgagcaggcggccccttgctaaccccaaactttttgaagacttgcttcgttcttgaaacagtggcgatagagccagggcttcatccataatattcagatgtgcttatgattttttttttgtttgtttgtttttaagagtgggtatatgagtgtgtgggggggtcaggtatgcttgtggaggctggagaataactttgggggacattattcaggaagctattttctttgaggcagggtcccagtggtatggaataggctagactgactgagccctagggatcttgtctgtctctacttcctgagccttgggatgacatgggcgtgtcccttcttgtgacagggtttctctgtgtagtccaggttgatgaggagctctctctgtagaccaggctggtcttgaactcagagatctgccttcccttgtctcccaagttgtggggattaaaggcatttgttcatgtctttaatttcttaatacgcagaatgagtaacaaggtccctgggccccagggcttcaggatagcaagccaggatccggaaaggctgcaagacttgtgggcaaagatgcctgaggtttggaaagcttggagatttaattcagctttggatgaatgtcctgatctcggaagctaaacaagtttaggcctgctcagtgcttgaatgggatcatttggcttttttttttttttttttttttctttttccttggggcgggggagggtggagatgacattcctagcatcaggacttgactgatattcagcacccttgtgaggaaacacaagaggcatgcgttacctgcctggaatccaggtcctggggaggctgaggcaggaggatgcctccagctcgctagccagccattctaaccatatgagagctagaacgtggttgaggaagacatctgaggtcaacttcagggctctgtgtgcctaggcacacatgggcacaaacacatacacacatgtactatacagttatatgatttgcaggtgtaatacacagctcagcgatgcttaatgtgttagtgacctacaagtgctcactgctggggaagggttaactgtgtaggtagggcaagcggacccccctcaaatcctggtcctggagttgtcacttagccagtcatttgtgacaacagctggcattacatagcaccctgtgggcagaccaagctcagatcattttacaaacagaagtgtcttgaatctttccatacatcaagctggagggagaagataaatgtgttatgtatttcgcatagcctagggaaacttacagaatggccagaatgacagtcatgagttagaagtggtggtatgcgtctgcgatcttgtcactcagaaaggctaagtcaggaggactgcttgacatgggaagccagcctgggctatatagtgagggctaggataacctgggctacatagtaagactttgtcaagaggccatggagatggctcagcggaaagatgtttgctatacacaggcaaggacatgagttcagatcctagcacccacattaacaggtgggtgtggtcggtcaggctgtttctgggccttgacatccatcagtttagatccaggcccagtagagatgctgtctgaagtaagtaggttggaggcaggcatcccacatcctcctggcttctacatgtgcatacgctgaatgcacacatacacatgtgacacacgtatgcacacagaaatgagcctgggagctaagatgtggcctttgctctgtctaaaaatctcattgtgtccccagctcttccccacagagactcacggttcatgtccacttcttccatttctagccaggaaaagaccttcagcctagaacatggctgaattaaatctaaatgaattgagatttaataaaatagaacaaacagttcttcagtttccatggttgcaattctgacttaggagcgacacgcggtcagtggctaccatgtcccacagcatggagcgtctgctgctccttggtcttctctgtcggtgtatgttgttcatttatccagtcctgtacctgacagatgcagctatgcttgtggctttgctgaggatgtcaggcagggtcatagacttgacgtgactgttatgtaggagctatttaaggttctgtggatggaacccagagccttgattgtgctaggtgtgtgctctaccactgggccacaccccagcccctcactgggggattctaggcaggtgctctaccacggagccacatcccagcccttcactgggggattctaggcaggggctctaccactgggccacaccccagcccttcactgggggattctaggcagggcctctaccactgagtcacaccctggcccttcactggggaatgctaggcaggggctctaccacagacaccccaaacaccttattgaggaattctaggctgggtctttattgctgagctgtccttcccagctctttctaccttttatggagactgtctgagtttgctgtgactagcgttgactcactccagtccagagtggttctgaactaactttccatccttttgcctcagcctcctgaagtagttctagtgactgtcctatgccaccactcctggttttgtgcctgctttaggactgcaactctgtgaccagagagcatcatctatggcttgcctggtcgctgggacccccagctatcactacccccagcctgggaggaggtagttgaggccacttagagcccctgtggtgacaggaatcgttggtggcatccgggcctcaacgcttctttggactggagtgctgcttgctgggtttcacaagcccaggcaggggcaggcctgggccctctgcttccgcacagcccaggcaggaagaactggtggctgacgtaagcctttgcgcaaacccctggctattggcttccggagccttctaccggccgtctgccacatcaaggaggaagcctagggtttggcagggcccagaggccttaccttcccaggcttaggctacatggatgtgctgaccggctacaagggcccttgggccacgggcgttggtgctggattctggtgagggactgggcttcagcgatggtggctgcataggccatggtgacaggcatgtgatccgagggtgtgtgtgagatctctagcttctgctcttactcagtttacccatgtgtgcccccaagggcctgggggcatattttggagtcctatccccctagggaggcagtcagtggacactttgtatagggcttacatgggagggctctcaggaactcagaaactgaagtgcatatgtatgtgggcagagtctgtgagatctctgtggcttagacccgctgctggcatctgagccacacatcctgtctgctgctgtctgcaaacagtgcccacctcttagggactagagaaggctctggagaacttaacacagctttcctctggagaccaactagaatgggcacctggtgggtgcttggctagagtgctggacccagccatgtgttcagggctccacaccctctcctgctgggtgccctggagagagtttgaatcacccatggaacatctggcctatttactattattattcctaaaactagcgaaaactagcgtatctgttatataattcctgttcaatatatgcctccgtcctaccttgtttttgtttgtttgtttgtttgtttgggggtgctaaagtttgaacctagtccctcatgtctcctaggcaggcactctgcatccccagattgactttgggtttttttaataacagattcggggtatcatgataggatccatctttttttataaaccgggctcacctcatagtccaggctaacttagaactttcagccctttggcctcagcttccaaggctgctatttatatgcttgtcagctgtcctggcgtcttctgttttctttttcctttgtgattcgctctacctatcatcaggcttgttatgctgggctctgagatgccctgctcggtgtgctgggagttgctcctcagctgagctgaggcttttccttgctgggcctctgttgcatatctgggcatctgcagtcattagacacccagaagctcctccacatcctgggtgaccgtgagctccttggggacgctggtctctggacagtgtcctgcattgagctcagactatgagctctttctctgtgaccattgcttcccttactctggcctgggcagtccttaaaggtgccccccaccccccatcctgactgactcaggctttcttccatctgcagccacagtattaaaagcgttctctggggttctgggccttggggcccagggagtctggccttctttcttggtcactatggtgattagacccatagggtgtgtctggggttggccaagtggtgcctcttgatctctctgtgaagactttatgcagtggagggccttgggatgatggtccaggtagcatggcctggtttactggctgcctgacagggaccccctcccttttctctgcaggcgaggccttcttaggcagctttgtgtccagcgggatggggccctcggcctcgtctcaggggagcccggtatccttgccctctgacctctccttccactcccccactcccagcaacctgcccatggtacagctgtgggctgcccacgcccatgaaggtaaggagtgggccagctgggaggggccgagggctgctgggccactgtcctcacggtgatggcaatttaatgtctccaacaccattctcaacaccttttttcaccatggcatccaggtgtcccctctagcacttagcgcttattttgttaccacagggcctttgcacaagccattcatgcctctgcctgcagcctctcaccccagcccactggctcctcctcctctgctgctcagtcctgttcccatggttacttggtaaaagacaaaagccttacctgtgtggttgttccctgatcttgtggcgtgcactttgagggcagggactggtgtatattcaatggaataccttccttcctacacacttactcctacctacctacacacacacacacacacacacaatcacacttttgtggggagcctctggcctgggtactctaggcttgcctttttttttttttttttttggtttttcgagtcaggttttttctgtttagtcctggctggcctggaactcagaaatctgcctgtctctgcctcccaagtgctgggattaaaggtgtgtgccactactgcctggctcctttttttttttcttttcagtactgagaattgaacgaacctaagactcccctcctccacctctgtctctggtggatttggagtgttggttgacattagggtcctcttacatcttgtggatcttctgggctcaccttgaacccaggacattgtagctctgggagacccctattgcctgcttttgactgtctgggccattccctacccagtggagttggaggcagaatgaatgcccacccggacaggggtgtgggatgcttgctgtatcttgcttggctgtggctagaagtgtcagtgtcaggcataacagagtggtctttcctgtacagagaaagttactaaagccatttttcttgggcctctcaggacaggcatgtgaatccaggaatgagtgtatagatgtcttgcatgaaggctgtgttgcctctgctgggtgtctgccttgggctgggatgatggttgctggtgtgggctggtgctctgcctgagctcctcccactgagctgagctgggtgagcgttgagcacaggctacctctactgtgtcattggctcattcctcagttcttcccgagatgctcatagccacagcaaacatacaccacagacatggcctgctcctgggcggtgttcttaggtctcctgccacctttgcagcatctggggctggggctggggctggggctggggctggggctggggctggggtgtccgtcttacgcacgacagacctgcagaggaccagctacctgcagctgagcgttggtttggtgtttaactgtgacgctgtagattgggcgtctgttttgttctgtgacttgcatagtgggttcttttgccttgttttgttttcctcaagatagtcttgctaagtagtgctggctgacctggaactcactgtgttgaccagaatggccttgggtttgcagcaatcctcctgcctctgcttctcaagaattagaattacatgtgtgaagccatatttcgggacaacccccatttgtttgtttgttttgtgatgaagggtcttactgtgtagcccaggctggccttaaactcatagggattcacctgcctctgcctctgcctctggaatgctaggatggaaggcatgcaccaccataccttgtgggaagccattccggactccctggccacaatacctgaccttagtttttattttgtggtaggttctcactaagtttcccaggctagccttgagctgccagccctcagtctcttgggtagtcaggattactggtctgtaccaccagagtgcacttgtgtagcgtctatttggggtcatgaggactcaaattcaggagttcgtgcatgtcaggcaagcatccggagtgccatctgtagctctgtctggtagtttgtatgtatcaagatggagaaaaggacaccagttctcagggccagggccagaccgcagacgaggaccaggaatagtgtgtcccttgtgactttccagtaggaccccagtcccaggctctgcctggccccttgtgccctgtgtgcattctcagcttgccgatagttgcccatgcttggtttgtcacctgtggccacaccccttttgaagtcacagcactctctctctttggacttcactgtaagactgggcagctagagatgctgacttgagtgttcagagacggcaagcagtcagtcctgaggcacacagcagagaggagactcatgacgactgtccatccagagttcgtactctcccgaggttgcgtctgagctgtagggtcctgtgacttcagttcaaagtcaggtttagctgcactttgatcttttagtcagtggtctactctgactctgttgttttgttttgttttgctttgctttgctttgtttttaatctgtaaaatgagaggacaggagtgtgtggtcttctcagggttgctttaaatagcgccttgagtcttctcttggttaggtccattctgactttgatcctggagtgtttgaacttctatccaagcccttgtggattttctgggcctcacgaaaggcttgaagtggcagggtttttttttttttttttttttttgggggggggggtcagttgttgccatgagaaccggtgttgaccaatcagcttcttgtaccaggggactgacaggccaccgaggctttttccaaagagaagcaaatgctagaggggcatgtgtgggtaaacatgagtagcatagacctctctctcttcttttctccttaggcttctcccacctgcccagtgggctatatccatcctacctccacctgaaccacctggacccccccagcagtgggagccccctcctcagccagctgggtcagcccagcatcttcgatacccagaaaggtaagggggcagaaaagggtgggactgttgttagccagggagggggtggcagagtgatttcctgggggtttttcttgggggtccaggtatcttatatgcagtatttacctctttattggagggtccctaagatggagccctgtgctaggaaagggctctgccacagagctgctccctccagccccttcaccaaagtttccttttcaggggttctctttgttaagccaggctgtcctggaattcaccatgtggagcagggtggccttgaactcaaaaaatccacctgcctcggccttccaaatgttgagattaaagatgtgcaccgtcatttctgacccttcgtgaatattttcttaactctctttaaaatcaataattgaatcatcttccttcctccctgctttgtgtgtgtgcagatcagaggacagcttttggagttctgtctttccacctgataggctggagatcttaccaggtctgacaacgcttgacaacaggcgttgttactgaggcgtcctataggtctgtcctcccttcctctccctccccttcctttagtcctttctcccctcccccctctcttgcctcatgtagtccacagtggactagaccttggttcatagctaaggatggccttaaacttaatatccacttgcatttacctcctgaatgctaggcctcaaaaatgccttgtcttagttagggttttacagctgagcagacaccgtgaccaaggcaagtcttataaaggacaacatttaattgggccggcttacaggttcagaggttcggtccatcatcatcagggtgggagcagggcagcatccaggcagagctgagagttctacatcttcatctgaaggctgctagtggaagactgacttccaagcagctagggtgagggtcttatagcccacacccacagtgacacacctactccaacagggccacaccttctaatagtgccactccctgggcagagcatatacaaaccatcacagagacgcagccccaaaggcccctcacctgtctgtgaatttacccacagccttttaactagctccgatagctctgaaaacgacctttggcctttcttcttttaccaatgaggagacaggcctgggaggataagatggttaaagccaggtttctattcactttccagccttgcctggcttctctccgaaggaccaggcccctgcacgttctctctctggggtacaatgcacccttgggtgaagggaggacgtctcggggttaggagtgggtaatgatcctgattcactatgtccttttctccctagatggcttctacctgcccgcaccggggaccctgcatgctcacacgccctcgtccagaactcccagtggccactcctcaggtggtccagccaaaggctcctcccgggaaggtacagggaaggatcgtgcaggccgtggtggagaccctcctccgttgtttggcaagaaagaccctcgggcacgtgaggaggtgtccgggccccgaggtgtggtggacttgacccaggaggcccgagcggagggccgccaggaccgaggatcctcacgcctggctgagcgcctgtctccctttctggcagaggtcaaagccaagggtgcactgcagccgtcggccctgagcctgtgcaatggtgtggtggacgcggggctggtggccgagttgggccgtggaggtgccaaggaggtagccaggcaggaggagaatgctcggctgctgaggcgggctgaggccctgctgcccgctgcaaggccctgtgggtccccactaccgccgccacctccactgccccccaagggtccccctgcacccccttcctctacaccagccggtgtgtacaccgtgttccgtgaaccaggccgtgagcaccgcgtggtggcacccacctttgtgccttctgtggaggcctttgatgagcgggtgggacccatccagatagcatcccaggctcgcgatgtccgggccagggagcgtgagccgggccgtcctggggtcctgcaaggtccacccggatctccacgcctggagcggccagaggttctgcgggagaaaagctcggtcatccgctccctcaagcgtccgcctccatccgatggacccccagcagcccgctcctcccgctcctccccggatgcgcgagcctacctgccccccaaggaactactcaagcccgaggctgatccgaggccttgcgagcgcgcaccccgaggcccgagcgcttctgctgcccagcaggctgctaagctctttggcctggaaccatcccgaccccccgggccggagcataagtggaaaccctttgaactgggcaacttcgccaccacgcagatggctgtcctggcagcccagcaccaccatgccagcagagccgaagaggaagcagctgtcgccacagcatccaaaaaggcctacctggaccccgggggcgcaatgccccgtgcctcggccacctgcggcaggccaggtgctgacctccactcggcagcccacggacccggagaggcctctgctatgcagagcctcatcaaatacagcggtagctttgctcgggaggcggtggcagtgcgccctggtggctgtgggaagaagagcccctttggaggcctgggcaccatgaaacctgaacctacgcccacgtcggcgggtccccctagagcccaggcccggctcacacaccccggggtccctacagccggagggggccggcagctgaaacgggacccagagagacctgagagcgccaaggcctttgggagagagggctctggtgcccagggggaagccgaagtaagacacccgcctgttggcattgctgtggctgtggcccggcagaaggacagtggaagcagtagccggctggggcctgggctgggagaccaggaacgcactttgtcactgaacaatgtcaaaggtaggtgctgggtcctgttattgttttggtggtggtgatggttttaaaaacataggatctcatgcacaagatagttaagtgctctgctgttccacccctccttttatttttggggggacagtcatctatagactatatatagctcactcgctttgtagccaacaatggtcttgaacttttatttcccttttctccatttcctgagtgccgggtgttgtggtaacagtacgtgccctgagacaccggttcatgcagtgttgagatgggtcccaggatgtgtgtgccgggcaggccttctaacaattgacccacacccccagctcccagttcttgttgagttgctatgtagtctgatgggttttgatctcaccatctctctccttaatagttgggaattagggctggtgagatggctcagtgggtaagagcacccgactgctcttccgaaggtccagagttcaaatcccagcaaccacatggtggttcacaaccatctgcaacgagatctgacgccctcttctggtgtgtctgaagatagctacagtgtacttacatgtaataaataaatctaaaaaaaaaaaaaagttgggaattaaagcaggaatagtccccactctccttaaatgttaatgtttgggtgtgggtgtggggacaggtgttacgtgcaagtgtagaggtcagaggacaaccttgggtgtttgttctgtcttactgtgtttgctctctctgtgtgtgtgtgtgtgtgtgtgtgtgtgtgtgtatcccacacagccatgagaatgcaccacagtgcacatggggaagccagaggataacttataagaaatggctcctcctctagcacgtgggttttggggttttggggatggaacccaggtcttcaggtgcctttacacacggagttacttgactgtctggggacagtctctctcgctggggctgcagacacagattctttgcctcatatctggccctttttgttttgttttttttttgctttttgttctttttggttttatgagatagggctcttcatgtagccctggctgccctggaactcactctgtagaccaggctagcctcaagtcacagaggtctgcctgcctctgcctctgcctctgcctctgcctctgcctctgcctctgcctctgcctctgcctctgcctctgcctctgcctctgcctctgcctctgcctctgcctctgcctctgcctctgcctctgcctctgcctctgcctctgcctctgcctctgcctctgcctctgcctctgcctctgcctctgcctcctgagagctggaattaacagtgtgtgtcacactgcctggcccaatccctattcttgtctctccctgcctctggcttcctattttgtttatatttatttatttattttatgtatgtaagtacactgtagctgtcttcagacacaccagaagtgggcatcagatcccattacagatggttgtgagtcaccatgtgattgctgggaattgaactcaggacctctgcaagagcagtcagtgctcttacccactgagccatctctccagcactgttttgtttttttaaagatgggctttcacagtatagtcctggctagctcaaaacctactatgtagaccaggctggctttgaactcagagaaatcccctcatctctacctctggagtgctgggattcctggctggtttcttggtcttttctcccaatcctcccatcctccctcactccctccctttctccctccctcctagtactgcatgcctgttccccacttgcccatcgtggctgctattgaaactttgattgcctttcccattatccacatagatgtgtagagtgcaggagaggagaacgaagaaaaagaccattattgtttccccagcaccccaaacactttcccggctctccctgaattcattttcccatgcaatttgtgtctacctgtggagcggctagcgtggcacagccttggtcttacgctcgctcccgcagcacagtgtgggttgtttctcccgagatgtcagaatctttacaagtatcattttttttacggcctttaatattctgtggagagcacacagcagcaggtactgtagttaggtctccattccccggtgggcattttcagtctttgcctgctctcttttgtgtggagaacgctgtgtggaatatttttgcacgtaagcacctctgtgctgtgttgagtcgctttgttctgtcctagggattcctaggaatagaccaaccgtaagccttccagtggggtagagcccggtgttgactcattcagtgcctcttggggtccagtcagcgcggggcctggagcatggagggtgctggggaaccaggtgaatgaatgaatgaatgaatgaatgaaagaatgaatgaatgcttttgaatagtaagaggcggcttcctgacaggctttagtgaatcttttttaactggaaaacaaaacaaaacaaaacaaaaaccaaaaccacaagaaaacaaaaccaaaactgtatgtgcatgtgtgtcatatgtgtgtcacatgtgtgttagtgcccacagagctgagaaatgggcctcacatccctttcacctgctgagccatcaatggcacccaacttgctgctgctgcttttgtaaaatgattgtttattatcagttgtgtgtgcgcacacgcaagcgggtgtgcgcatgggcatgagtgtctgaacgtgtgcttgctgtgtgcagatagggaggacagagaaaaacttcctaaagttgattctcctcctgcagggctcagggggccaaattcaggtcggcaagcttgtgtggcaagcagttgtggccaccggattatttcgctcagcttacttttttttgtccctttcattttcctgtctgtctgtctgtctgcctgtctggctatttgtctacctgtcatgtctttgtgtgtctgtctatcgtgtgtgtgtgtgtgtgtgtgtgtgtgtgtgtgacagacagacagacagacannnnnnnnnnnnnnnnnnnnacagacagacagacagagttcctgtgagtatctgggcatttgtgtgccatgtgcctattttaaggtcagaggacaatctgggtgtcagtccttgctgtctaccttgtttacggcagggcctcacacagtttcttactgtgtccaccaggctgccaggtttgtgggcttttgggggactccccagcctttgcctcctatttcattgtaagagctccgacatgggatctgaactgctgtccttggccatgcacagcaagcactgtatctgttgagccatctcccccccccgtcccccttttttttgttgttttgagatgaggtcttgttatagccaaggctgaggcaaactaccctcaaccttgttaccctaagtgctgccgttgcgggttttagctaccacactggacttgtttgtttgtttttttcttcaagacagggtttctgtgtatatccctggctgtcctggaactcactttgtagaccaggctggcctcgaactcagaaatccgcctgcctctgcctccggagtgctgggattaaaggtgtgcgccaccatacccggcctgggcttgtttcttttaattcacagtgaggttgaatctttccccagagcttggtaagttggtcggtgtccttgagtccttgtgtattttggagactgatcttcaacatgtttattgagccctgtaccgtgtcagctaagggcagagcctgctgccgtgctgagggccttgtgggtccaggcattgaaactgctcgggtgtaccctggtgatgtcatggcaggctgagtgacggcccagaaaagatcacgtccagctggtccttgcttgtgcaacatctcaagccaggcaggcattgttccatgtccccagcctcttagaccacagcccagggtcacctaccaggaaaagatgctcccatgcgatttccagactagacacccatacctgtatctcctgccatctcctgggttcctcccctctcctcccctcccctcccctgcctgcctcctgctgccttctgggttttgtggtctttgctagcagccccttctgtggcctctcccctggaatcctctaaggcttatttcccagacaacctagcaaggccaggtgttctgtctcactctgacccatttgtaatgtcagagcaggcttctgggacacgccctgcccccgggaggtgcagtgctgtgcctgggtctatttgcctgcgctattgttatttttctggagatgggggtttcattatggagccctgatgaggaaaaaactcactacacagagcaggttgggcttgaattcacagagacactcctgtctctgcacaagttaaaggcctgtgctgtcactcccctccccctcccccccatcctgctcagctcagcggtgtctctctttgcatcacccagtgctccagctggcctatgcctgtttcctggtagaacactccttatccattgttgactgtgcccaggtgtccctaaggcgtctgagactttggactttgaatcaggatgtgttccctgtgtgccctgtctttgaattcccccagcgtggaagtctaaggaactggtgctgagtggatgtttgctgactgactaaccgatccttttgctttgggagggatacctagccccggaagctggtcctctgatgatgggggtttgcagcagcacctggttattctgggattgaatgacaggggacaagttttctagtctgaatagggttctgtgacatggtagggtattcctttgtatttagggtggttcatgacttagtgtccagaatacctgtgcccaaaagagtcgtaagtgcatgtggaaagagaagaggatgtggttgacatttgggtcgaggaagttatttgttatctgatgcttttttttttttttcccactgttgggaatgaaaacctgtttcatgtatgctacatactggctataattttgccagtatccagcccctcaccagggattctaggcaggggctctaccactgagccacgcccccagcccctcattgggggattctaggcagagctctaccactgagccacacccccagcccctcactgggggaatctaggcagagctctaccactgagccacgcccccagcccctcattgggggattctaggcagagctctaccactgagccacacccccagcccctcactgggggaatctaggcagagctctaccactgagccacgcccccagcccctcactgggggattctaggcagagctctaccactgagccacgcccccagcccctcactgggggattctaggcagagctctaccactgagccacgcccccagcccctcactgggggaatctaggcaggggctctaccactgaaccacgccccagcccctcattgggggattctaggcaggggctctgtcactgagttctcttttctgattcctttcttgtttatcccagctcttgtggccttctctctgctcccgggtgctttttcttttgcatatctcactcttcagacagatgtctgtccttcctggcatttaccgtttattgattgagtttgtgtagagaggagatggctgagggtcctgcttcgaacctgagcttcgcagtgcgtacgttctgatgcaggtagttgggtggtgaaccagccacagtcggtcatgctgtgatcaacgcagtgaggggggtaaatgaggaaggtgatggaggagaggtggtcagggcagttccttccttcctggaggagacggaagctgaagttgtattgaatggtccagtggaagggcattgtgtgtgcagggaagagagtgtacatgcccctagggaagagatacatgtgactcgtatgaagagactggacgggacatctggacctcacagcatgagcccagagcaggggcttggctcttcatggcgactgtgagcagagcctagaggctatagggagctacagagcaatgtggttagacgtggagccccttggagcatggggtcaggtgccgcagtcatgttacgtttccttgggagccaaccagttcgcagagagtgacctggagctctgcctactggccctgggcatgaaggctcctctgagttgttggtgtctattgacaggtgacacgtgggacaagaagtaacccagggcaattcagtcagggtatacagtgggcttgtggccctgagcttggtctacattccaggcgcctcccctttctgaggccccagcagcaagtgccatacccacagctggtctcagacacagagactggtggcacgtgcccttcccatatggctgagcccttgggagtgtgtgagcctggttgatgtggcatctcccccgggacaacgaagctcaggctctggtttccaggcacagctgtggaactctgggtggctctctgtgcttgtgccctgccttaaacctgctgttcccctctgagctgcactttctcctggttcctagtatagcctgttctagatctaccattggtgtgtgtggggctgtggtgtgggttgtgtgtgtgtggtgtggggtgtgtgtggtgtatgtggggctgtggtgtggggagtgtgtgtggtgtgtgtgtgggtgtggtgtgtgtgtgcgagcacgcacctgtctgtttgtctgtgtctagaggtatttgtatgtatatgtgtctgtgttcataggggtgtgtgtctatatctagaggccagaggtgtgtcttcctcagtttcttctacccttttaaggtgtgtatgtatgtatgtatgtatgtatatctatgtatgtatgtatgtatgtatgtatgtatgtattttggagacaagttacctttttgtatcctgaaacttgctctgtagactaggctggcctcaaaatcatagcgatccacctgcccctgtttctcaaggtctaggactaaaggcatgcactacccatgtctggcttgtgttttttttttttttttaaatatgggttgtagagattcaaactcaggtcttcatattctctctctctctctttctctctcttaaagattttttttatgtataggagtacactgtagctgtcttcagacacaccagaagagggcattggatcccatttacaaatggttgtgagccaccgtgtggttgctgagaattgaactcaggacctctggatgagcagtcagtgctcttaaccactgagccatctctccagccccattttcacagtaaccactttaccaatccagctgtcatcccagcttctggttagaacctgctactctggctgttactatgcttaagggtgtgtgtgtgtgtgtgtgtgtgtgtgtgtgtgtgtgtgtgttagttctctggttgctctgatggaatatccaacgaaaatacttatgaaaggaaggaagggagggagggagggagggaataaatctttaaaaaaaaaaaaactgaaccagaagcttaaacaagctctatgaagatctgnnnnnnnnnnnnnnnnnnnnnnnnnnnnnnnngaaggaaggaaggaaggaaggaaggaaggaaggaaggaagggagggagtttattttggctctcatggtttggagtgcaggctatcatggtggggaggttgtggccgcgggtgcctggggctcattcacggagcatgggcgcatgtgtggtcaggaagcagagagtgtggatgctggggctcagtgtacgttctcctttaaaaatgtatttactgatctgtgcacacgtatctgtgcatatacgtgtatgcaggtgcatgtgcctgtgcgtgtgtggtgtgtgtgtgtgtgtatatatatgtatatgtatgtgtgtgtatgtgtggagaccgaaagagggtgttggatgtcaccttccagtcctctcctatatgtctttgaagcggggtctctctccagagctggagctcgagtcttcctggctcagctggcagacaggcagcccagctgtcttcctgtctcctgtcccttggagctgtagttacaggtgtgtgccagacgcctggctggttacgtgggtgttgggacctaagctgtagttcttagaatgttgaaacaggttctcttaactgctgagccatctgtgcaaccactctttaaaaaaacaaaaaaattatctatcacctgtctgtctgtctgtctgtctgtctgtctgtctgtctgtcttgtacacgtcaaggtcagaggacagctttcagggattcttctctctgtttaccatctaggtcccagggatcaaacttaggctgccaggctcgcttacaggagcctctatgcactgagccttccctggccggccgtgcgcttctcactcagcctgagtcagcaagggacctagggaaccgtcacaggagggaccagtcagagcgagaactccagggccccagagtcaaggggtgtcctggccgggccgcccctcctctgcccccatctgcaggtggcattgctcctgcttccgtttcccctccctcactttcctttcctcatccatcctgtcactgtaacctgtaagttaagagcttgatggctgtggctctggggaataggacccttggggaccagagccacctccctccctgacccacttctgtccgctctcaccacttaacattggtcggggttctcctgtgttggcctggtttttaggcgctctaggcaaccctgagcgtcatttcaggaagacttcctggccctactctctctgcctctggggactggccctgtcccataggagccgcttggctgtctctctagcacgtttgattctgggctgtctaggctgtctgggctctctctcagctcccatcccccgcttatgtggctacactctatcctagctcttctgaggctctggatggctgcatctccatcttccccaggagaccagaaggctctgtcagactctgagcttgtcttgggcggggacagtgctcttcaggactctgaagtttttggggcacagggagatagatgggggtgcaggagctcagttgctgcatcttaagtggggccacctgtgagggtcctgaatatggcctactgtagaccctgtcaagggtgcccagacagggtcctcagtgggactccgaagccatctgtgttggcggtctctgtcacctgagacattgctgggccaggctaaggctgactacatgtatgcaggtgcatgtgcctgtgcgtgtgtgtgtgtgtatgtatgtgtgtgtataaactttgatcagtttatttatttactgagacagaggctcacaacgtagcccaaattggctttaatttgctatgtagccaaggataaccttgaatttaaaatccttttctgtgtgtatacttggcgtccctctacaggggtgtagaacctcgggctgctaggtaagcgggtttgccagctgaactgcattcccagcgtcttctctataccatttgtttgttgattgcatgcatatgtgtgtgtgtgcgtgctcgtgtgtgtgtgtgtgtgtgtgtgtgtgtgtgtgtgtgtgtgtgtgtgtggacatgtggacatgttaccatgttaccttatatgtggcaaggacagaagacagccagtaggagctggttcccctccttccagtacgtgagttccaggaattgaactcaggtcctcaggcttggccgcaagcacctttttttcttgctgagtctccctgtcagttttaatttttaagtacatttctttgggctgcagagatggttcagtggcctctagggcttgttgtggaggaggacccaacatccttctctgggctcctctagcacatcacacagacatgggtgtagcatatacatacacacataggcacgccacttacatgcataaaataaagatgaaagagaatggcatgagctttgtgtgttcatgtacatgtatgggtataggcatgggagctgcacacgtggagatcagagggcatcttgtaggagtccaggtctctcccagagggtttagatgattaaacttgaactctggtcttcagcctcctctttgtccccctccccctttttttgctggggttaaaggcatgcaccactgtgcctgttcgatagatttttattgtgtttaaacttgtgtctgctagtgtgatcacaggtgagagtgacagacatgcttctggggtgggagggatagttgggaagttttggggccaaagatccctcagtggggttcaagggtcctaaagggctgttgttggggttgccagagggtttcataggatatacgtggagggcggggtggggggagaggttgtgagaggtgtcattgggagtccggactactgctggctggggattcactgccacctttggcctccagggcatggccggactgatgatgagtgtgatcgagccaggcatcgggaggatcggctgctagggacacggctggaccgggaccaggagaagttgctccggtgaggactttggggcccgagagcgcgggctgggggcttctggagtaggggtgttgaggtgacctctgcgctccctctaccatggtcctcgatcaccttaggcttgtctgtccgcgtgactcaaggtccctccagccactgttgaagacccttagctgttcccaggcgctacgtgcctgtcagctccctgggctgtggctctcgttcacccccccccccccatccctannnnnnnnnnnnnnnnnnnnggctaccagctgttcccatactgtttctctttgcagagaaagtaaggagctggctgacctggcccgtctacaccccaccagctgcgctcccaatggcctgaaccccaaccttatggtgactggtggcccaacgctggcaggctcgggacgctggtctgctgatcctgctgctcatttggccacgaacccctggctgccacgctcgggtagtacatccatgtggcttgccggacacccttatggtgagtgtagcttgagggaagactgggaccaagttagtctttctctgactcccagtaaggtgggagtgacgtatgtgtccccagtctgcctgaactcttaaggttccttctgggattctcagtggacatcacggactatggtgctgtcagcgggctgagactctcctgacatttgtataaatttggctttctccccctaggcctgggacccccctctttgcaccagggcatggcccctgcatttccacctggcttagggggctccttgccgtcagcttaccagttcgtcagggacccccagtctggccagctggtggttatccctagtgatcacctgcctcattttggtaagtgacccttgagtcacagccagggactttcctggccacccatagggatggaacagctctgtatatggggtggggacaagggggtccagggaagcctgaacctcagttgtgtcttgggaatttcatgagaatttagttagggtcacctgggtgtccctgtcccttttggggctcactctgcagaccacggagtgtgtggttcccatggtggcaggttggcaggctccattctatgtgggggttcgggcagcgctgcggtgcccatcagtgtagggtgaggggtggtgttccttatcctcagtgtaggctgaggaagccatgtttgttgtgtctgcattggatcgcagtgtctccctctgaaaactgggtgggagcctgcacaggaatggaggctatgatgtagctccctgttgtctgtctccgcagccgagctgatggagcgcgcggcggtgccgcccctctggccggccctgtacccaccaggccgcagcccactgcaccacgctcagcagctgcagctcttctctcagcagcactttttgaggcagcaagaactgctctacctgcaacagcaggcggcccaggccctggagctgcagcggagcgcacagctggtggtgagtcctggccccgtggtgcccagtggtgggaggcagatgccctaagtaagccacactgcctgaagatagtggcagtcaggaagggctccctgtgggaggaagcatctgagcagagactctggttgtcatggatgacacccagcacagcaccccatgagcagtggaaaaaaccaagacaagagttgacctgtggggctggtgagatggctcagcgctcaagagcactgactgctcttctggaggtcatgagttcaaatcccagcaaccacatggtgactcacaaccatctgtaatgagaaacataaaaaaatctgtgggccggagtgagccgggccagagtgagctgggccagagtgagctgggccagagtgagccgggccagagtgagccgggccagagtgagctgggtgggggacaagagggagaatggaagtggagtagggggagttgacctgtggattagagatgtttgtactgggaacacccaaggggtctcagagggtcctctctgtctttggatagttacttccatggtctagaaggttctgcttccaggaagtaagggtactagtagttagttactcagtccttaggtccagggggccacgggagtggcaagtgtgcggagtggtcttgtgttttgggtagtagctgctgggggccctgtaagtactgcttaccctagagctaggtttctcatgttgctgtcaaataaatgccccagtgatttcctgttccccactgaggtgcttgcatgatgagacttagtactgagtaggtactaagcgctaagtgccagggtatgggttctcccattattgttaattgcttttactgtgaggggcccagctgggccagggtcctgatggaaatctctgcctgcatggtgtcaaggagttttaggccatggttcctcctcgtaccacccaggactccgtgggttctatagaacctgctctccgggttctgtagaacatcacgtttattacatgcgcaccatggtagaattctgtggtggattgattaccttggggaggggagggctgggtggcctggacctcggatctcgcctgatattttctggagtggaaagcaccagggactgggcaggcgatggttcccgccatgccgaccccacccattctcccgttcctcagcaggagcggttgaaagcacaagagcatcgaacggagatggaggagaagattagcaagaggagcctggagaccacgggcaaggccggcctgagtgccgcaggccctgggctcctgcctcgaaagtctgccggcctggccaacggcccggcaggcagccacggcaaggccgtgagcccacccccgtctccccgagcctcccccgtgacctctctgaaggccaaggtcatccagaaggtggaagatgtgtctaagcctccagcctatacctaccccgccacacctagctcgcaccccagcagcccaccacctgcctccccacctcctacccctgggctcacccgaaaggaagaggctcccgagaacgtggtggagaagaaagacctggagttggagaaggagacgcccagtccgttccaggccctgttcacaggtgggaatgtaggacaacggctgccttgccctgggacactgcgtttccgagtgtttattggcttggtttccccttcagcttgtctgttcatatgctcgttcattcattcatttgctggctcactcatttatccactggatccattcattcattcattcattcattcactcagtcctttttgctgagtactctgtagagcccactgcccaactctgaaatgaatgcaactgagatttcttcttggtcccttgtaagtggagtgcaggagacataggcctgatagtatccctgcaggatgctcagggcacagcaaaaagccagacctgggaactccgtatgtagtcaccctgggaacatcagcggttcccatctgggcagcctccttgaccctcacacatgttgttccagcgcctggtagtcatcaggactagccgcaggtggcttttgggtatatgtctgcatttctggggaccataaagactgtgaagttgtatttgggaggatttgggttcagtgccgtgttgcacggggactggcctgctctggagccctttggtgtgatgctatgctaagggttgacgcatgcctggcctggagcatacgccggcacacgtgtgctccgttccctaggctcctcctgctgggcactgcccaggtgtgtgtcaggcttaaagctgcctcggtcattccagccggccctgacactgaggcttaaactgtattactgtgaaggattttgctctgttgtgttttgagacagtgtctccctatgtagcctaggctggccttgaactcacagtgctggaattaaaggcatgtgctgccatgagagttttgaacacatgccttattggtgtgagatacagcctgggctgactgacagatcttcatagagcttgtttaagcttctggttcagtttttttttttttaaagatttatttattattatgcataagtactctagcttatttacttcagacacaccagaagagggtgtcagatctcattaggggtggttgtgagtcaccatgtgggaattgaactcaggacctttggaagagcagtcagtgcccttaaccactgagccatctcaccagcccccttctggtccagtcttgattcatcttcatgaggacaagaaggtggctgcagactttgctctcaaggctcagtcggacatgtagaagggtcctgggttatttcagagggcagtggaggtgaggcaggggaccactgctccctaccctgcagcttgtctagcagggaacagagccttggggagcctccttcactgacatcttctgtccttgacagatattcctcccaggtatccattccaagccctgccgccgcactacgggcgaccctaccccttcctgctgcaacccgctgcggcctctgatgccgatggcctcgccccagatgtgccactcccagctgatgggcccgagcgcctggcactgtctcctgaagataagcccatctgcctgtcaccctccaagatcccagagccacctcgggacagcccagaggaggagcagctggctgaccgggaggtgaaggctgaagttgaggatatcgaagagggccccacagaactgcctccccttgagtcaccattggccctgcccgtcccagagaccatggtggccgtgagccccgcaggtggctgtggaggtagtcctctcgaggcccaggcgttgagcacagcaggtccgggctgccgggagccctctgaagtttcagactttgcacaggttgccgagccgcagatagaactaccgagtaagacagagcaccgcatgactgccctggagttggggacacagctgacacccgagccactggtagagactaaggaagagccggtggaggtgcccctggatgtgccgatggaggagcccaccacagaggcagggcctgaggacagtctgccccagccatctttgactgagcctcagcccagccttgagctctcagactgtgatttgcctgtcccagagggccagtgtctcaacctggaggcccaggaggctgtgcctgctcctgccagtacctgttatctggaagagacccactccgaatccctcctgcctggcctggatgacccactggccggcatgaatgcactggcagctgcagccgagctgccccaagccaggcctctgccctccttgggtcctggagtcccagccggggagaagctggatacagcccccagcctcgtcctggaacacagctttctgcagggcatcaccctcttgagtgagatagctgagctggagctggaccggaggggccaggaggctgcaggtaagcattgggctgaaggcttccaagactcttattcagtggtgggggtgcatgcctttaatctcagcattcctgaactatgacttgcttgttccagagctcagtgtctgaacctggaggcccaggcctatctctgtggttctagtaaggccaacttggtctacgctacccagatcttcagagtagatttacacatttaggttgttttttgttttttgttttttgtttttttttcttaaaaacttcaaagattgccagaatatgttttattcacagattttttgttttgttttgttctgtttttgcttttaattataaaataaggcttggtggcataggccacccatccatcccagctacatgggagcctgaggcaggaggattgtgagtttaaggccagttggattagagaatagaaggccagccaaggcaactaatcaagaccctgttctcaccataaaaagtaaaaagagggctgaggtgtggctcagtggtagagcacctgcctagaatcccccagtgaggggctggggtgtggctcagtggtagagcacctgtctagccaagagggtcttggtatcatccccagaagtgcaaattaaataagtaaataaatagtcccctttctggttcaagtgtcagttgggatagtagagtgcttgctttagccattgaccatgggttccatgtccagtattgaagtggagctaggagctgtgagaaacgtgtataaccagaggttccattgtgatggacttaagcccccaggcccaccccctcccccctgtgtcttatgaaagcaagagttttgagcaggtgggtgggatgttggcagcaagaggggtgactctgtgggtaaaaaggcacctatcttgagccctggaacttatgtagtagcagaggaaaactgattcgcaaaagatgttctctgaattccacatgtgtgctgcggctatgttagatcctctgcaattcccccaacccacccatccccccaaaaaagagaatttaaatgctcttggaaccgaagttgagcaatcaggacctaacattaagtagagtctgggtacttaagtcgtcttgagtctttttctcctgtgattatccggttggttcttcctttttctgcctctgtctcctgttctacttttctctgttgacctcgttttttgccaggctcgttctcctcactggggcttccaggagttcctcccatgccttctggcctgctcagctgggctgagtctgtatctttcccagaaattctaggaagaactctgagacacctcatcctgggcccactggggttcatgctttttagtacaaaaagcctggggagtcggcaccaagggtaacgccctgttgcgtgagtgtgaagatccctagaacccatctgaagctagctaggcgtgcatgcctctgaaattccttggttgctccaacagaattggaggcagaaggagaagcattccaggaattcagtggcctttgagcctgttgtctacacaagaacaagacatactttctcagataaggagggagactgacacctgacttgtgtgttctgtaggggtggggccactcacctatgaatgcacacatgcacacacaaacgcacacacatgtgtgcatgcactcacatgcatgcacctgcacacatgtacacacacacacagaggaagtccttttgtttggggagcagggactgctttcatgcacctctacactggacccctgttgcttttttgaggaatctctcccaattctactagtgacaaacccccaaatcaaaggccagccatgagcaacatctggacccatctctcagtcaccccctagtagtgacagccacaagctgatgtgtgtgcctgggcccctttgactagagagtttctttcattctttttattattttttattttaaagacagatatgaagcccaggctggtctaggagttagagcaattcccctgcctcgtcttcctgagtgctgggattgtaaatatgctgtagacctatccagtcatttttcttctgtttgtagatgcctgacctttgcctgtctttgtttttagactttgactccctctggaaggttcgttctcgttctctctctctttctctctctctctgtctctctctctctctctctctctctctctctctctcaagttagggcctgccctaataatctctaccctctgtagaaaccattgtacataggccacacccccttgcgcctggttggtcggaatgtcgcatacctgccgtgctggtatttagcaggctgcagcaggaggctctcaagatgactaggattcacatccaatttgctaagttaggggtctggcttggaatgtgtcttctggtgcgctttggaccaaccaggctggctgtgtgaagggagaaggagcaggcaaacagccgtccccttctgtaatttggcttccaccatcctctgcccccatggggatgctgaagccataggggtggggcagaacaggctggcccacttcagtctgatgtgctaggaacctggtgggttcactgctgcatggagttcatttattttacaaataaaacctgggctggagagatggcttagctcacaagccaacatacaagcataaagccctcccgctgggtggcacagggctgtcattgcagctgtgagagccagtctgaagaactgttgtaaagcaagaaggtctgaagctgtagctcagggtacagtgggtgccacacagagccctggttccatctcttgttctgtataagccaggtgtggtgggatagcctgtcacccggcagaacccagagtgtctggggctcaaagtcactctcttgtgtccaggctagccttgacacatgaggtgctgtcttaaaaacaaaaaagaaatggagacatctttaggagtccaaggccagcctggtctacctaagtgagtcccaggtcagccagagtaaaacaaaataaacaaaacaaaataaaaattcaatgattatataaataaaaataaaaaataaaaccccaaaccactgatttttcaatgagcgaggaggaggtttttttttttttcttcttttcttttttgtcacctctgttggcagcagtaattctggttgtaaccggttcaggaagacactgttgccatctagtggggagagtcagggaggcttcagtgattgatggagcttgtacaggacagtccccagcagagtccatcccgcattaggaacagggctgcggagcctgattattgttaagggctgggattactcacgctcaccctctaggccttcagacacggggggaggtttgcatttttttcctcaagcacgcaaaactggttaactttgagactggaaaaaaatatcagttcgaaaatgcaaagtgaaccaacgagacagctcagtgagggaggtgcttgctgctaagcctgaagatctgggttcgattctctataactcaggatgcaagtagagaaccaattcctggaagttgttctttgacctccgcatacacactgttgtgtatatagcacattttctttctctctgtttctctttcaaacacatacacgtgcacatacacacacgcacgcgcgtgtacacatgtgcgcgcacgaacacacagtaataagttaaaataaaaataaaattaaaatagtaagacacggtggttgcaagtctctaatcctagcgcttcggaggctgaagcaagaggcctgtgaatttgaggcagccctagctgaattcagccaggcatggtctcacagagctcaggaagccccaactccttatgcaacaaaggataaccttgaactcctgaccccccctgcctctgcttctggggtactgagattactgttgtgggccagtatgcctttttacatggtgccgggaattgaacctcaggctcagtgcttgctgggcaagcacattatcgactgagccaacatccccagccctacactgtgttttagtgtttatacgggaggctgggtgtgttaggaatattggaacacgagagtacattcctgaactctagcacacacggggtcacatcctcccccagaggagacctgtgcgtgttggggcattacacctttctccttgatttctgctttttaagatacacgtttttgtgtgtatgtgtgtgcaggcacatgtgtgttagtgttaggggcacatgccgtggcacgtgtgtggaggactgaaaacaatctctggggtctcttttcccatcacaccctgcttgccacaggccatgccaggtagctgattaggacttctggaaaatttcctctgcctgcctcctgcctccgcttaggaacactgcaactgtaatgtgttactgtgctgggctttacccacgtcctgggtatttgagcacagtaagcctttctctcagccacctacttctctagtcaagtttgtgctttttatttctctctcttttattcttcttcctcttccccctccccacctcctcctcctcaaagggtttctctgtgtagccctggctgtgctggaactcactttatagaccaggctagtcttgaactactagagagccacctgcttctgcctctcaatacacacacacacacacacacacacacacaattttaagtgtgtgtgtgtactgtgtgtacgtgagtgctggtacaggaggcttggatttctcaggagctggagttacaggcggctgtgaggtgcctaagtgatgggtattaaacccagatcccctttaagagcagaatgtccccttacccgctgagctgtctccagccatttgtgctttcccccctccctggaatttatttgtttgtttggaaagagggtctctatatagcctgaacccagtcctcctgctggggtgacgggtgtgaaccacacctggttccctagacctgttttctgatgtgggacacaacatattcactaaggagaaatcaagtagagacgcgtggggatatccattgtcctgggaaggaacctctgctagtgtttggttactcagaagtattcctggcctttcacacacagtgcactagaccacaatgctgtgtggctgtgtggcccagagccagggctgactatagtatctgggagtttaatctggcctcttgatggctggctgcatgggtacggccatcttgcccgtggtcaggtcccagcactgacttccctgacctctctcccttccccagatccagagccaaacctggtggtgcgaccctccctcgaaagcctgctggcagccagcagccacatgttgaaggaggtgctggagagccccttctcagacccgctcaagaacttgcggcttccgcgtgaactgaactccaataagaaatatagctggatgcagaagaaggaagagcgggtgagcccttgtcctcccttcctcccggaggcctgagaggcagaggcagatgggcaggatccgaccatccagctaccttcacctttttgctatgtggccctcagttggtcatctcccctctcttggctttcctattgttctcacacggtgtcaggcctgtcctgtgggtactgtgtgatggatcagcatgaaagcataatggaaatgaggcctgggactacccttttctgcctttgtggtctcaggtagcttgaaggacagacttcgaacctgtgtgtgtaaataacgcacttgttatttatctcattagaccattacttctgggtagtgtttagtcgtgtcatcttaagtgtgggtgccactcggcaaggttggcattaggcaacagcaagtgcaaggctaagacaggaggatatgagagttccaggccaggtgatgctacttagtgaattccacaccaacctgaactcccaagtgtaatgccagaaaccctaggtttgagctcagcctcggagaaactgcacatggtggtgttcacctgtgatctcagtactcaggaagaagagactggaagattagacgttgaaggccagcctgggctatatgagacattgtctctgaagcaaaccaagcagaatagggggcagcaatgggattcaagcatcagcagacagcattcccctcctcatttgtctccctctctctcctcccgggaccccttgcagatgtttgctatgaaatcttccttggaggacatggatgcgctagagctggacttccggatgcggctggcagaggtccagcgaaggtacaaagagaaacagcgggagttggtcaagctccagagacgccgggactcggggtgagtgtctctctccccagtttgtgccccatcctggatagctggtccgtaggtcgactttggtagtggtcaggtgtgtgcgtggacccaagtgccccactccgcttcccgcccaccccaggttcctagccgagcctgtgaattctttttaagggacaggcacgaggatgcccatagaagcctggcacgcagaggccctggcaggccgaggaaacggacccacaccctgagcgccctgtcgcccccctgcaagagagggaagagccacagcagtagcggaaagtaaggctggcccctcccctcggtgggttgcggactgactggtacccagctcggaggggaggagcagggcccccctggacggcgcccaccgctgggcgccaggggacctggtcgtgcctggcgttctgatccctgaacggcagctcccagggagcccggactgctgccctgtccaggagggtgagccaagaggagattggaaagaccctcagtggcttaactctaacccgaactcttggccccgccttctgccccaaccacttcctcaccattggagacaaacttctgcttctttccatggctcctccctaccggaagtaccatccaactccaggcttctaggacagtctggatacaacactgtcctcctgggattccacaggagaccagggctgctctctggggacaaggtcctcttgggtggcactgcagccatttcagaggggtcctcctgaggttgtcttgattgctggctgggatgagggctctttttctccagggctaggcatctgccagatgggctcagcccccctgcatacgtgtaagcaggccagatgtggtgcttaaggaaaggggttggtacatcagagtgggtggattctaggtgcttgtttcaagtgcttggaaacaaaaagttgtcttggagtggccacaggcagagtagtaggatggtcgtggtcttgtcatgagagaatggcccccgtcttgcggcatcttatagttaaccttggatgttcctgactggaagaagaacaagaggtgaacatatgtccatcgccagcagcaggagacggtgaacaagaaatgatggggaatagataaagcagcccgggtcatcagcagtgcaggcccaggaacccgaaatgtgttactgattatactaagcttactgatggggtcccggccccacccctcctgtgactttggacaggcattagcttttctgagcctccagtttcagcttcctcatgtgtttcaaaaaaaacaaaaaaaacaaaaaatcaaaaccaaaccaagaaaaaaaaaaaaagccccaaaccccaaaagccagtcatgagtactctggggctagagcgtgccaggtacagtgactggctagcgtgcacaaagcggtggggtgcggtggcccagacctgtcaccccagcatttgggaatcaaggcagattcacaaattgagagacacttgtctctgtgtccctgctctttagacaagggggctaatgcaggccttccccttcctcccatctctctgtgtatagattaccttaagatttcccaaacttagcttttggtgcaattttggtaaagatatgacttactctgtgtgtgtgtctgtgtgtgtgtgtctgtctgtctgtcaccccatcagggagaggctgatggaggatgctgacttggaagttttttttttcttttccccatctctctgtgcacaccattcactagcattaacctgtctccccacactgattatcctggcatccaccaccctttcttctttttacccggagagcccaacccttcagggccacatgggtacattggccttccctgttgcccgtgacctggccgaggtgctgaccctcatggtgtgtttggctttcaggctgagcagcaagtccttgctgacatcagacgactatgatctgggagcggggataaggaagagacacaaggggcccgaggaggagcaagaggccctcatgggcatggggaaagcccgcagcaggaaccagagctgggacgatcacgactcctcatctgattttatgagtcaggtcagtaaacagctcagccttgtggatttacttactgggacaaaggtctcaacttggaggaccataggtcctacctgaagaactcaaccttctccatgggggtctcttgagccctgcttctgtagagaactggttagagttagcttcctcactgctgggagaaaaagaaggcccaaggaagatcaaggacctggcaaaggaacagggggaggaggtagggctaaaagctacatcatcgggttgtgtgcgctgagacttctgcttcggcaggcgggaggttagagcacacgtgcgtaaccaaatagcggtagctccgttgtttagcagtgtaattgtttaatgagcaccttgctgttgcacttgggctcgatgccattgtgattcaggctgacttctgcaggggtaatttctcatcgctacagagccttgagactgtgtgctcacggaccgtgattctgaatgctaatgttctgcctcgtgaagccttgtgggaaggggatcttttgattgatttttgtcatcagaggggaaatgtcacgtaaaaggactggatgggggaggtagtcagtttgggggctacggagaggctcagtgggtaaaccatttgatgttcaagtataataactggagttactataagcactggtgggtgtgggggttgatctgtgattcctcatcttaggaggttggctcctgagagcaggcaggacagctggctccggatcttgttctagcttgaatgagaaaccccgcctcagtgtataaggtagagagagggaaggaggaatatacccactggtactctcctctctgcctgcgtgcattcaatgcatgtatgtcccctgcgtgcgcatgcatgtgcacatgtacgcaccccccccacacacacaccatacatatatacaaaaaaataaaattaaactaaaaaagatatcaggtcatggtggagtgtgcaggtccagcctggtctacataacaagttcagccagggcttcctagtgagaccctctttcagaaaaataaaatcttaaataaatcagagtgtaagataaaggcataaaaagattgctggtttttgtacaccaggatctcttttcttctcaggtcatggtgagagacgcttttgttaattatctcaacaacaccatcccagcctctcccctgcctcctgcaatcgctgcctgattaaagatacagagctagcgcacagaaatggcagagcgttaatgcctttgaaactgcacatttcatttcaacaaatgactaccgttggcgataaacgtgcaaggagaaatttaatctgtgaaatctctaatcattctccctggtccaggcatccaaggcacactccgggcgggcgttttcttggcagctctgacctgttcagttggacaggctggtcccgactgagcagcagcctccggcagctgccgtgggaagcggagacggaaagcagatctgccccactctgggctgtttccagccctggctggttcatccagctaccttctccaacccatctgtagcctgcttcttcagagttctataggcactgtcaggcagggctgtggaaagccaggatgggaaggcgggtgccagccaggattgttgccatggcaacagcttttaataagtgattactaggccaggcatctttaaaacctttaaattttatgtgtatgggtgttcacttgcatgtatgcctgtgtaccacgtgtgttcacggcccgtggagaccagaagagggtgtcatctcctggaactagagtcatagatggttgtgagccaccttgcgggcgctaggaatcgaacgtgggacctcttgaagagcagccagtgctcttaaccatgtagttatttttccagaccccagacaaggcatttctagtaagtgcttttatttattttatttgtggtttttttttcgagacaaggtttctttgtatatccctggctgtcctggaacttactttgtagaccaggctggcctcaaactcagaaatccgcctgcctctgcctcccgagtgctgggatcaaaggcgtgcaccaccacgcccggctgtatttgtgttttaaaaagacttatttctgttatctataaattagtgcatcctatgggagtgtcatgtcccctgaagctggagttacagggggctgtgtgttgggaactgagcttgggtcctttgcaaaaagattacaggatcttaatctctgcaccatctaactcctcactttgtttatttgtgtgggggatggtggtgcagtcgtgggtgtgggtatgagtgtgggcatatgtgggtgtatggggcctgtgtgggtgtgtgggtatgggtgtatatgggtgggtgaatgcgggtatagtaggtgtgtatgggcatgtgggggtgtgagcgtatatggatgtgtgtggatgtggcagtgtgttgtgagtgggtgggtgtatatgggtgtgtgtgtgtaggtaggtaggtatgggcatatgtgggtgggtgtgggtgtgtatgggcatgtgtgagtgggtgggtatatgtgttggggatgtatgggtgtgttcatgtatgcatgtgtgtcaggtaccctcagaagtcagagtctgttttctccattatctgggtcctagggaattgaactcgggtcatcaggcatggtgaccagtaccttcaacctgctgagccgtctcactggccctaatacctgttacatggaccttacttccctggttgtctatcttcacgatggcctcgtgatgctcagacacagccccattttagatggaagggctgaggactagttaagcagtttaccacgtctaaagggtatgggatggtagttagcccagtctcctaagcatctcaacctgagactcactttgctatttggttgtatgtcttaaactgtgaccttccttccttccccagctaaagattaagaaaaaaaagatggcaagcgaccaggagcagttggcaagcaagctagacagagccctctccctcacaaaacaagacaagctgaagtcacccttcaagttttccgacggccccgggggaaaaccgaaaaccggtgggggctgtggcaggttcttgacacagtatgacagcctgctgggcaaggacaggaaagcactggccaaaggactcggcttgtctctgaaaccctccagagaaggtaaacacaaaagagcttccaaagccaggaagatggaggggggcttccaggccagaggccagcccaagtctgtccattctccatttgcctcggaagtcagcagtcagtcttacagtaagtacagccttgcgcttcaccgcatggtgaacactcgtcttatctgctcctaatctctcttgccctcctctgagggacttcagggtttcttgcagctttgccctgtgcctgaggctagatgagtggcccccaaactgggaatttcgccattgagtggcagatgtattgctggacagattggtgatcggtgggcagaagcagatgttagtctctggccttccactggcctactggaagccatcgttgtgaagaccttgtgccatcgagttggtagccacttagcttagagtcctggagagtaacttcttccatgggctagagatgatgggttcctttgcctgtaggacgcgggtcatttgtgccatgtgtgtccccgttcacgtgtctacacacccatacacatgtacatagccacacacgtgtacacacctacacgtctacacatccacacacccatacatccatacatgcctacacacccacacatgcgtacatacccacacatctacacatccacacacccacacatgtatacacacccacacacgtgtacacatccacacacccatacatccatatatgcctacacacccacacatgcgtacattcccacacatctacacatccacacacccacacatgtatacacacccacacacgtgtacacatccacacacccatacatccatatatgcctacacatccacacacgcgtacacccccacacgtctacacatccacacacccacacacgtgtacacatccacacatgcctacacatccacaaatgggagaagaaagtatgagcctaagtaggaagagatgaactggaatggaccaggccctgtttgatccacttgcccattacagctggctgtcgtggccagatgtgttctcacttggccttgtctactacagtagccatgtgtgactagggagcaagggatatggagaagcctacaggaccaaggggctgactgagcttttattccatctatgcctgtgggtttttaaagcaaggcaactctccttggcctgtgtgtgccctggccctctgcttgacaggggaatgggtacacacctgttctgtgtggacaggtatctgatgtctcaggcaggcaggaacaaggagggcaggagtggcttctcccatctggtccgtgtcacagaggttgacttggtatctgcagggtttgcatatattgcgtcagattcgctgtgttttagacttggctggaccctggttcctgagaggtgtgtgtgtgtgtgtgtgtgtgtgtgtgtgtgtgtgtgtgtgtgtatgagtttgaatgtcaactgaaaaaaaaaataacacgtgtgtttcttctccgttttttgctggtagtgctgggaagttgatctggatagagctggatctagacattgccaaataggagtgcttctctagccccgagtttccctcttgtgtctcccactcctaacagttgctggtctgaacttgagttttcaatctgcttgcctccaccacctgagctgggatagcggatgcgcgccaccgcgcctagcttcctttgtgtgctttgcttgctttttgaaaaatgatttgtgtgtgtgtgtgtctgtacatgggtgtgcctgaaggtcagaatagggtgttggattctttagagctggagttacaggcgactgtgagttacctaccacgtggttgctgggaacagaacaagggttgtctagaagaacagatgcttgtaactgctgggccaggtcctcaactcagtgcttcctcttctttccctcccctctcccttcccccgtccctcctcctcctcctcctcctcctcttcctcctcctctctccctctctcccccttctctctccccccttccccccactctttttccagggtctcatggtgtagccttgaattcactatatagctaaggctggccttgaactcccagagctctctgcctgcgccccaccccaccccaagtgctggcacacagtttaaactcatggttttatgagctttggagttgagacattgttctaggcttcccgggtgtgagtagctcatattcagagaggtgggctgtgctggccatagggttaagttgctgtgttgtgtgaatcatgtactttgttttttttttttttggggggggtgtctttgacctgtgggtcttcaggaccaatgatgctccaatgggtatgaggcccacccacccctcagccttatgcaccaggaacatgttagatggcgatagcggcagtgcccctcacatccagatacatctggatggcttggtcacttagtctctggtcctgaacaggtgcaaggagagaaggagctggaaaggcgcgtggcaaaagtggaagggaacagtggcctcttgcttttccagttggggctggaagacatgaacgtcatgtcatacctgatgtatttttatggaaggccaggttggtggaatgtcacttctagccctccctggccttggaaggaacaagttagaacacatgagaggggatggtggttcagtggttggcgcttaaggtgtaaacttgcgaacttgagtgcagtgcacagaacctacaatggaaggagagccaagaaccatctcacttccacgtgtgtgttgtgatgcatgtgagtgtgcccgctaaaacacacacatacacgtgcacatgaacatggggagatattatggtaaaggactggtggtttggtgagcaccccctgaagttggggtcctggttgtggtggagagtggagtttatcggtacagtggtgttagggatacccctgcccttgcatgtttctcttggacttgaagatgttaggcactgccaggctccaactgtatgtgttcgcattattttgttctgtgtgggtttgaagcagatcaaggatttctgtcttgtctttggggccctttcttctcgccttggtcagcagcccagcagcagatcaagatggtgtacatttggggttgaagttggaagggaccaagagtctccctttcattgggctcatttcccaatcctggtaacacagcggtgcgtttagaccagagccttagagaaagaaagccatctgcagtcaactggtcaacctgccctccgatggaaaggaggggctagggaggggcggggctggctacgcagtaatgccatgggtgtgagtgagcaccctcacctgcagcccggatcgatctgctcttgctgagaagctgaacaaggggctgagaagaggtgcctagaattggtccctgtcaactgtgtcttctcaaaacagccactgggctgtatgaaatgtatctgcagggtggaggcaagcacgtgctctcagccagtaggtatcgtagggtcctccttctgaatgctgctcgaatgttagttttcccagccctgtgattggagaagtggatgtacccagggcaggtgacagcagcagcggaaagggcccggttcacctctgagcagtcaatccaagctgtgcacgtcagatcagaggagagctgggatgccacacatgcccagggttctaacacatttgtggcccaggctactgacaggaagaaagacccaggttcaatcctcagccccagcacttacataaaaggcaagcggggaggtgcatgcttctgacaaggaggctatgggggctcccttgcacggcaagccccaggtcccatcgagagactgtctcacaaaacaaggtggggtcagtgagaaggagaaaaggcgcaggccaccatagccgagttcaattcctgcgacccataaactagaaaaagagaacagactcactcaagttgtcctctgagtctctcgtgtgttccctggcacagtcctgtccccagacataaacacaggcacacagaacaaattaaaacacagcaacatttttaaaaagatggtgggtacttgaggatctaaggtcaaggttgacctctggttcccatactcattcatgcatgaacacacacacatacaaacacacatgagaacacctacatacacacaaataaacaaataaaacctactttaactgcagatacggactctgacgaagacgaagacttcctgaagaatgagtggtctgcccagggcccctccagctccaaactgacctcgtccctcctgtgtggcatggtgcccaagaacagcaagccagccacaggccctaagctgaccaagaggggcctggcaggcccccggactttgaaacccaaggtggtcaccagcaggaagcagtccttctgtttgctgctccgagaggctgaggcccgctcctccttcagcgactcttccgaggaggactcctttgaccaaggttactagtgccaaacacaaaataaccttccatgtttttagagcgagagtgggtgggagagagagagagagcaagagagcaagcgagcgtgcgagagtgtgtgcgcacagcagggatggctgtagccgtctaggtttttggcagcgtagcctgccctatccgcctatatttttggtttgtgtttgctttttatttttacttaaacttgtgataacacactagccagcccttagggagctcttacacggacttgttttttagtctcccagaatttctcaccctcctccctctgcactccactagtcctccccaagggcccccacccccccacctcccagatccaaaagcccaaccttaccttctccataccccaggccggcctgggttttctcttggcatgagcctggcggaggcttgcccaaggaacattttgtataaaaacaaaaaaacacaaaaaaacaaacaaacaaaaaaaccccacagaaaacaaaaagggacttctcgtgtgggacttggcgtgtgacttgctgtttgtacgcggttttggtaatgccaagcttcattaaacataccgagttcatttttaactaaactgtgtgcctcgtttctcttgctatgtccttaactagacgttaggttgccgtcccccctccgttcatccctccctccccctcctctctccccgctcttcgtccccactctggaagccacgggcatggtggactgcctttctgttattccaatatccctggtatctccggcactcattccatttctcgggtgtacagtccagtgttgtatcatctatctgttttgtttttttttccttttaagctgcttgtctgtgttttatttttctggaagcttctgctactacccacctgtggtttttttttttaaataaaaaaaaaacacaacaagaacaacaattaacttatcagtacttgtttgctaacacatctttctgctttgaagggcatgcgggcagtcaaggcctattggccgtctccttgattttggtgttttggggtttttgtttgtttgttttttctcttccttgttcaattttgaaagtgttggctcggttgccatgttgagggtcaaaaatgctatttcttggggttgctggactgaggtctgtctggcctcagctcagcctaggggcccaacaccaaaagaacattctggctcccacttttctaacaccagaattgtagcccacagttagaaattcgagagcccgcagacccttcaatcagaaaatgtccctgcaagggaagaaactgggcatcaccccttagccaggggctgcttcagggtaactcgttagagctagagtttgaaagtccccagatggatagcaccgtgtcactgttccatgtcctgaggggaggaggggtcatagcaacctgggatgggaccataactttgtttgagccctctgggaccaggactctgctcttattggccagtcttccttcagttcccacctcctctcctcgcacaccagcagtccaaattggcagaggcgagttttggggtgaccgagtgacgtcacacggggacctggtgccttttgggctgttcctgtaataccggagccaagcacaacctgggccaccaagaggctgtctgccttctgtggatgagtctggttattcccctattccctcctcatgatctggggtggttacctctacccttgcctaccagcccttagagtcagggtcccagccttgaagtttttgagctgcttctgttccagcatagaccacacagaatcaagcatccctagtgccctctagtcagtaccaagggatgctagcccagccagagcatgtggagagatgagggccagggcatggctcccacccctttggtactaaaacacttgattggcgtggcttttctagtatgtctgctttctcctcccagcagcttgaccatccctccaacccttgacccctacccatgatgctttgagtgtctgtttcggtctctcgcatttgctctcacgctgcacttggacgcaaagcgaaggctgggagtagggcagacggcgtagcgggttactgagtttgagtccgagcctggctcgttgctccgtaggtaggcaaaaaccattttccttttctattctctgtttacctccccctcctcggggtctgcccccaccgggtctggcagcagcatatcactttgacttttatcaggttttgggaactcaattaccctcgccctgagccaggatttaaaagaatatttattgacatgaaagtttttttccccctcctcctgcattcccttgagtctttgttgggacttttctccccctctacgcttggcaagctctgtggatccaggtatagacaattccagaaattcttgaaaccctgacctgcaaggtctctcaggtctccttgtcctcatagatgctggtccagtcagagacactgcatgagtcttgtcaagcacctcatcctgagggccacaggagacctcaggataattcagtttccctcttgaggaaaaaaataccccaactctgggtttctgccttcgcatcaaattgctgagaccagcttgctcctggctttctgggatctgacaatggccctcagaaacccagagcagggactcacacttgcctccctgccgatgaagcctaccgcccaagcgtcctcatggaaagaatggttaggacttccacagccgagcagccaggacagagggggagtctttagaaaggggaaattcccgatccccaatcccagccagccacccttcccatcccctgcccaccctacccaaattggccaactccagggagccctgatgtgagattacccaggctgccggaaaaaaaaagtctgcctacacttagcctgctttgccgctgtggcccactggggcggagacagaaccatgtgacgtcgcaatgtgattgatcgcaagtgcgcactgcctgcctgcccctgcctgccccgctggcatccccagcctgcttcatccatcgctctgggaacacctccctcctcgcaccctcttaaccaacttcccccacctctccctctctccccttctctctatctcctacgcagaccttccttagatattcccacctcccgtcccaagctggctggcctggcaaaagctaggattccctgtcatagactcgctggttagaactctatcctctgcacagctggtgccaccttggccgctagcttatctaaccaagccgtggtgtgggccttagcaggaaaagcagtatttgatcacctttgtccagccctcacacctaagatgtgtgtatcttaccatggcttaccagaccagagtagcctctcagccctacctgggccccagtgtacaagccctcaaggtagatcacagctggtgtttacctgctcctgggtactgcttcccttgaaaccttagggtatccttaccatctggcggagagttaggttgcatgcctaggggagtgctgagtgttgttttctgtgagccagccccattgcccatcctagcaggggttgccagcctttgagccagtggggtcagttgctggagtgacactggcctctgccccagcagagacctggctggacgactttagtctccagtgctgcctgagggtttggtcttagggagcctccctattgctgagtgagctggtctgccctccccccagggcagtctgagctcactcgtggtattgtttctctttctttcttttttctctcttttcttttctttccttttctttctttctttctttttttttttaaaggtttatttgttttatgtaagagtaccctgtaactatcttcagacgcaccagaatagggcatcagatcccattacagatggttgtgagccaccatgtggttgctgggaattgaactcaggacctctggaagagcagccagtgctcttaacctctgagccatctctccagccccttttttatttttgaagtagggtcttactctgtagccctggctggccttaaattcacaatcctcctgtctcagtgcttagaccacagacatgggccaccacaccaggcaatgccacgtaggatgcagaccctcttagctgggttggagggttagaaggtcacctatgctcagagaggctccctagcatgggggggtgctaggttctgcctctgctcagggataagactttggtggtggtggtgggggggtccctagtctccaggaagagatcaaattctgctttctgccaacagccctatgacctctggctgatcaagacactccaggccccttgtctagaccccctagcctgaccccagccctccctcctccttcccctcttctgcctctcttctttcctgcttcctctctcagcctccacgtctatgtcggggtgtgtgtatgtgtgtgtgtggaccgtgacgagcgctgtctcctgtctttgtccatctgtgtgtctgtcctccccacctacagcacaggagcatgtcggtgctgccctcccagaagcccatcctgatacccagagctacccctctcccttccccaggctgcccctgtgtgggtgactggtagaggccttgggccttgggtgggactgtgggctggttctggaccctcccccggcgacccttggtgaagacagagactggagccatggtgggtggtgggaggaggtggggggcagtacgcacccaagtcaagactctcactcgttccttgttttctgcatgccagatgacagctcagaagaggaggaggaagagctagaggaagaggaggaagacgaggaagaggaaggcattggtagctataggctgggtgctggggaacaggccctgtcgccaagcctggaggagagtggactggggctgctggcccgctttgcggccagcgctctccccagccctgtcgtggggccgcccttgtctgtggtacagctggaagctgagcagaaggcccggaagaaggaagagcgacagagcttgctgggtgagtgccatcgcacagataaggagactgaggctcagcggtgggcaggagagctgggtggaactttgatcacctgactgctggaaaccccttgggctgttactttcatgtccatggtcatgtaagagtatcttccttcaccctgtgccttcattaaagatgcgagtacttcaaaggtctccaggggctcagggaaggccttgtcctagggctggtgactagaggccaccctaggctagtagtctccaggcagagaaaaacatagtgacagagagagacgcagaaagaagaggcacggagaacattctgcccacatcattggagaagttctctgaatccagtgaggcaggagagtggcctcgatggccagaagctggtggctggaggagtcaggattggcatgccgaggcttgttctcttactaccttagaggacgttagggaaggggactcagctgtccctgcctcactttcattacgtccgtgagtctgagccctgtgtccctgatgaattcaaaggttctttccccaaccattagagtagacatggttcctggggctggtgataggcagctgagttggtagcgtgtttgcctggcccgcagagccctgtattctatctatatctatctccagcatcacatgagccagctgcagtggtccatgcctgcaatcccagcactcaggcaggaggatcagaggtttaaggtcaaccttagctataacacacagcaagttggaggccagcctggagtatgggtccctttctgaagtaggggttgtggagtagacatgaggccttcggcagaggctctgtgtgacgagggtcaggtttctgtggagcctcctggaggttttcccaagatgtccccaattctcctacccacggctccttctttcctccctaaaattccctaccaattgccctggtgtcttgaggctttacattggctgttgaccaggagtcaagcattgtggcatattcttcagaccattaccaccttgtttcagtagatgagtgtagtgtgtagtttttgctacccctgggcagactgcactaccagccccccacccagagaatattggatccacagatgaaagacacagacacacacattactcaatttcaacctgccttattggctcaattggtgggctcttctaatcttccgcagctagcgtgctctccccagtacgcttagcacctcttaacctgccctctgcttcgtgacctgcttaccttttccttgttcaacaaccccaaactgccttcgttttagttgtgtttctgatctcctgcctggggaagcagcctatggctgctccacccaggatctcacatggctggtcacctttctccctctgaagcataatcaagacccccttcctcttcctgcatctcttagcctgcctgcagggactaggaagtcccgcctctttccttctgaccagcagtgagcccctggcatctgcaccaccctctacagatgagcatgtatttattctttgatgcatgtagaagcagtatcctgtgtaccaccacttaaacgaactacttaaagcatttaaaaaatttttactttggtttactttgcatgtatgtttccaggtgcacacatgccacagaagacatgcccaggtcagaggttctgggaatagaactcaggtcaccaggcttggtggcagacccccttttctgttgctccatcttgctggcccctagttggtttgttcatgcttcttcaatcccctcctccatttttctctgtgtacgaatccttctggaagttctaccagagtatcctgagccagacttgtcctctttttcaacctgagagctttgggcattttcacagataatgtatgaagtcatctaatgcttggtatgtgaacctccaacccagacccagtgcaggccacctctcctcccattcactttgtggaattttatttccagatttctccggcagcaacttctagctttgaaaggaaaccttgtcactggggcagctctatgtagaacatcctctagtccagacagcgggacacatgcatgattctgggggtgcctcagaagatagcagaagatattttagtctcttattgccatctcttaggtcatgatcatcaccagcaaatggtaacaggtttccctcgccaacttacctcttaatgtctttcagagacacaagtttctcaaaatttacttcagtggtatccagcgtgaggtatcaaacatacggactgttactagatcactagactgcttctcgtcatggaagccaacattacttgaggaccagactcctctgtaagagcagcaagcactcttagctgctgaatgagctctcgctacagctcctgttacacttttatgtaggtgggtcttttgcccacgtgtgtgcatgtatgtgcaccagttgtgtgcctggtgcccatggaggccagaagaaagcatcagattccatggagctggaggtatagatggtgtgagccaccatacgggtgctggatattaaatttaggtcctctggaagatcagccagtgctcttaaccactaagccgtctgtctagccagtgtcccctcacccccaccccatacttgtaatgtctgtagggttggtagtaatttttcttctcttattgctgatatactctcccttgatcagcctggctagaacttacctgtttcattaattcccctctcccattcattcattcattcacatttatttatttatttgtatgcatgcattcatgtgtgcgtgtggacatgtacttgtgtgaagtacgtagtgcttgtgtgacgatcagaagacagctttctggagtcggttctctccaccgtgtgggttccagggattgagtccaggtcctcaggcctgattgatggacaagcttccttacttactgattgctgatccttgcttcctttgctttctttgggcgtgtcagtcatttgtagccacttcctgttttttcagagtagcctcttaggtcactgatttgagaccttattcttttccaaaagaagcgtttgttcagagatccaaacctctctgaagacacagcctcagtttcatctcccacgttttgatgcgtgcggattctcattattcagggaccattctgaatctctcttgtgatctctgctttgatccattgatgactcagaaagttatttattctccagacatctgagggtagttgcttggtcttcttgcagatctctgcttggctcccattctagttggaaagtacattcaataatttcaatgaaaaaggaaattaatttgaaactctatggtacttcttaggaggtaaacgcgtaatgtgtactgacactctgttaaccatttagtcacgcccgcgtggttctctacagttcacacttactcttttccgttgtactagagataagcgttaagatctgcaactggaacctgcacagttcactaccgctccttttaattctgtcagtttctgctttatgtatttgtagttctgttattgagcacacgcaagtttttgattattttgttagttcttgatcttcactgttgagaagtattcctttctcttctctgggattatattttgttctaaaatccacttttatctgacactccatagttattctggttttttttttttttttcagttttctaaaaacaagtattatgatcatgtaggtgatgtgtataagggacatgtatttcacggtgcatgaaggaaggagagatcttcatacatgtactgtgcatctacctgtctcccttcatccctccctccctccctccctccctcnnnnnnnnnnnnnnnnnnnnnnnnnnnnnnnnnnnnnnnnnnnnnnnnnnnnnnnnnnnnnnnnnnnnnnnnnnnnnnnnnnnnnnnnnnnnnnnnnnnnnnnnnnnnnnnnnnnnnnnnnnnnnnnnnnnnnnnnnnnnnnnnnnnnnnnnnnnnnnnnnnnnnnnnnnnnnnnnnnnnnnnnnnnnnnnnnnnnnnnnnnnnnnnnnnnnnnnnnnnnnnnnnnnnnnnnnnnnnnnnnnnnnnnnnnnnnnnnnnnnnnnnnnnnnnnnnnnnnnnnnnnnnnnnnnnnnnnnnnnnnnnnnnnnnnnnnnnnnnnnnnnnnnnnnnnnnnnnnnnnnnnnnnnnnnnnnnnnnnnnnnnnnnnnnnnnnnnnnnnnnnnnnnnnnnnnnnnnnnnnnnnnnnnnnnnnnnnnnnnnnnnnnnnnnnnnnnnnnnnnnnnnnnnnnnnnnnnnnnnnnnnnnnnnnnnnnnnnnnnnnnnnnnnnnnnnnnnnnnnnnnnnnnnnnnnnnnnnnnnnnnnntccctccctccctccctccctccctctctccctgcaagcaattaaataaatagatcctctagttctagccaaccatttctttcttcttcttgtatttacctatttctgacagtatgtagaatgaggtaggccctgtagtacgtagccctgtgtgtagcacctttcattttgattttgaagttcatcatagtaacggttgctaggacgccatgtttttatatagctccgtggtacagctctgagacacatctgcttgctagtggatgcatatttgagttgtttctatttttaggcttttgtagctaatgctactctttcaactgtctgtgtgctgggtttgtgtgtgagaggaaacgttttaattctcctgtactcaaattgctgggcaatttgtaaagttcctttagccttttgaggaactaataaacttttccctttttgttcttaaatattctttttaattgcatatgtgagagagagagagtatatgcacatgtgtgtggtgcacagtggccagaggtgttgccaggagctggagttacaggtgactcccatgtggatcctggaaactgaacttgggtcctctacaagagtggtacatgctctttttattttttttggtttttttgagacagagtttctctgtatagccctggctgtcctggaactcactttgtagaccaggctggcctcgaactcagaaatccgcctgcctctgcctcccgagtgctgggattaaaggcttgtaccaccacgtccggctttggtacaagctcttaagcatgagcatcttactggctgtcctagctacctttctgttgttgtgataaactatcctgataaaagacaagaagaaacagtttattttagctcatagtttacagtctgcagggcagtcaaggtagcaggaacttcaaaagactgatcccatttcaaccacaatcaagaagcaaagagaaaaatgaatgcgtgagctttggcgctcagcttacctcctcttgcttagggaatgatgctgcccccagtaggccgcagctcctacctcagttatcctaataaagactatccccacagatgtgcccatgggccaacctgatctacataatccttcattgagactcttcccaggagtttggatcacagctgagttgacctatcaggacttgtcttagtcagacccattcagttttaggtctctttagtaaatttatttgcagcactgctgttctctgggtggttggccttaaggcttactcccaggtgtggctagacagtttggcgtggcctctcttgctgtctcctttgtgattcttaggtttctctcttctgatttctgagaccatctcttttgcacatgcgccccataccttgctccaaattcctgggtagggggtgcaaggctgagacctgacccttgtagctgcatgcttctcttcttcctggtctcactcagcttccagtacctgctccatacagaatggtctaatggttccgcaggggctacacgccgagggtgacctcacacttctgaccctcttgcctctgcctcctgagtgctgagattgcacacatgcaccaccaagcaggttttgtgcggtgctggcgatggaacccagggcgtcatgcatgctaggcaagcaactcttttgagtactgcactataccccaggaccccaaaaactcaactctcaaacctgactatatggactgaaccctcctcatgtacaagaatgccccctccctccacttccagctgcttcctccacgtagttcatcagggagaagcttatcagcaagctcattaacaagatctttaagcgttgaaggaactgttgttcaccaagcttcccgccccccatccctgcctctatggctgccgctgagagggcctcccatgggggtctctgtgaacaggcttcctgttgcctgagagtcaataggactgggattgggccccccaggtcctttttaaggggttgctggtcttcaaggggactgtcaacccaacaggctatctggtctgtgagattgttacaatgtcggcagggggcttgtggacagagagggagtaccctgggggatccggtgggctgtagcttacctgtgtttcctgtcaaggtggttgtaccctaggctgagggaacagtggaacagcagcctgaagatcagaaaaggtagaagagggaggagagagagtagccttgaagtctagtagtgtgtctcagagatccagggcttaaggaagaggctcctcattatgtatgacttgctacaggggatgaaaggaggggcctctgaggagcctctcagtagggagtggacctgggtgattaaggaccctaagagcaggaagggactctgtcgggatgtaggaagacaagcctcaggcctggtgctttcttggggctttctccactgcctccctgtgcagcgtttgcctcaacctgcctagtttctggggtttcctgagaggcagtggaaagagccatgcgtggaccgtgggcctacatattttagtggtgttcttggggtgagaggtggggaacagccatggggtagggaataggggacttgggccaacccttgcccttctctgagcctcagtttacctcttcctggtaacaggagagcgtgcgtcgatgggtggtatgggtctgtgggtttcttcctggtggccttgcagggccaggtggctgggacgaggggcccgtggagaccctacccaccagcccctacctcctccttcccacatgcaggcacagagttcgagtacacagactcagagagtgaagtgaaggttcccaagcagtcagctgctgggctgctgcggaccaagaaaggggtgggggagcccggacagtctctggctgcacccggacctggcagccgggcctctggtccctccagcccagacaaggccaagctggtctcagagaagggacgcaaagcccggaagattcgaggccccaaggaacctggctttgaggcggggccagaggccagtgatgatgacctgtggacgcgacgcagaagcgagcgcatcttcttacacgatgcctccgctgcagtccaggcaaccagcaacacggcgccagcaaccaagcctagccgctgtggcaggggtggtgccccaagcccacggaaggacaccgggcgagccaaggacaggaaggaccccaggaaggtaaggtccctggcacaggtcccctggtctccatccttggggtatggctttgatgttagtagtgtgcccatagaaggttccaccatgtttggtgttcagggttcaaggaaaccttgtttcctcttcctgttcctgacagagggccttagtctctcatcacataagtataatggtttaaaatgtgaataagtacttggaaccctgtgtgaggtaactataacaaaagaaccaacacaatcgccaagtagtgttagcgcacacctttaatcccagcactcaggaggcagaggcaggtggatttctgagttcgaggccagcctggtctacagagtgagttccaggacagccagggctacacagagaaaccctgtctcgaaaaaaccaaaaaaaaaaaaaagaaccaacacaaccaacttgtannnnnnnnnnnnnnnnnnnnnnnnnnnnnnnnnnnnnnnnnnnnnnnnnnnnnnnnnnnnnnnnnnnnnnnnnnnnnnnnnnnnnnnnnnnnnnnnnnnnnnnnnnnnnnnnnnnnnnnnnnnnnnnnnnnnnnnnnnnnnnnnnnnnnnnnnnnnnnnnnnnnnnnnnnnnnnnnnnnnnnnnnnnnnnnnnnnnnnnnnnnnnnnnnnnnnnnnnnnnnnnnnnnnnnnnnnnnnnnnnnnnnnnnnnnnnnnnnnnnnnnnnnnnnnnnnnnnnnnnnnnnnnnnnnnnnnnnnnnnnnnnnnnnnnnnnnnnnnnnnnnnnnnnnnnnnnnnnnnnnnnnnnnnnnnnnnnnnnnnnnnnnnnnnnnnnnnnnnnnnnnnnnnnnnnnnnnnnnnnnnnnnnnnnnnnnnnnnnnnnnnnnnnnnnnnnnnnnnnnnnnnnnnnnnnnnnnnnnnnnnnnnnnnnnnnnnnnnnnnnnnnnnnnnnnnnnnnnnnnnnnnnnnnnnnnnnnnnnnnnnnnnnnnnnnnnnnnnnnnnnnnnnnnnnnnnnnnnnnnnnnnnnnnnnnnnnnnnnnnnnnnnnnnnnnnnnnnnnnnnnnnnnnnnnnnnnnnnnnnnnnnnnnnnnnnnnnnnnnnnnnnnnnnnnnnnnnnnnnnnnnnnnnnnnnnnnnnnnnnnnnnnnnnnnnnnnnnnnnnnnnnnnnnnnnnnnnnnnnnnnnnnnnnnnnnnnnnnnnnnnnnnnnnnnnnnnnnnnnnnnnnnnnnnnnnnnnnnnnnnnnnnnnnnnnnnnnnnnnnnnnnnnnnnnnnnnnnnnnnnnnnnnnnnnnnnnnnnnnnnnnnnnnnnnnnnnnnnnnnnnnnnnnnnnnnnnnnnnnnnnnnnnnnnnnnnnnnnnnnnnnnnnnnnnnnnnnnnnnnnnnnnnnnnnnnnnnnnnnnnnnnnnnnnnnnnnnnnnnnnnnnnnnnnnnnnnnnnnnnnnnnnnnnnnnnnnnnnnnnnnnnnnnnnnnnnnnnnnnnnnnnnnnnnnnnnnnnnnnnnnnnnnnnnnnnnnnnnnnnnnnnnnnnnnnnnnnnnnnnnnnnnnnnnnnnnnnnnnnnnnnnnnnnnnnnnnnnnnnnnnnnnnnnnnnnnnnnnnnnnnnnnnnnnnnnnnnnnnnnnnnnnnnnnnnnnnnnnnnnnnnnnnnnnnnnnnnnnnnnnnnnnnnnnnnnnnnnnnnnnnnnnnnnnnnnnnnnnnnnnnnnnnnnnnnnnnnnnnnnnnnnnnnnnnnnnnnnnnnnnnnnnnnnnnnnnnnnnnnnnnnnnnnnnnnnnnnnnnnnnnnnnnnnnnnnnnnnnnnnnnnnnnnnnnnnnnnnnnnnnnnnnnnnnnnnnnnnnnnnnnnnnnnnnnnnnnnnnnnnnnnnnnnnnnnnnnnnnnnnnnnnnnnnnnnnnnnnnnnnnnnnnnnnnnnnnnnnnnnnnnnnnnnnnnnnnnnnnnnnnnnnnnnnnnnnnnnnnnnnnnnnnnnnnnnnnnnnnnnnnnnnnnnnnnnnnnnnnnnnnnnnnnnnnnnnnnnnnnnnnnnnnnnnnnnnnnnnnnnnnnnnnnnnnnnnnnnnnnnnnnnnnnnnnnnnnnncccagtgaggggctgggggtgtgcgtggctcagcagtaaagcccctgcttaatatgcctaaagctctgagtttatgaaacatccctaatatcacaaacccaaaagctcatatgtacatatttctgtatcattacctggttatacatatttctgaaatgttctgtaaagacatgcggctgcttctaggagagttgttgcaggaactcacgtttcagcactttttttgttggttggtacaaaaaattatactgtaatgatagagatcagttgtgagggctggcaagatggcgcagtgcgtaaaggcactagctcacaagcctgatgatggatgtcctgagttcaagctctggaacatgcattgtggaaggagagaactgactctggcaaggtgctctctagtgttcacatgcacacttggcaataacatgccccccagcacgcacacacatgcgcgcgcgcacacacacacacacacacacacaccaaatatataaatacaaagatctaataaaagtaataatttatgaataaaacctagagcacttatatacagagaggagtctcagtcctgtctcaggtgtggcatgatcagtgtcccatggttatggtgacagcgtggtccctcactatcagggaccctgcaagcctcatggttggcaatgaagtgatctgtgggaggtgaaaaatgaagctcaggttagccctgttttagcaggttctgggtcaaaactcccagagtctgacctcacggtttatttctcttacaactttgggaagagatggccacatgacagttatcacaacaaaactttaggcctagatacataaactcctttgcaaaggagcaaagcccctgtgaccttaaagaacgagttctcttgtctgatgaacagagctcagggctaaggcctagggaagaaagccttgtaacagcatagggatgggttgtattgatggaggatgcaaagtaaacaggactctcatacgcatgggctccattcactgagactcagctcaggataggggtctagacaacgcctgggataggggtggatccaggaaggccggctccacagaatggcaaaagatcacaggctgttaaacagcaagcaccccagccttctggtgaaagggcgtcagtcatttcttctgttgaattaaacaggccttagtgtttaaggagtctgggttttctagtctcttctgtgagctgtgtttcctatacccacctccttgccatggtggcctgggccctccatgcccgatgacaacttcctacctttggctttctcctctagaagaagagagggaaggaggctgggtcagcagccacactgccaccaccccgtgtttctaccctgcctgactccagggcaccccacccaggggccctggcgactgccaaacgcagcaaggccaaggccagagggaaggaagcaaagaaggaggtaagcgtgccagaaggacgtaaatcaaggctgcactggggcccagttccaggtgcaggcatgcagtgcccctggtccactgtcatcattgtccctcgcccacactggatgtgggtgtgacaagctccattctcagccaagactccaaccttattggcaacccggggccatagaaccactaccctaaagacctgttcctcggcagagctccccttcgcgatgctaaggcttttgtctattgacagagtgcgatggcgtgcctgggtgcgctgtcagcgactcccagagccccgtttcagcctcagctttgttctacatggctaaaaatcagtttctctaaggcagtggctaaggcatccactgtgctgacacgaggaaagtactgagcactgagtaccaggtactgtgctaagtacacaaagcttgggcttcagtgcgcatggccaatgcctctgcacattgaccatggccctggatttctcaggaatgtccccagcatgacaggatggcctgtgcctcgggcagagccatcagcgtgtatgtgtgtgtgttctccccagaaccgaggaaaagggggtgccgtgagtaagctgatggagtgcatggctgcagaggaagacttcgaagccaaccaggactcaagcttctctgaggatgagcatctgccgcggggcggggccacagagagacctctgaccccaggtgagtgtcccaagaggcttccggggttccccacaagtgtttagataccagcctagggtgaggccctgaggctgtggcagctcagctctggcctagccagcccatggtgggaatgaggcggcaggggtcaggccaatgagatgttcaaatcttgggattcagtgtgcattttaatgtaagcctagggaggcagggaggccagcagcaagtctcagctacggctggaacaacatgagacagggactacttacctagcacatgaagggacaggtggggtggtgggtcatgtgagcagagataggtaaggactgatgttagagggccacaaaggagcggcaagatgggtggagtgtgggcgatcgcacgcttgtgtgtgagggctacagttttaggatgttttattgatgccctgtggagggtgtttggacctcagggtctgagctaggaggagggatggagggtatgaactgtggggtgcaggttgggagcagagccaggcagtcagtgcttggagcggggagaaggcggctctcatcattctggcagtggtgtagccagcaacatccccatttgtctgcatagcagcgatggctgaccgcagcaggcatgctctcttgggtgagggtccaagccacagcacttgccctggatgtcagtgcaaggatacaagtgatgcctagggcccatgggcgtgactgagacccaggaggtctccctgactgtgcagagctagcactctgttctctgctggccacagcacccagcactctcaagcccaactataaagtgggtagtgttcccctgcctgtgagcgtggttgcagaagcaggtagggtggagaagtggcttgttcttccgctaccagactccagagctgcttgattcatgcatggacttgttatttacttattgtctgtctgtctgtctgcttatctatctatctatatctatctatctatgtgactcagaggctgaatctgtgaatctccagccattctaaacaagtatttttgggccctttattctttgattctaggcaggatctctgttgtggagacataccccagcccctccctgggggattctaggcaggagctctaccactgagccacaccccagcccctcactgggggattctaggcaggagctctaccactgagccattccctagcccctgacagggaccggatataaagccttattgagaagaaaaagagagaaacgggggtgggcagtctctggggcagggagctcaggtgaggaagaaccaccaatctagggacatggcaggagaggctgggctgggcacaatgttgaagtaggtacctttaagatgcattgtgggtcctcatggcccaggaccttgagagtatctgtgggatggaaaagtttgtttctagtggcttctcactcacctgagatcttcctagttgtctgtaaagactgggaagacgggctgcccatcccccaccccatgtgcaattgggacccagtgtgtatggggacagccatgtacacacacgcctgcaactctatctggacactccacagccttcacttcctggagggggcttgtggagtcaccaggaaggcctggggtggtctccccctagacatcctctgactctggcccgcttccctgcccacctctctgcagccccccgctcctgcatcattgacaaggaagagctgaaggatggcctgcgtgtgctcatccctctggatgacaagctgctgtatgccgggcacgtgcagaccgtgcattcacctgacatgtgagtggtcgctgcgggcttgccggctcagctcccacacccaccacgcctgcttctgcctctgggccacctgggcaggttgcttctcaccccctctgaggtgggagaacaacagtggcaggagctctggggagtcactgtgtgccagtagttgagggttgcatcagaatagaccctaacttctgttgggcagagctaggcctcgtggggccaagcaggaagtgggtgaagtgtacagccttcctttggaatgaggggtcctggctgggcctgctctctagcccctgaattatataaatgagaaagttggaatcaggaagnnnnnnnnnnnnnnnnnnnntatatattatatacttatatattttgcttgggtctgttgattctaggtctattaaatacagcatcgtggctatacaatcatgcagctgatcatgatataacatgatttaatgtatatgttactatatacatatatatatatataacatacactacaaatccatattgatattgttaacagacatctgaacctgaagctaaaccccgcgtatcagatggcagagctggcagtgctgggttggggcagttctgtttctggatcggggctctatggccactgccctatatttgcccctgttcttgtagataccgtgtggtggttgaaggtgagcgtgggaaccgaccccacatctactgcctggagcagctactgcaggaggcggtgagtaggggagaggagaggcccccaaagcctggaggaaggggctccaaggcaatggccagagagccacttctgatcactccttcccagtcaccttctgaccctcaatctgtcctctactagattatagatgtgaggccggcctctacacgcttcttgccccaggggaccaggatcgctgcctactggagccaacaataccgctgcctgtatccaggcactgtggtccgaggtgagagacccctcctccccagctcacccaactcctattggtcactatcagttcatctggtcagtgaaacccgctcccagctggctcaaaccagcagacactgttgctggtttgcataaataaatttattccaaggagagctttctggtttgggttgatctattggttgactattcagatgaagtgagcaggactcagggtctggtatctgagcttggaatgtcatctgtgggctggccccacaccggcttcttgggaaggcattccggcttcacacatatcaccagagaagtctggcttgttttcctgccttcccactttggtcagggggtgggtgactaggctcatgaggtttccttgaggctactacagttgagtccactgggctggacccattagcatcctatcctgtggctaaggaatgaggctggtttcccttctccctggatacgctattatagtggacaaaatacctggcagaaaatgtcagggcaggaggacctgttttgacttgcatctcagcaggcatgttgctgttcaggtccttgggtctgttgattctgggttctcccaaaaggctggtgtcacttctccagctctgccctctgtggcactctaggctcaggttgatccactgccgctgctgttcttggtgatcatcccatagtactggcatctcattacacttcagccttccgctgcaactagccttcaccaatagcctttcactgctctcttcatggtgccaagcctcaattcctttgcatgagcccttcagtcctggcctgtcaattgcacctgaggctgcaccttcaccaatggccttccatggcctctcagaataccaagcctcagctgctctgcatgacccttttatgccttcaaaaccagtaccacctgggtgactcttacacattaccaagtccagctgcagcacgaggtacaaccttggctgtctctggaacacagcttctttgtgctctcagaaaactcttccaagatttcacctctgtgatgttggtctcttcttaatcaccgttaatttcttagcttcagctaaccagcatcagttgtcccaggagtctctttctcttcttgactacaaagccagagacacatgaccaaagctaccaagttctgctgctttctggggctagaacgtgccccccccccccattctattaaccagttttctgttttctggctccctcactgcctaagtgtgactttcctggaacttgttctgaagattgaccttgaactcagagatctgcatggctctgtgtcctgtaatgctgggattacgtgtataccaggctctgtgtcctgtaatgctgggattacgtgtataccaggctctgtgtcctctaatgctaggatacgtgtataccaccatgcctgggattaaggttttcttcacctaaaacctgctttgtcccagcctggtctacagagtgagttccaggataaccagggctacacagaaaaaccctgtctcgtaaaaccaaaaaaaaaaaaaaaaaaaaaaaaaaacaaaaaaaaaaccaacaacaaaaaaacagtaattggttaatatttgtgagaggctcattttgtttttctctctctcttctgaatcattttaatctgctttatggtctctagttctgcagttcacagtgtgtgcatgcataggaagtacaggtctgtacatgtcagaggcgttcatgtggaggtcgggggacagtttgctggactgggtcctggggctgcagctcaggcttcaggcttttcagcaagcatgtctgcccaccaggtctgtcttcagatttgtcatcctccggcctcaggctctgagcgctgggattataggcttgcaccaatactctcggcttggctttctcctctcccttgggggttaattttcaaggaaatctttgctctgtcagcacatcggatttttgaagactctcacacggggccttttgttcatttgtttggatttctttggctgcttttcgccttctgtgtcccctcctggtctcagttgctttcctcttcttctaattagaggttgcccaggcatctttgttgatccttggtgaagagagagattgaagagccagtctggagctctgtgtgctggtggggggcgaagcgtctgcttggggcttccccaatactggcatggataggtcctttctcctcaactgggcagagccacggggcccgtgtctttgaggatttggcattagcgtttgcgtattaggacgggctggtgtgtccccatgtttagtatttggatatacccagtaccttttggtctagagctgctcaaatctttctattcatcctgcttgtatagattccttcagtaggtattggggtctcctgtatcgttggccttgacccttattgactttgtctcccttcagaagagtaaagccaaagttatccagacttggtcaggtactcaggaggctgaggcaggaggatcacaaggtcaaggcctccttgggctatagagttagttcaaggccagcctggacaacttcaagtgaggccctatctcaacagatcaaagtagaaacagtgcctaggatgtggctggttggtagaatgcttgcctgacatgcatgaggttcaactcagaaccaccatcaactgtgactctgctcctatggaatgttctagaatgtagacgtgtgccccactccctgtctgtgacactcagagcttatgtagttggtaaggcttttcatggtggctttgggtcttgtggatgaggaaacccagagatgtatatggtcattcatttgtagcccctggagtataagaaacagagccagaaatgagagagtcgactctccattcttgactggtgtggctcttaactcccacacttgcacacctatgtatacaccccaagtcctcgagggctgtgccttggtgacacaggctgtagtcccaggagcctccctcacctgcctttctcctcagggctgctggacctggaagacgacggagacctgatcaccgtggagtttgatgacggagatacaggcaggattcccctctcacacatccgcctcttgccacctgactataaaatccaatgtgagtgaggaacctatgccgtgggggacaagagggaggggtccctgaaaagcccggctagggtccatatacctaggcccttgcctggctacctagcagtacatacttgcctgcacagtgttgccaaggttccctttacatatctctgggctcagggtggcatttggttttctttgtttcttctcttctttgtacaagctagataagagctttaccactaagccacaccccaacccctctctgggggattctaggcaggggctctaccactgagccacgcccctagcccctcactgggggattctaggcaggggctctaccactgagccacgcccctagcccctcactgggggattctaggcaggggctctaccactgagccacgcccctagcccctcactgggggattctaggcaggggctctgagctctccaacatgtgttagcttcaggttatcccacctataagcaagaagcctgggtcagtaacacctgagacactgtccctctatcctgaaggtgctgagccctccccagcactcctagtgcccagcgcaaaacgccgtagcaggaagaccagtaaagacacgggggaagtcaaagaaggggctgccacagggcctcaggaggctacagggggcaaggctcgagggcgaggacggaaacctagcaccaaagccaaggctggtgagttttccctgacttaggaggtgtgaggatgaaaccactgtgggaattggatgctggagcttggggcttcccgtacatgacttaggagaattctgtgccactgagtagtttcgtatggcgcacttcatgattaaaggagttggagaacatttgaaggaccccaggggcttccacaagaagggaccttgccccaggttcctacggaggtttccaccgggccctcctgactagatcctcatgcatccagtaggaagtctacctttctcccagtgttctccacccctgacctccagttgtgatctctccatcagacagagctgttgtcctggaggaaggggctgccaccaatgaggtccccagtgctcccttggctctggaacccatcagcactccaaattctaagaagagtaccccagaaccagtggacaagcgggcccgagcccccaaagcacgctcaatctctgcacagcccagccccgtaccacccaccttctctagctgcccagctcctgagccctttggggagcttccaacccccgctacagccccgctcgtcaccatgcctgtcaccatgcctgccactcgccctaaacccaagaaggctcgggccgctgaggggtccggtgccaaaggtccccggaggccaggggaagatgacgaactgcttgtcaaactggaccatgagggggtcatgtctcccaaaagcaagaaggccaaagaggccctcctcctgcgggaagatccagggccggggggttggccagagtccacagggctgctcagcctgggcagctactcaccagctgttggcagcagtgagcccaaggccacctggcccaagggtctggatggagacctcactcaggagcccgggccaggtcttcctttagaagatcctggcaactccaaaaacccagacaaggcccaggctgaacaagatggggcagaggagtcagagaccacttccagcagcagcagcagtagcagcagtagcagtagcagcagcagcagcagcagcagcagtagcagcagcagcagtggttcggagacagaaggcgaggaggatgctgagaagaacagggaggatggccggggtgcagggggccggacctgcagtgctgcgagctccagggcctcttctcctgcctcctcctcttcttcctcctcctcctcttcttcctcctcttcttcctcttcctcctcctcttcttcctcctcctcttcctcctcctcttcctcctcttcttcctcttcctcctcttcctcctcttcctcttctaccacagacgaggactcttcttgcagctcagatgaggaagcagcccctgcacccgccgctggtccctctacccagccagcgctccccacgaaggtatccaagccacctagcaaggcacgttcctcagcccactccccaggcaagaaggcacccaccaccacccagccaccgccccagcccccaccccagccccagcagactcttcagcccaagacccaggctggggctggggccaagagccgacccaagaagagagaaggcgtacacctgcctaccaccaaggagctggccaagcggcagcggctgccgtctgtggagaacaggcctaagatcgcggccttcttacctgcccggcagctttggaagtggtttggcaagcccacccaggtaaagttcctagaagggaatcatgggggtgagggggtcctgagttccagaaggagcaccctggattccagaattcactttaacccagagtccacgtcttgtacagagtggccctgccctcatatttcacagccttcattttgaagctgagtgtgaaccctgcagggacccacacaggctctcctatgatgctcaagccagagaaagagacctttccaaacccctcagcagccagcatgcttgtcatatcaccccgcctttgaacctcaagttctgaaccctgaagcagcaaatgaccagagtgaacacctttccccggctcgcaccctacgtagactctaaagcaagcaacctctgtgttgcgggttgggggtcataactcttccctgacagttggcgacggtcttccagaagccagttctaagcacccccaacccactatcatcatctatcaacctacatatgcaaaaggtccatacacgtgcacacacctgctcgtgcatactggcaccaagtgctcacacggatgcacattcaggcacacatgtgcatgcacgggtgctattatgaattgaacagtgctgactcccgtcccaccccccaccaaccacacactgccatgttttgaatactccatccacggtagtggcgccatgctggaagttgtagaaacttgtggaaagtggtccctggcacagtgggtccccgaggatgtggttgttattgctgaccacttcctgtcttcctgttcaactgagacatgaacagctgccacattctctcctcgccagcggttttacccaagcacatcgcatcaaataaccctgaagtagaccttcggaaagcatgagccaaaatacgtcatccctcctttttaaagttttcttgcttggaaaggcggtggcgcacacctttaatcccagcacttgggagggaggcagaggcagctggatctttgagttggaggccagcctgatctacagagccagttctaggacagtcagggctacgcagagaaaccctgtctcaaaataacaacaaaacaaagtctttcttcttttttttgtttaatctatcaggtatgtgggtagcagtggggaaagtgattataaatggagcacggggatgtgaacccatgacataggactacactggaatacagtcatacatgttcacctacacatacatgcagtatacatgggacaaggtactcatggatacacttccggtgagggtattgccaggagctattctggaagcttccatgtccacccatgcctgtgggtggagagattcagagcccagtgtgttgcccaggttcccttccctcacagtaacaacattccctctgtatagctgaggacgaacttgaatgcctgatcctcctgcatactggggttacagccacgtactaccatttccacatggtgacatcctgaggatggaagccggggctccctgcatgctgcctgagccgagcaccagtcctagacaccattgctctagtctcctgtgaagcgctgggtgtcctagtgaggaagccatccaggaataaactgctcatagcatgtccggcaggcagcaaagaaaaaggggagcgtcctaggccttgaactcccttgagggtgttccttgatgacctactgacctcacaagtcccacccttctgcttcctcacttcttcccagtaactccatcctggatagccaagacctacaccagagcctctgggaacaggcagtaactgagccttagtagccaggctcacctgtagggtttccctattcacaggcccttcctggacttgctcttagcctccccgtgcctaggccagcgtcccctggctgtgtgtccagctctgtcgggtgtccctagcagttggaaccccttttctgcccagttgtgctacttcagcagataggagttggggattaatagggatagtttgggggtacctggtggcctccctcagtgtttgaggacaccctggctcatgtgtgtcatcagctcctaagttcagtgaggctggagaggtgggcgttcagtgatatcagagtcaggggccattttctttaccgcccccccccccattttcagtggcatattgaggagttccaggttcagtgagagagcctgtgacacatgtccttaattccagcattcagcagacaaaagcaggcttacctctgtgagtttgaggccagcctggttggcctacatagtgagttccaggacagccagggctacatcatgatgctctgtctccaagaaagaaggaaggcccaaagggctggagaaatggctcagaaattactaaagcactgagccagggtttgaatcccagcacctacattggtggctcaccaaggccggtaaactttagttccaaaggctctgaaacctttctcctttctcctgcctctgtgggcatctacacactcagaagcacatgcacaaagacacacacaatgggtggatggagagaataaaggaagatccctctgcctgccgcatacatgcacctgcacacgtgtaatctgcatgcacatatatgcatgtgtacgtgtacacaaacacgtacactcccccttgttgctaggagaaactacgtgagatgatcagcttgtgaaaaggaaaggttggttttggctcattgtctccacccaccacgagctggttccggctccatcgtgctggttccggttccattgcgctggttccggctccatcgcgcccgcccgagagggctcaactaatgcaggagcacagaagctactcttgactggcaggagatagagaggaaagagcagaggcctggtagctccttttaagaccgcacctcctgttacctgctaactcttgtcagacactagctctaaactgtgttccactcccgcagtagcgccttaagtgtgaactcaagggtaggcgggagcgcttccaaactgaagctaaggcaccccttccatgcagaccccgagggttcatggcgggtgactcaggtccagggatcggggatccagatctgcccagaccgcctggtggggtgtcttgcctttggctctgtggcttcgggtacagtgctgggctctagctgtggtttttcacgtcccgcagcggcgaggcatgaaaggcaaggctcgcaagctcttctacaaggccatcgtccgaggcaaggagatgatccgaatcggtgactgcgcagtcttcctgtcagccggccgccccaacctgccctatattggccggatccagagcatgtgggagtcctggggcaacaatatggtggttcgtgtcaagtggttctaccatccggaggagaccagcccgggcaagcagttccatgagggccaggtgagtgtccctgatgggaactgaaagagtccctggtgtgtaaaggtagacccatggtgtttcatttctgttgatgctaaaataccctgccggaaagcaggagtaaggattttcttttagctgacagttctttgttatagaccagacagacagacagatagatcagctctgtggggagtcacagtggcaggagcatgaggcagcatgactgttgacagtcaggagcagagagaacgaacgcattcatgcttagtgctcagcttgcttcctctactcctgtagtccaaggttccctgtgcagggaatagaaccgcccacagtggactaggtcttaattaacaaaatcaatataatccccatcagatgtacccacaacccagtccgacttagtgcctgattgagactcttcccagataagtctaggtagaatcaaattggcaattaaaaaccattacaccgggctggagagatggctcagcggttaagagcactgactgctctcccgaaggtcctgagttcaattcccagcaaccacatggtggctcacaaccatctgtaatgggatctgataccctcttctggggtgtctgaaaacagctacagtgtactttcatataacaaataaataaatcttaaaaaaaaaaaacattactccatttgtggctgggcatgctgtggccctacccgtggaaaggctgagtagtccagggagtttgtgcagtgggcctggaatctcagatgggaggaaaacaaggctaagacttcctcttatccctccctcccccagcactgggaccagaagtcagggcatagcctccctgcagccctgcgggcctccagccagaggaaggacttcatggaggtaagacgcagcagtgggctcttggtgctggctgagggcaagctccgtccagatggggtgggcctcgagctttctgctctgcccctcctagcctcccttcctctctccctccctccctgcctcccccatccctctctctcatctgtggctctgggctgctggagtccctgtctctgtcccatctgctcactgaatctgcctttgtcctggcgtctcctcgtctcctagtgcccctttcctttctgtgtcttgctctggcatttgcaggcatatctgtttgtctcttcttctgttgtttcttttacttttctttcctgtatacacacacacacacacacacactttggtacctgggtggcaagtgtgcatgcaggtgtgggtagaggttcactgtcactattgggagacttcctgacaccaaacccaaagctcactgatacagctggtcttactagccagcttgctccaaaggtcctgtctctgtggtccaaggctgagatttcaggcggactaccacacccatctactgcttacaaggcttctgggactctgaacacaatggggatggcattacatcatcctgtgttcccttgctacctgtttccctccatctcttcatctctcttggtctctgtcattgtctctccatctgttgcttgtccctctttgttcccatctgtctctctatccatctgtctctgtctccaggtctctgcccttaaggcatcccagggtctccctgatccaggagggttccctccagtccctaacacccactgtgtccccacagcgcgccctgtaccagtcctcccacgtggatgagaacgatgtgcagacagtgtcccacaagtgcctggtggtgggcctggagcagtacgaacagatgctgaagaccaagaaataccaggacagcgagggcctctactacctcgcgggcacctatgagcccaccacaggcatgatcttctccacggacggcgtgcctgtgctctgttgagcgccgcccacccagcggggcccacagagaccccccctccccaccactgccatggcgcgggaccacgtgtgttgtgtgcatgccagtgtgcttgtgggcgtgtgcatgtggccaggtggacgccccaggcaagtgtgagtgtgtacatgtgtgtgcccgtatgcatgcacgtgtgtgcacacatgtgcacacatttccagaccctttctggtcatcccctggtgccctcatgctgagattcccccccccccccacctcagctatcagggtccggctctgctgtcccctcagggtcacctcagcgaggaggacttccctccggcactttgtctgcgctcaatgaggctgccctctgtgctctgggcctgtgtagactctttgattctgtggatggggtaagggagagttccaaggacccaaactggtgtttggtgtagagttcagccacacccagcacggagcccatccaagacctcctaccatggggcgggggggggtggggggggggtgcccaacgccagccagcttcaccaatcacccggggcatccgggtgtccgtatgcccggcctccaccctctcaggacagcctggaattggggaacagggagggcagcccaggagcgtcaccataccccgtgggcccccccagcccagacccttacactacagaaatccccaatggtgctgaaatccgcgcccacgcccggcacggcccgcccggcacggcccgcccggcacggcccgcccggcccctccaccaggaggatccgaaaggttacctgtacagtttcctgtagcctgcccctgtatcatacacctttaaatggagtcaactttttaattatatatataaagataaatatatataaatatatatataaactttttaaaactgtgaaaaatagctatgaaattataaaaaaaaacacattctgacgtgcagaatattattttttatttcctgttagatcgtgaatgtctagcaccggctttatgcctctcccccactcccctgtacccgcacccctgcccatgtgtactgtatgtgcccccaaatggatgagagatggaaatagaaagagggggcccgagcccagcccccagctcagcccgaagcacttaaccagtccccctgtgcctgccagaccccagtggggtccccggaggctttgagcagacaatcttgaaggaaggaaaagccagatttcggttttgttttttcttttctttttggggtgggggtaattactgtttcctgatttttttttttaagtttcttttggaattttgtttgttggcaaattctgtgtgatcttttttcataaaaaaaaaaaaaggaaagaaaaagagaaaagaaaaaatttaattggaaaaatactat

SEQ ID NO: 292 - DNA, 10718 bp, Mus musculus
tagatccagcgagaggaacttgaaaggggggttgtgtaatgtaccttttccaatcccgggctgtatatggagatttgggattctttaaaccggcgctacctggattttattaaaaagcggggagctcggcgggaggaaagctggcttttccgggggctgcgggagcggggccgcgggagggcggaggagttggcgcgccgcgcgcccggcccggggagcggttttctaccaaaaaaaggaaaggcgggcaaaaagtgtgaggcggctgcgggtggcggaggggagcggcggccgagggatggcgggcagtacgggcgcctagccgcgccaggaaccgcggcggttgccggagtcgccgtcggagcctggagcccggagccccgccgcgccagataccgtgtacgcctccttcctcatctccgctcagccgcccggaggggactcaccgcgggcggttcatgcgccccgggccgcgggcccgtggttgagcgcaagccccgctggccgccgccatgcacgccgcggagcgcccgccacccgaggacactaggactacatcgaggccgaacttttaagtcccactgaagcaggccggcgggccgggtggggaggctgatcgcggcactcccgcggaggatggatggccgagatttcgggccccagcggtccgtccacggccccccgccgccgctgctgtccggcttggccatggacagccaccgcgtgggcgcggccaccgccggacgcttgccctcctcgggcttgccaggtcccccgccgcccgggaaatacatggccggtctcaaccttcacccgcacccgggcttctcccacctgcccagtgggctatatccatcctacctccacctgaaccacctggacccccccagcagtgggagccccctcctcagccagctgggtcagcccagcatcttcgatacccagaaagatggcttctacctgcccgcaccggggaccctgcatgctcacacgccctcgtccagaactcccagtggccactcctcaggtggtccagccaaaggctcctcccgggaaggtacagggaaggatcgtgcaggccgtggtggagaccctcctccgttgtttggcaagaaagaccctcgggcacgtgaggaggtgtccgggccccgaggtgtggtggacttgacccaggaggcccgagcggagggccgccaggaccgaggatcctcacgcctggctgagcgcctgtctccctttctggcagaggtcaaagccaagggtgcactgcagccgtcggccctgagcctgtgcaatggtgtggtggacgcggggctggtggccgagttgggccgtggaggtgccaaggaggtagccaggcaggaggagaatgctcggctgctgaggcgggctgaggccctgctgcccgctgcaaggccctgtgggtccccactaccgccgccacctccactgccccccaagggtccccctgcacccccttcctctacaccagccggtgtgtacaccgtgttccgtgaaccaggccgtgagcaccgcgtggtggcacccacctttgtgccttctgtggaggcctttgatgagcgggtgggacccatccagatagcatcccaggctcgcgatgtccgggccagggagcgtgagccgggccgtcctggggtcctgcaaggtccacccggatctccacgcctggagcggccagaggttctgcgggagaaaagctcggtcatccgctccctcaagcgtccgcctccatccgatggacccccagcagcccgctcctcccgctcctccccggatgcgcgagcctacctgccccccaaggaactactcaagcccgaggctgatccgaggccttgcgagcgcgcaccccgaggcccgagcgcttctgctgcccagcaggctgctaagctctttggcctggaaccatcccgaccccccgggccggagcataagtggaaaccctttgaactgggcaacttcgccaccacgcagatggctgtcctggcagcccagcaccaccatgccagcagagccgaagaggaagcagctgtcgccacagcatccaaaaaggcctacctggaccccgggggcgcaatgccccgtgcctcggccacctgcggcaggccaggtgctgacctccactcggcagcccacggacccggagaggcctctgctatgcagagcctcatcaaatacagcggtagctttgctcgggaggcggtggcagtgcgccctggtggctgtgggaagaagagcccctttggaggcctgggcaccatgaaacctgaacctacgcccacgtcggcgggtccccctagagcccaggcccggctcacacaccccggggtccctacagccggagggggccggcagctgaaacgggacccagagagacctgagagcgccaaggcctttgggagagagggctctggtgcccagggggaagccgaagtaagacacccgcctgttggcattgctgtggctgtggcccggcagaaggacagtggaagcagtagccggctggggcctgggctgggagaccaggaacgcactttgtcactgaacaatgtcaaagggcatggccggactgatgatgagtgtgatcgagccaggcatcgggaggatcggctgctagggacacggctggaccgggaccaggagaagttgctccgagaaagtaaggagctggctgacctggcccgtctacaccccaccagctgcgctcccaatggcctgaaccccaaccttatggtgactggtggcccaacgctggcaggctcgggacgctggtctgctgatcctgctgctcatttggccacgaacccctggctgccacgctcgggtagtacatccatgtggcttgccggacacccttatggcctgggacccccctctttgcaccagggcatggcccctgcatttccacctggcttagggggctccttgccgtcagcttaccagttcgtcagggacccccagtctggccagctggtggttatccctagtgatcacctgcctcattttgccgagctgatggagcgcgcggcggtgccgcccctctggccggccctgtacccaccaggccgcagcccactgcaccacgctcagcagctgcagctcttctctcagcagcactttttgaggcagcaagaactgctctacctgcaacagcaggcggcccaggccctggagctgcagcggagcgcacagctggtgcaggagcggttgaaagcacaagagcatcgaacggagatggaggagaagattagcaagaggagcctggagaccacgggcaaggccggcctgagtgccgcaggccctgggctcctgcctcgaaagtctgccggcctggccaacggcccggcaggcagccacggcaaggccgtgagcccacccccgtctccccgagcctcccccgtgacctctctgaaggccaaggtcatccagaaggtggaagatgtgtctaagcctccagcctatacctaccccgccacacctagctcgcaccccagcagcccaccacctgcctccccacctcctacccctgggctcacccgaaaggaagaggctcccgagaacgtggtggagaagaaagacctggagttggagaaggagacgcccagtccgttccaggccctgttcacagatattcctcccaggtatccattccaagccctgccgccgcactacgggcgaccctaccccttcctgctgcaacccgctgcggcctctgatgccgatggcctcgccccagatgtgccactcccagctgatgggcccgagcgcctggcactgtctcctgaagataagcccatctgcctgtcaccctccaagatcccagagccacctcgggacagcccagaggaggagcagctggctgaccgggaggtgaaggctgaagttgaggatatcgaagagggccccacagaactgcctccccttgagtcaccattggccctgcccgtcccagagaccatggtggccgtgagccccgcaggtggctgtggaggtagtcctctcgaggcccaggcgttgagcacagcaggtccgggctgccgggagccctctgaagtttcagactttgcacaggttgccgagccgcagatagaactaccgagtaagacagagcaccgcatgactgccctggagttggggacacagctgacacccgagccactggtagagactaaggaagagccggtggaggtgcccctggatgtgccgatggaggagcccaccacagaggcagggcctgaggacagtctgccccagccatctttgactgagcctcagcccagccttgagctctcagactgtgatttgcctgtcccagagggccagtgtctcaacctggaggcccaggaggctgtgcctgctcctgccagtacctgttatctggaagagacccactccgaatccctcctgcctggcctggatgacccactggccggcatgaatgcactggcagctgcagccgagctgccccaagccaggcctctgccctccttgggtcctggagtcccagccggggagaagctggatacagcccccagcctcgtcctggaacacagctttctgcagggcatcaccctcttgagtgagatagctgagctggagctggaccggaggggccaggaggctgcagatccagagccaaacctggtggtgcgaccctccctcgaaagcctgctggcagccagcagccacatgttgaaggaggtgctggagagccccttctcagacccgctcaagaacttgcggcttccgcgtgaactgaactccaataagaaatatagctggatgcagaagaaggaagagcggatgtttgctatgaaatcttccttggaggacatggatgcgctagagctggacttccggatgcggctggcagaggtccagcgaaggtacaaagagaaacagcgggagttggtcaagctccagagacgccgggactcgggggacaggcacgaggatgcccatagaagcctggcacgcagaggccctggcaggccgaggaaacggacccacaccctgagcgccctgtcgcccccctgcaagagagggaagagccacagcagtagcggaaagctgagcagcaagtccttgctgacatcagacgactatgatctgggagcggggataaggaagagacacaaggggcccgaggaggagcaagaggccctcatgggcatggggaaagcccgcagcaggaaccagagctgggacgatcacgactcctcatctgattttatgagtcagctaaagattaagaaaaaaaagatggcaagcgaccaggagcagttggcaagcaagctagacagagccctctccctcacaaaacaagacaagctgaagtcacccttcaagttttccgacggccccgggggaaaaccgaaaaccggtgggggctgtggcaggttcttgacacagtatgacagcctgctgggcaaggacaggaaagcactggccaaaggactcggcttgtctctgaaaccctccagagaaggtaaacacaaaagagcttccaaagccaggaagatggaggggggcttccaggccagaggccagcccaagtctgtccattctccatttgcctcggaagtcagcagtcagtcttacaatacggactctgacgaagacgaagacttcctgaagaatgagtggtctgcccagggcccctccagctccaaactgacctcgtccctcctgtgtggcatggtgcccaagaacagcaagccagccacaggccctaagctgaccaagaggggcctggcaggcccccggactttgaaacccaaggtggtcaccagcaggaagcagtccttctgtttgctgctccgagaggctgaggcccgctcctccttcagcgactcttccgaggaggactcctttgaccaagatgacagctcagaagaggaggaggaagagctagaggaagaggaggaagacgaggaagaggaaggcattggtagctataggctgggtgctggggaacaggccctgtcgccaagcctggaggagagtggactggggctgctggcccgctttgcggccagcgctctccccagccctgtcgtggggccgcccttgtctgtggtacagctggaagctgagcagaaggcccggaagaaggaagagcgacagagcttgctgggcacagagttcgagtacacagactcagagagtgaagtgaaggttcccaagcagtcagctgctgggctgctgcggaccaagaaaggggtgggggagcccggacagtctctggctgcacccggacctggcagccgggcctctggtccctccagcccagacaaggccaagctggtctcagagaagggacgcaaagcccggaagattcgaggccccaaggaacctggctttgaggcggggccagaggccagtgatgatgacctgtggacgcgacgcagaagcgagcgcatcttcttacacgatgcctccgctgcagtccaggcaaccagcaacacggcgccagcaaccaagcctagccgctgtggcaggggtggtgccccaagcccacggaaggacaccgggcgagccaaggacaggaaggaccccaggaagaagaagagagggaaggaggctgggtcagcagccacactgccaccaccccgtgtttctaccctgcctgactccagggcaccccacccaggggccctggcgactgccaaacgcagcaaggccaaggccagagggaaggaagcaaagaaggagaaccgaggaaaagggggtgccgtgagtaagctgatggagtgcatggctgcagaggaagacttcgaagccaaccaggactcaagcttctctgaggatgagcatctgccgcggggcggggccacagagagacctctgaccccagccccccgctcctgcatcattgacaaggaagagctgaaggatggcctgcgtgtgctcatccctctggatgacaagctgctgtatgccgggcacgtgcagaccgtgcattcacctgacatataccgtgtggtggttgaaggtgagcgtgggaaccgaccccacatctactgcctggagcagctactgcaggaggcgattatagatgtgaggccggcctctacacgcttcttgccccaggggaccaggatcgctgcctactggagccaacaataccgctgcctgtatccaggcactgtggtccgagggctgctggacctggaagacgacggagacctgatcaccgtggagtttgatgacggagatacaggcaggattcccctctcacacatccgcctcttgccacctgactataaaatccaatgtgctgagccctccccagcactcctagtgcccagcgcaaaacgccgtagcaggaagaccagtaaagacacgggggaagtcaaagaaggggctgccacagggcctcaggaggctacagggggcaaggctcgagggcgaggacggaaacctagcaccaaagccaaggctgacagagctgttgtcctggaggaaggggctgccaccaatgaggtccccagtgctcccttggctctggaacccatcagcactccaaattctaagaagagtaccccagaaccagtggacaagcgggcccgagcccccaaagcacgctcaatctctgcacagcccagccccgtaccacccaccttctctagctgcccagctcctgagccctttggggagcttccaacccccgctacagccccgctcgtcaccatgcctgtcaccatgcctgccactcgccctaaacccaagaaggctcgggccgctgaggggtccggtgccaaaggtccccggaggccaggggaagatgacgaactgcttgtcaaactggaccatgagggggtcatgtctcccaaaagcaagaaggccaaagaggccctcctcctgcgggaagatccagggccggggggttggccagagtccacagggctgctcagcctgggcagctactcaccagctgttggcagcagtgagcccaaggccacctggcccaagggtctggatggagacctcactcaggagcccgggccaggtcttcctttagaagatcctggcaactccaaaaacccagacaaggcccaggctgaacaagatggggcagaggagtcagagaccacttccagcagcagcagcagtagcagcagtagcagtagcagcagcagcagcagcagcagcagtagcagcagcagcagtggttcggagacagaaggcgaggaggatgctgagaagaacagggaggatggccggggtgcagggggccggacctgcagtgctgcgagctccagggcctcttctcctgcctcctcctcttcttcctcctcctcctcttcttcctcctcttcttcctcttcctcctcctcttcttcctcctcctcttcctcctcctcttcctcctcttcttcctcttcctcctcttcctcctcttcctcttctaccacagacgaggactcttcttgcagctcagatgaggaagcagcccctgcacccgccgctggtccctctacccagccagcgctccccacgaaggtatccaagccacctagcaaggcacgttcctcagcccactccccaggcaagaaggcacccaccaccacccagccaccgccccagcccccaccccagccccagcagactcttcagcccaagacccaggctggggctggggccaagagccgacccaagaagagagaaggcgtacacctgcctaccaccaaggagctggccaagcggcagcggctgccgtctgtggagaacaggcctaagatcgcggccttcttacctgcccggcagctttggaagtggtttggcaagcccacccagcggcgaggcatgaaaggcaaggctcgcaagctcttctacaaggccatcgtccgaggcaaggagatgatccgaatcggtgactgcgcagtcttcctgtcagccggccgccccaacctgccctatattggccggatccagagcatgtgggagtcctggggcaacaatatggtggttcgtgtcaagtggttctaccatccggaggagaccagcccgggcaagcagttccatgagggccagcactgggaccagaagtcagggcatagcctccctgcagccctgcgggcctccagccagaggaaggacttcatggagcgcgccctgtaccagtcctcccacgtggatgagaacgatgtgcagacagtgtcccacaagtgcctggtggtgggcctggagcagtacgaacagatgctgaagaccaagaaataccaggacagcgagggcctctactacctcgcgggcacctatgagcccaccacaggcatgatcttctccacggacggcgtgcctgtgctctgttgagcgccgcccacccagcggggcccacagagaccccccctccccaccactgccatggcgcgggaccacgtgtgttgtgtgcatgccagtgtgcttgtgggcgtgtgcatgtggccaggtggacgccccaggcaagtgtgagtgtgtacatgtgtgtgcccgtatgcatgcacgtgtgtgcacacatgtgcacacatttccagaccctttctggtcatcccctggtgccctcatgctgagattcccccccccccccacctcagctatcagggtccggctctgctgtcccctcagggtcacctcagcgaggaggacttccctccggcactttgtctgcgctcaatgaggctgccctctgtgctctgggcctgtgtagactctttgattctgtggatggggtaagggagagttccaaggacccaaactggtgtttggtgtagagttcagccacacccagcacggagcccatccaagacctcctaccatggggcgggggggggtggggggggggtgcccaacgccagccagcttcaccaatcacccggggcatccgggtgtccgtatgcccggcctccaccctctcaggacagcctggaattggggaacagggagggcagcccaggagcgtcaccataccccgtgggcccccccagcccagacccttacactacagaaatccccaatggtgctgaaatccgcgcccacgcccggcacggcccgcccggcacggcccgcccggcacggcccgcccggcccctccaccaggaggatccgaaaggttacctgtacagtttcctgtagcctgcccctgtatcatacacctttaaatggagtcaactttttaattatatatataaagataaatatatataaatatatatataaactttttaaaactgtgaaaaatagctatgaaattataaaaaaaaacacattctgacgtgcagaatattattttttatttcctgttagatcgtgaatgtctagcaccggctttatgcctctcccccactcccctgtacccgcacccctgcccatgtgtactgtatgtgcccccaaatggatgagagatggaaatagaaagagggggcccgagcccagcccccagctcagcccgaagcacttaaccagtccccctgtgcctgccagaccccagtggggtccccggaggctttgagcagacaatcttgaaggaaggaaaagccagatttcggttttgttttttcttttctttttggggtgggggtaattactgtttcctgatttttttttttaagtttcttttggaattttgtttgttggcaaattctgtgtgatcttttttcataaaaaaaaaaaaaggaaagaaaaagagaaaagaaaaaatttaattggaaaaatactat

SEQ ID NO: 293 - protein, 2871 aa, Mus musculus
MDGRDFGPQRSVHGPPPPLLSGLAMDSHRVGAATAGRLPSSGLPGPPPPGKYMAQLHPHPGFSHLPSGPSYLHLNHLDPPSSGSPLLSQLGQPSIFDTQKDGFYLPAPGTLHAHTPSSRTPSGHSSGGPAKGSSREGTGKDRAGRGGDPPPLFGKKDPRAREEVSGPRGVVDLTQEARAEGRQDRGSSRLAERLSPFLAEVKAKGALQPSALSLCNGVVDAGLVAELGRGGAKEVARQEENARLLRRAEALLPAARPCGSPLPPPPPLPPKGPPAPPSSTPAGVYTVFREPGREHRVVAPTFVPSVEAFDERVGPIQIASQARDVRAREREPGRPGVLQGPPGSPRLERPEVLREKSSVIRSLKRPPPSDGPPAARSSRSSPDARAYLPPKELLKPEADPRPCERAPRGPSASAAQQAAKLFGLEPSRPPGPEHKWKPFELGNFATTQMAVLAAQHHHASRAEEEAAVATASKKAYLDPGGAMPRASATCGRPGADLHSAAHGPGEASAMQSLIKYSGSFAREAVAVRPGGCGKKSPFGGLGTMKPEPTPTSAGPPRAQARLTHPGVPTAGGGRQLKRDPERPESAKAFGREGSGAQGEAEVRHPPVGIAVAVARQKDSGSSSRLGPGLGDQERTLSLNNVKGHGRTDDECDRARHREDRLLGTRLDRDQEKLLRESKELADLARLHPTSCAPNQPNLMVTGGPTLAGSGRWSADPAAHLATNPWLPRSGSTSMWLAGHPYGLGPPSLHQGMAPAFPPGLGGSLPSAYQFVRDPQSGQLVVIPSDHLPHFAELMERAAVPPLWPALYPPGRSPLHHAQQLQLFSQQHFLRQQELLYLQQQAAQALELQRSAQLVQERLKAQEHRTEMEEKISKRSLETTGKAGLSAAGPGLLPRKSAGLANGPAGSHGKAVSPPPSPRDVTSLKAKVIQKVEDVSKPPAYTYPATPSSHPSSPPPDPPTPGLTRKEEAPENVVEKKDLELEKETPSPFQALFTDIPPRYPFQALPPHYGRPYPFLLQPAAASDADGLAPDVPLPADGPERLALSPEDKPICLSPSKIPEPPRDSPEEEQLADREVKAEVEDIEEGPTELPPLESPLALPVPETMVAVSPAGGCGGSPLEAQALSTAGPGCREPSEVSDFAQVAEPQIELPSKTEHRMTALELGTQLTPEPLVETKEEPVEVPLDVPMEEPTTEAGPEDSLPQPSLTEPQPSLELSDCDLPVPEGQCLNLEAQEAVPAPASTCYLEETHSESLLPGLDDPLAGMNAAAAELPQARPLPSLGPGVPAGEKLDTAPSLVLEHSFLQGITLLSEIAELELDRRGQEAADPEPNLVVRPSLESLLAASSHMLKEVLESPFSDPLKNLRLPRELNSNKKYSWMQKKEERMFAMKSSLEDMDALELDFRMRLAEVQRRYKEKQRELVKLQRRRDSGDRHEDAHRSLARRGPGRPRKRTHTLSALSPPCKRGKSHSSSGKLSSKSLLTSDDYDLGAGIRKRHKGPEEEQEALMGMGKARSRNQSWDDHDSSSDFMSQLKIKKKKMASDQEQLASKLDRALSLTKQDKLKSPFKFSDGPGGKPKTGGGCGRFLTQYDSLLGKDRKAKGLGLSLKPSREGKHKRASKARKMEGGFQRQPKSVHSPFASEVSSQSYNTDSDEDEDFLKNEWSAQGPSSSKLTSSLLCGMVPKNSKPATGPKLTKRGLAGPRTLKPKVVTSRKQSFCLLLREAEARSSFSDSSEEDSFDQDDSSEEEEEELEEEEEDEEEEGIGSYRLGAGEQALSPSLEESGLGLLARFAASALPSPVVGPPLSVVQLEAEQKARKKEERQSLLGTEFEYTDSESEVKVPKQSAAGLLRTKKGVGEPGQSLAAPGPGSRASGPSSPDKAKLVSEKGRKARKIRGPKEPGFEAGPEASDDDLWTRRRSIFLHDASAAVQATSNTAPATKPSRCGRGGAPSPRKDTGRAKDRKDPRKKKRGKEAGSAATLPPPRVSTLPDSRAPHPGATAKRSKAKRKEAKKENRGKGGAVSKLMECMAAEEDFEANQDSSFSEDEHLPRGGATERPLTPAPRSCIIDKEELKDGLRVLIPLDDKLLYAGHVQTVHSPDIYRVVVEGERGNRPHIYCLEQLLQEAIIDVRPASTRFLPQGTRIAAYWSQQYRCLYPGTVVRGLLDLEDDGDLITVEFDDGDTGRIPLSHIRLLPPDYKIQCAEPSPALLVPSAKRRSRKTSKDTGEVKEGAATGPQEATGGKRRGRKPSTKAKADRAVVLEEGAATNEVPSAPLALEPISTPNSKKSTPEPVDKRARAPKARSISAQPSPVPPTFSSCPAPEPFGELPTPATAPLVTMPVTMPAWKPKKARAAEGSGAKGPRRPGEDDELLVKLDHEGVMSPKSKKAKEALLLREDPGPGGWPESTGLLSLGSYSPAVGSSEPKATWPKGLDGDLTQEPGPGLPLEDPGNSKNPDKAQAEQDGAEESETTSSSSSSSSSSSSSSSSSSSSSSSSSGSETEGEEDAEKNREDGRGAGGRTCSAASSRASSPASSSSSSSSSSSSSSSSSSSSSSSSSSSSSSSSSSSSSSSSSSSSTTDEDSSCSSDEEAAPAPAAGPSTQPALPTKVSKPPSKARSSAHSPGKKAPTTTQPPPQPPPQPQQTLQPKTQAGAGAKSRPKKREGVHLPTTKELAKRQRLPSVENRPKIAAFLPARQLWKWFGKPTQRRGMKGKARKLFYKAIVRGKEMIRIGDCAVFLSAGRPNLPYIGRIQSMWESWGNNMVVRVKWFYHPEETSPGKQFHEGQHWDQKSGHSLPAALRASSQRKDFMERALYQSSHVDENDVQTVSHKCLVVGLEQYEQMLKTKKYQDSEGYLAGTYEPTTGMIFSTDGVPVLC

SEQ ID NO: 294 - DNA, 10571 bp, Mus musculus
tagatccagcgagaggaacttgaaaggggggttgtgtaatgtaccttttccaatcccgggctgtatatggagatttgggattctttaaaccggcgctacctggattttattaaaaagcggggagctcggcgggaggaaagctggcttttccgggggctgcgggagcggggccgcgggagggcggaggagttggcgcgccgcgcgcccggcccggggagcggttttctaccaaaaaaaggaaaggcgggcaaaaagtgtgaggcggctgcgggtggcggaggggagcggcggccgagggatggcgggcagtacgggcgcctagccgcgccaggaaccgcggcggttgccggagtcgccgtcggagcctggagcccggagccccgccgcgccagataccgtgtacgcctccttcctcatctccgctcagccgcccggaggggactcaccgcgggcggttcatgcgccccgggccgcgggcccgtggttgagcgcaagccccgctggccgccgccatgcacgccgcggagcgcccgccacccgaggacactaggactacatcgaggccgaacttttaagtcccactgaagcaggccggcgggccgggtggggaggctgatcgcggcactcccgcggaggatggatggccgagatttcgggccccagcggtccgtccacggccccccgccgccgctgctgtccggcttggccatggacagccaccgcgtgggcgcggccaccgccggacgcttgccctcctcgggcttgccaggtcccccgccgcccgggaaatacatggccggtctcaaccttcacccgcacccgggcttctcccacctgcccagtgggctatatccatcctacctccacctgaaccacctggacccccccagcagtgggagccccctcctcagccagctgggtcagcccagcatcttcgatacccagaaagatggcttctacctgcccgcaccggggaccctgcatgctcacacgccctcgtccagaactcccagtggccactcctcaggtggtccagccaaaggctcctcccgggaaggtacagggaaggatcgtgcaggccgtggtggagaccctcctccgttgtttggcaagaaagaccctcgggcacgtgaggaggtgtccgggccccgaggtgtggtggacttgacccaggaggcccgagcggagggccgccaggaccgaggatcctcacgcctggctgagcgcctgtctccctttctggcagaggtcaaagccaagggtgcactgcagccgtcggccctgagcctgtgcaatggtgtggtggacgcggggctggtggccgagttgggccgtggaggtgccaaggaggtagccaggcaggaggagaatgctcggctgctgaggcgggctgaggccctgctgcccgctgcaaggccctgtgggtccccactaccgccgccacctccactgccccccaagggtccccctgcacccccttcctctacaccagccggtgtgtacaccgtgttccgtgaaccaggccgtgagcaccgcgtggtggcacccacctttgtgccttctgtggaggcctttgatgagcgggtgggacccatccagatagcatcccaggctcgcgatgtccgggccagggagcgtgagccgggccgtcctggggtcctgcaaggtccacccggatctccacgcctggagcggccagaggttctgcgggagaaaagctcggtcatccgctccctcaagcgtccgcctccatccgatggacccccagcagcccgctcctcccgctcctccccggatgcgcgagcctacctgccccccaaggaactactcaagcccgaggctgatccgaggccttgcgagcgcgcaccccgaggcccgagcgcttctgctgcccagcaggctgctaagctctttggcctggaaccatcccgaccccccgggccggagcataagtggaaaccctttgaactgggcaacttcgccaccacgcagatggctgtcctggcagcccagcaccaccatgccagcagagccgaagaggaagcagctgtcgccacagcatccaaaaaggcctacctggaccccgggggcgcaatgccccgtgcctcggccacctgcggcaggccaggtgctgacctccactcggcagcccacggacccggagaggcctctgctatgcagagcctcatcaaatacagcggtagctttgctcgggaggcggtggcagtgcgccctggtggctgtgggaagaagagcccctttggaggcctgggcaccatgaaacctgaacctacgcccacgtcggcgggtccccctagagcccaggcccggctcacacaccccggggtccctacagccggagggggccggcagctgaaacgggacccagagagacctgagagcgccaaggcctttgggagagagggctctggtgcccagggggaagccgaagtaagacacccgcctgttggcattgctgtggctgtggcccggcagaaggacagtggaagcagtagccggctggggcctgggctgggagaccaggaacgcactttgtcactgaacaatgtcaaagggcatggccggactgatgatgagtgtgatcgagccaggcatcgggaggatcggctgctagggacacggctggaccgggaccaggagaagttgctccgagaaagtaaggagctggctgacctggcccgtctacaccccaccagctgcgctcccaatggcctgaaccccaaccttatggtgactggtggcccaacgctggcaggctcgggacgctggtctgctgatcctgctgctcatttggccacgaacccctggctgccacgctcgggtagtacatccatgtggcttgccggacacccttatggcctgggacccccctctttgcaccagggcatggcccctgcatttccacctggcttagggggctccttgccgtcagcttaccagttcgtcagggacccccagtctggccagctggtggttatccctagtgatcacctgcctcattttgccgagctgatggagcgcgcggcggtgccgcccctctggccggccctgtacccaccaggccgcagcccactgcaccacgctcagcagctgcagctcttctctcagcagcactttttgaggcagcaagaactgctctacctgcaacagcaggcggcccaggccctggagctgcagcggagcgcacagctggtgcaggagcggttgaaagcacaagagcatcgaacggagatggaggagaagattagcaagaggagcctggagaccacgggcaaggccggcctgagtgccgcaggccctgggctcctgcctcgaaagtctgccggcctggccaacggcccggcaggcagccacggcaaggccgtgagcccacccccgtctccccgagcctcccccgtgacctctctgaaggccaaggtcatccagaaggtggaagatgtgtctaagcctccagcctatacctaccccgccacacctagctcgcaccccagcagcccaccacctgcctccccacctcctacccctgggctcacccgaaaggaagaggctcccgagaacgtggtggagaagaaagacctggagttggagaaggagacgcccagtccgttccaggccctgttcacagatattcctcccaggtatccattccaagccctgccgccgcactacgggcgaccctaccccttcctgctgcaacccgctgcggcctctgatgccgatggcctcgccccagatgtgccactcccagctgatgggcccgagcgcctggcactgtctcctgaagataagcccatctgcctgtcaccctccaagatcccagagccacctcgggacagcccagaggaggagcagctggctgaccgggaggtgaaggctgaagttgaggatatcgaagagggccccacagaactgcctccccttgagtcaccattggccctgcccgtcccagagaccatggtggccgtgagccccgcaggtggctgtggaggtagtcctctcgaggcccaggcgttgagcacagcaggtccgggctgccgggagccctctgaagtttcagactttgcacaggttgccgagccgcagatagaactaccgagtaagacagagcaccgcatgactgccctggagttggggacacagctgacacccgagccactggtagagactaaggaagagccggtggaggtgcccctggatgtgccgatggaggagcccaccacagaggcagggcctgaggacagtctgccccagccatctttgactgagcctcagcccagccttgagctctcagactgtgatttgcctgtcccagagggccagtgtctcaacctggaggcccaggaggctgtgcctgctcctgccagtacctgttatctggaagagacccactccgaatccctcctgcctggcctggatgacccactggccggcatgaatgcactggcagctgcagccgagctgccccaagccaggcctctgccctccttgggtcctggagtcccagccggggagaagctggatacagcccccagcctcgtcctggaacacagctttctgcagggcatcaccctcttgagtgagatagctgagctggagctggaccggaggggccaggaggctgcagatccagagccaaacctggtggtgcgaccctccctcgaaagcctgctggcagccagcagccacatgttgaaggaggtgctggagagccccttctcagacccgctcaagaacttgcggcttccgcgtgaactgaactccaataagaaatatagctggatgcagaagaaggaagagcggatgtttgctatgaaatcttccttggaggacatggatgcgctagagctggacttccggatgcggctggcagaggtccagcgaaggtacaaagagaaacagcgggagttggtcaagctccagagacgccgggactcggggctgagcagcaagtccttgctgacatcagacgactatgatctgggagcggggataaggaagagacacaaggggcccgaggaggagcaagaggccctcatgggcatggggaaagcccgcagcaggaaccagagctgggacgatcacgactcctcatctgattttatgagtcagctaaagattaagaaaaaaaagatggcaagcgaccaggagcagttggcaagcaagctagacagagccctctccctcacaaaacaagacaagctgaagtcacccttcaagttttccgacggccccgggggaaaaccgaaaaccggtgggggctgtggcaggttcttgacacagtatgacagcctgctgggcaaggacaggaaagcactggccaaaggactcggcttgtctctgaaaccctccagagaaggtaaacacaaaagagcttccaaagccaggaagatggaggggggcttccaggccagaggccagcccaagtctgtccattctccatttgcctcggaagtcagcagtcagtcttacaatacggactctgacgaagacgaagacttcctgaagaatgagtggtctgcccagggcccctccagctccaaactgacctcgtccctcctgtgtggcatggtgcccaagaacagcaagccagccacaggccctaagctgaccaagaggggcctggcaggcccccggactttgaaacccaaggtggtcaccagcaggaagcagtccttctgtttgctgctccgagaggctgaggcccgctcctccttcagcgactcttccgaggaggactcctttgaccaagatgacagctcagaagaggaggaggaagagctagaggaagaggaggaagacgaggaagaggaaggcattggtagctataggctgggtgctggggaacaggccctgtcgccaagcctggaggagagtggactggggctgctggcccgctttgcggccagcgctctccccagccctgtcgtggggccgcccttgtctgtggtacagctggaagctgagcagaaggcccggaagaaggaagagcgacagagcttgctgggcacagagttcgagtacacagactcagagagtgaagtgaaggttcccaagcagtcagctgctgggctgctgcggaccaagaaaggggtgggggagcccggacagtctctggctgcacccggacctggcagccgggcctctggtccctccagcccagacaaggccaagctggtctcagagaagggacgcaaagcccggaagattcgaggccccaaggaacctggctttgaggcggggccagaggccagtgatgatgacctgtggacgcgacgcagaagcgagcgcatcttcttacacgatgcctccgctgcagtccaggcaaccagcaacacggcgccagcaaccaagcctagccgctgtggcaggggtggtgccccaagcccacggaaggacaccgggcgagccaaggacaggaaggaccccaggaagaagaagagagggaaggaggctgggtcagcagccacactgccaccaccccgtgtttctaccctgcctgactccagggcaccccacccaggggccctggcgactgccaaacgcagcaaggccaaggccagagggaaggaagcaaagaaggagaaccgaggaaaagggggtgccgtgagtaagctgatggagtgcatggctgcagaggaagacttcgaagccaaccaggactcaagcttctctgaggatgagcatctgccgcggggcggggccacagagagacctctgaccccagccccccgctcctgcatcattgacaaggaagagctgaaggatggcctgcgtgtgctcatccctctggatgacaagctgctgtatgccgggcacgtgcagaccgtgcattcacctgacatataccgtgtggtggttgaaggtgagcgtgggaaccgaccccacatctactgcctggagcagctactgcaggaggcgattatagatgtgaggccggcctctacacgcttcttgccccaggggaccaggatcgctgcctactggagccaacaataccgctgcctgtatccaggcactgtggtccgagggctgctggacctggaagacgacggagacctgatcaccgtggagtttgatgacggagatacaggcaggattcccctctcacacatccgcctcttgccacctgactataaaatccaatcactcctagtgcccagcgcaaaacgccgtagcaggaagaccagtaaagacacgggggaagtcaaagaaggggctgccacagggcctcaggaggctacagggggcaaggctcgagggcgaggacggaaacctagcaccaaagccaaggctgacagagctgttgtcctggaggaaggggctgccaccaatgaggtccccagtgctcccttggctctggaacccatcagcactccaaattctaagaagagtaccccagaaccagtggacaagcgggcccgagcccccaaagcacgctcaatctctgcacagcccagccccgtaccacccaccttctctagctgcccagctcctgagccctttggggagcttccaacccccgctacagccccgctcgtcaccatgcctgtcaccatgcctgccactcgccctaaacccaagaaggctcgggccgctgaggggtccggtgccaaaggtccccggaggccaggggaagatgacgaactgcttgtcaaactggaccatgagggggtcatgtctcccaaaagcaagaaggccaaagaggccctcctcctgcgggaagatccagggccggggggttggccagagtccacagggctgctcagcctgggcagctactcaccagctgttggcagcagtgagcccaaggccacctggcccaagggtctggatggagacctcactcaggagcccgggccaggtcttcctttagaagatcctggcaactccaaaaacccagacaaggcccaggctgaacaagatggggcagaggagtcagagaccacttccagcagcagcagcagtagcagcagtagcagtagcagcagcagcagcagcagcagcagtagcagcagcagcagtggttcggagacagaaggcgaggaggatgctgagaagaacagggaggatggccggggtgcagggggccggacctgcagtgctgcgagctccagggcctcttctcctgcctcctcctcttcttcctcctcctcctcttcttcctcctcttcttcctcttcctcctcctcttcttcctcctcctcttcctcctcctcttcctcctcttcttcctcttcctcctcttcctcctcttcctcttctaccacagacgaggactcttcttgcagctcagatgaggaagcagcccctgcacccgccgctggtccctctacccagccagcgctccccacgaaggtatccaagccacctagcaaggcacgttcctcagcccactccccaggcaagaaggcacccaccaccacccagccaccgccccagcccccaccccagccccagcagactcttcagcccaagacccaggctggggctggggccaagagccgacccaagaagagagaaggcgtacacctgcctaccaccaaggagctggccaagcggcagcggctgccgtctgtggagaacaggcctaagatcgcggccttcttacctgcccggcagctttggaagtggtttggcaagcccacccagcggcgaggcatgaaaggcaaggctcgcaagctcttctacaaggccatcgtccgaggcaaggagatgatccgaatcggtgactgcgcagtcttcctgtcagccggccgccccaacctgccctatattggccggatccagagcatgtgggagtcctggggcaacaatatggtggttcgtgtcaagtggttctaccatccggaggagaccagcccgggcaagcagttccatgagggccagcactgggaccagaagtcagggcatagcctccctgcagccctgcgggcctccagccagaggaaggacttcatggagcgcgccctgtaccagtcctcccacgtggatgagaacgatgtgcagacagtgtcccacaagtgcctggtggtgggcctggagcagtacgaacagatgctgaagaccaagaaataccaggacagcgagggcctctactacctcgcgggcacctatgagcccaccacaggcatgatcttctccacggacggcgtgcctgtgctctgttgagcgccgcccacccagcggggcccacagagaccccccctccccaccactgccatggcgcgggaccacgtgtgttgtgtgcatgccagtgtgcttgtgggcgtgtgcatgtggccaggtggacgccccaggcaagtgtgagtgtgtacatgtgtgtgcccgtatgcatgcacgtgtgtgcacacatgtgcacacatttccagaccctttctggtcatcccctggtgccctcatgctgagattcccccccccccccacctcagctatcagggtccggctctgctgtcccctcagggtcacctcagcgaggaggacttccctccggcactttgtctgcgctcaatgaggctgccctctgtgctctgggcctgtgtagactctttgattctgtggatggggtaagggagagttccaaggacccaaactggtgtttggtgtagagttcagccacacccagcacggagcccatccaagacctcctaccatggggcgggggggggtggggggggggtgcccaacgccagccagcttcaccaatcacccggggcatccgggtgtccgtatgcccggcctccaccctctcaggacagcctggaattggggaacagggagggcagcccaggagcgtcaccataccccgtgggcccccccagcccagacccttacactacagaaatccccaatggtgctgaaatccgcgcccacgcccggcacggcccgcccggcacggcccgcccggcacggcccgcccggcccctccaccaggaggatccgaaaggttacctgtacagtttcctgtagcctgcccctgtatcatacacctttaaatggagtcaactttttaattatatatataaagataaatatatataaatatatatataaactttttaaaactgtgaaaaatagctatgaaattataaaaaaaaacacattctgacgtgcagaatattattttttatttcctgttagatcgtgaatgtctagcaccggctttatgcctctcccccactcccctgtacccgcacccctgcccatgtgtactgtatgtgcccccaaatggatgagagatggaaatagaaagagggggcccgagcccagcccccagctcagcccgaagcacttaaccagtccccctgtgcctgccagaccccagtggggtccccggaggctttgagcagacaatcttgaaggaaggaaaagccagatttcggttttgttttttcttttctttttggggtgggggtaattactgtttcctgatttttttttttaagtttcttttggaattttgtttgttggcaaattctgtgtgatcttttttcataaaaaaaaaaaaaggaaagaaaaagagaaaagaaaaaatttaattggaaaaatactat

SEQ ID NO: 295 - protein, 2822 aa, Mus musculus
MDGRDFGPQRSVHGPPPPLLSGLAMDSHRVGAATAGRLPSSGLPGPPPPGKYMAQLHPHPGFSHLPSGPSYLHLNHLDPPSSGSPLLSQLGQPSIFDTQKDGFYLPAPGTLHAHTPSSRTPSGHSSGGPAKGSSREGTGKDRAGRGGDPPPLFGKKDPRAREEVSGPRGVVDLTQEARAEGRQDRGSSRLAERLSPFLAEVKAKGALQPSALSLCNGVVDAGLVAELGRGGAKEVARQEENARLLRRAEALLPAARPCGSPLPPPPPLPPKGPPAPPSSTPAGVYTVFREPGREHRVVAPTFVPSVEAFDERVGPIQIASQARDVRAREREPGRPGVLQGPPGSPRLERPEVLREKSSVIRSLKRPPPSDGPPAARSSRSSPDARAYLPPKELLKPEADPRPCERAPRGPSASAAQQAAKLFGLEPSRPPGPEHKWKPFELGNFATTQMAVLAAQHHHASRAEEEAAVATASKKAYLDPGGAMPRASATCGRPGADLHSAAHGPGEASAMQSLIKYSGSFAREAVAVRPGGCGKKSPFGGLGTMKPEPTPTSAGPPRAQARLTHPGVPTAGGGRQLKRDPERPESAKAFGREGSGAQGEAEVRHPPVGIAVAVARQKDSGSSSRLGPGLGDQERTLSLNNVKGHGRTDDECDRARHREDRLLGTRLDRDQEKLLRESKELADLARLHPTSCAPNQPNLMVTGGPTLAGSGRWSADPAAHLATNPWLPRSGSTSMWLAGHPYGLGPPSLHQGMAPAFPPGLGGSLPSAYQFVRDPQSGQLVVIPSDHLPHFAELMERAAVPPLWPALYPPGRSPLHHAQQLQLFSQQHFLRQQELLYLQQQAAQALELQRSAQLVQERLKAQEHRTEMEEKISKRSLETTGKAGLSAAGPGLLPRKSAGLANGPAGSHGKAVSPPPSPRDVTSLKAKVIQKVEDVSKPPAYTYPATPSSHPSSPPPDPPTPGLTRKEEAPENVVEKKDLELEKETPSPFQALFTDIPPRYPFQALPPHYGRPYPFLLQPAAASDADGLAPDVPLPADGPERLALSPEDKPICLSPSKIPEPPRDSPEEEQLADREVKAEVEDIEEGPTELPPLESPLALPVPETMVAVSPAGGCGGSPLEAQALSTAGPGCREPSEVSDFAQVAEPQIELPSKTEHRMTALELGTQLTPEPLVETKEEPVEVPLDVPMEEPTTEAGPEDSLPQPSLTEPQPSLELSDCDLPVPEGQCLNLEAQEAVPAPASTCYLEETHSESLLPGLDDPLAGMNAAAAELPQARPLPSLGPGVPAGEKLDTAPSLVLEHSFLQGITLLSEIAELELDRRGQEAADPEPNLVVRPSLESLLAASSHMLKEVLESPFSDPLKNLRLPRELNSNKKYSWMQKKEERMFAMKSSLEDMDALELDFRMRLAEVQRRYKEKQRELVKLQRRRDSGLSSKSLLTSDDYDLGAGIRKRHKGPEEEQEALMGMGKARSRNQSWDDHDSSSDFMSQLKIKKKKMASDQEQLASKLDRALSLTKQDKLKSPFKFSDGPGGKPKTGGGCGRFLTQYDSLLGKDRKAKGLGLSLKPSREGKHKRASKARKMEGGFQRQPKSVHSPFASEVSSQSYNTDSDEDEDFLKNEWSAQGPSSSKLTSSLLCGMVPKNSKPATGPKLTKRGLAGPRTLKPKVVTSRKQSFCLLLREAEARSSFSDSSEEDSFDQDDSSEEEEEELEEEEEDEEEEGIGSYRLGAGEQALSPSLEESGLGLLARFAASALPSPVVGPPLSVVQLEAEQKARKKEERQSLLGTEFEYTDSESEVKVPKQSAAGLLRTKKGVGEPGQSLAAPGPGSRASGPSSPDKAKLVSEKGRKARKIRGPKEPGFEAGPEASDDDLWTRRRSIFLHDASAAVQATSNTAPATKPSRCGRGGAPSPRKDTGRAKDRKDPRKKKRGKEAGSAATLPPPRVSTLPDSRAPHPGATAKRSKAKRKEAKKENRGKGGAVSKLMECMAAEEDFEANQDSSFSEDEHLPRGGATERPLTPAPRSCIIDKEELKDGLRVLIPLDDKLLYAGHVQTVHSPDIYRVVVEGERGNRPHIYCLEQLLQEAIIDVRPASTRFLPQGTRIAAYWSQQYRCLYPGTVVRGLLDLEDDGDLITVEFDDGDTGRIPLSHIRLLPPDYKIQSLLVPSAKRRSRKTSKDTGEVKEGAATGPQEATGGKRRGRKPSTKAKADRAVVLEEGAATNEVPSAPLALEPISTPNSKKSTPEPVDKRARAPKARSISAQPSPVPPTFSSCPAPEPFGELPTPATAPLVTMPVTMPAWKPKKARAAEGSGAKGPRRPGEDDELLVKLDHEGVMSPKSKKAKEALLLREDPGPGGWPESTGLLSLGSYSPAVGSSEPKATWPKGLDGDLTQEPGPGLPLEDPGNSKNPDKAQAEQDGAEESETTSSSSSSSSSSSSSSSSSSSSSSSSSGSETEGEEDAEKNREDGRGAGGRTCSAASSRASSPASSSSSSSSSSSSSSSSSSSSSSSSSSSSSSSSSSSSSSSSSSSSTTDEDSSCSSDEEAAPAPAAGPSTQPALPTKVSKPPSKARSSAHSPGKKAPTTTQPPPQPPPQPQQTLQPKTQAGAGAKSRPKKREGVHLPTTKELAKRQRLPSVENRPKIAAFLPARQLWKWFGKPTQRRGMKGKARKLFYKAIVRGKEMIRIGDCAVFLSAGRPNLPYIGRIQSMWESWGNNMVVRVKWFYHPEETSPGKQFHEGQHWDQKSGHSLPAALRASSQRKDFMERALYQSSHVDENDVQTVSHKCLVVGLEQYEQMLKTKKYQDSEGYLAGTYEPTTGMIFSTDGVPVLC

SEQ ID NO: 296 - DNA, 10715 bp, Mus musculus
tagatccagcgagaggaacttgaaaggggggttgtgtaatgtaccttttccaatcccgggctgtatatggagatttgggattctttaaaccggcgctacctggattttattaaaaagcggggagctcggcgggaggaaagctggcttttccgggggctgcgggagcggggccgcgggagggcggaggagttggcgcgccgcgcgcccggcccggggagcggttttctaccaaaaaaaggaaaggcgggcaaaaagtgtgaggcggctgcgggtggcggaggggagcggcggccgagggatggcgggcagtacgggcgcctagccgcgccaggaaccgcggcggttgccggagtcgccgtcggagcctggagcccggagccccgccgcgccagataccgtgtacgcctccttcctcatctccgctcagccgcccggaggggactcaccgcgggcggttcatgcgccccgggccgcgggcccgtggttgagcgcaagccccgctggccgccgccatgcacgccgcggagcgcccgccacccgaggacactaggactacatcgaggccgaacttttaagtcccactgaagcaggccggcgggccgggtggggaggctgatcgcggcactcccgcggaggatggatggccgagatttcgggccccagcggtccgtccacggccccccgccgccgctgctgtccggcttggccatggacagccaccgcgtgggcgcggccaccgccggacgcttgccctcctcgggcttgccaggtcccccgccgcccgggaaatacatggccggtctcaaccttcacccgcacccgggcttctcccacctgcccagtgggctatatccatcctacctccacctgaaccacctggacccccccagcagtgggagccccctcctcagccagctgggtcagcccagcatcttcgatacccagaaagatggcttctacctgcccgcaccggggaccctgcatgctcacacgccctcgtccagaactcccagtggccactcctcaggtggtccagccaaaggctcctcccgggaaggtacagggaaggatcgtgcaggccgtggtggagaccctcctccgttgtttggcaagaaagaccctcgggcacgtgaggaggtgtccgggccccgaggtgtggtggacttgacccaggaggcccgagcggagggccgccaggaccgaggatcctcacgcctggctgagcgcctgtctccctttctggcagaggtcaaagccaagggtgcactgcagccgtcggccctgagcctgtgcaatggtgtggtggacgcggggctggtggccgagttgggccgtggaggtgccaaggaggtagccaggcaggaggagaatgctcggctgctgaggcgggctgaggccctgctgcccgctgcaaggccctgtgggtccccactaccgccgccacctccactgccccccaagggtccccctgcacccccttcctctacaccagccggtgtgtacaccgtgttccgtgaaccaggccgtgagcaccgcgtggtggcacccacctttgtgccttctgtggaggcctttgatgagcgggtgggacccatccagatagcatcccaggctcgcgatgtccgggccagggagcgtgagccgggccgtcctggggtcctgcaaggtccacccggatctccacgcctggagcggccagaggttctgcgggagaaaagctcggtcatccgctccctcaagcgtccgcctccatccgatggacccccagcagcccgctcctcccgctcctccccggatgcgcgagcctacctgccccccaaggaactactcaagcccgaggctgatccgaggccttgcgagcgcgcaccccgaggcccgagcgcttctgctgcccagcaggctgctaagctctttggcctggaaccatcccgaccccccgggccggagcataagtggaaaccctttgaactgggcaacttcgccaccacgcagatggctgtcctggcagcccagcaccaccatgccagcagagccgaagaggaagcagctgtcgccacagcatccaaaaaggcctacctggaccccgggggcgcaatgccccgtgcctcggccacctgcggcaggccaggtgctgacctccactcggcagcccacggacccggagaggcctctgctatgcagagcctcatcaaatacagcggtagctttgctcgggaggcggtggcagtgcgccctggtggctgtgggaagaagagcccctttggaggcctgggcaccatgaaacctgaacctacgcccacgtcggcgggtccccctagagcccaggcccggctcacacaccccggggtccctacagccggagggggccggcagctgaaacgggacccagagagacctgagagcgccaaggcctttgggagagagggctctggtgcccagggggaagccgaagtaagacacccgcctgttggcattgctgtggctgtggcccggcagaaggacagtggaagcagtagccggctggggcctgggctgggagaccaggaacgcactttgtcactgaacaatgtcaaagggcatggccggactgatgatgagtgtgatcgagccaggcatcgggaggatcggctgctagggacacggctggaccgggaccaggagaagttgctccgagaaagtaaggagctggctgacctggcccgtctacaccccaccagctgcgctcccaatggcctgaaccccaaccttatggtgactggtggcccaacgctggcaggctcgggacgctggtctgctgatcctgctgctcatttggccacgaacccctggctgccacgctcgggtagtacatccatgtggcttgccggacacccttatggcctgggacccccctctttgcaccagggcatggcccctgcatttccacctggcttagggggctccttgccgtcagcttaccagttcgtcagggacccccagtctggccagctggtggttatccctagtgatcacctgcctcattttgccgagctgatggagcgcgcggcggtgccgcccctctggccggccctgtacccaccaggccgcagcccactgcaccacgctcagcagctgcagctcttctctcagcagcactttttgaggcagcaagaactgctctacctgcaacagcaggcggcccaggccctggagctgcagcggagcgcacagctggtggagcggttgaaagcacaagagcatcgaacggagatggaggagaagattagcaagaggagcctggagaccacgggcaaggccggcctgagtgccgcaggccctgggctcctgcctcgaaagtctgccggcctggccaacggcccggcaggcagccacggcaaggccgtgagcccacccccgtctccccgagcctcccccgtgacctctctgaaggccaaggtcatccagaaggtggaagatgtgtctaagcctccagcctatacctaccccgccacacctagctcgcaccccagcagcccaccacctgcctccccacctcctacccctgggctcacccgaaaggaagaggctcccgagaacgtggtggagaagaaagacctggagttggagaaggagacgcccagtccgttccaggccctgttcacagatattcctcccaggtatccattccaagccctgccgccgcactacgggcgaccctaccccttcctgctgcaacccgctgcggcctctgatgccgatggcctcgccccagatgtgccactcccagctgatgggcccgagcgcctggcactgtctcctgaagataagcccatctgcctgtcaccctccaagatcccagagccacctcgggacagcccagaggaggagcagctggctgaccgggaggtgaaggctgaagttgaggatatcgaagagggccccacagaactgcctccccttgagtcaccattggccctgcccgtcccagagaccatggtggccgtgagccccgcaggtggctgtggaggtagtcctctcgaggcccaggcgttgagcacagcaggtccgggctgccgggagccctctgaagtttcagactttgcacaggttgccgagccgcagatagaactaccgagtaagacagagcaccgcatgactgccctggagttggggacacagctgacacccgagccactggtagagactaaggaagagccggtggaggtgcccctggatgtgccgatggaggagcccaccacagaggcagggcctgaggacagtctgccccagccatctttgactgagcctcagcccagccttgagctctcagactgtgatttgcctgtcccagagggccagtgtctcaacctggaggcccaggaggctgtgcctgctcctgccagtacctgttatctggaagagacccactccgaatccctcctgcctggcctggatgacccactggccggcatgaatgcactggcagctgcagccgagctgccccaagccaggcctctgccctccttgggtcctggagtcccagccggggagaagctggatacagcccccagcctcgtcctggaacacagctttctgcagggcatcaccctcttgagtgagatagctgagctggagctggaccggaggggccaggaggctgcagatccagagccaaacctggtggtgcgaccctccctcgaaagcctgctggcagccagcagccacatgttgaaggaggtgctggagagccccttctcagacccgctcaagaacttgcggcttccgcgtgaactgaactccaataagaaatatagctggatgcagaagaaggaagagcggatgtttgctatgaaatcttccttggaggacatggatgcgctagagctggacttccggatgcggctggcagaggtccagcgaaggtacaaagagaaacagcgggagttggtcaagctccagagacgccgggactcgggggacaggcacgaggatgcccatagaagcctggcacgcagaggccctggcaggccgaggaaacggacccacaccctgagcgccctgtcgcccccctgcaagagagggaagagccacagcagtagcggaaagctgagcagcaagtccttgctgacatcagacgactatgatctgggagcggggataaggaagagacacaaggggcccgaggaggagcaagaggccctcatgggcatggggaaagcccgcagcaggaaccagagctgggacgatcacgactcctcatctgattttatgagtcagctaaagattaagaaaaaaaagatggcaagcgaccaggagcagttggcaagcaagctagacagagccctctccctcacaaaacaagacaagctgaagtcacccttcaagttttccgacggccccgggggaaaaccgaaaaccggtgggggctgtggcaggttcttgacacagtatgacagcctgctgggcaaggacaggaaagcactggccaaaggactcggcttgtctctgaaaccctccagagaaggtaaacacaaaagagcttccaaagccaggaagatggaggggggcttccaggccagaggccagcccaagtctgtccattctccatttgcctcggaagtcagcagtcagtcttacaatacggactctgacgaagacgaagacttcctgaagaatgagtggtctgcccagggcccctccagctccaaactgacctcgtccctcctgtgtggcatggtgcccaagaacagcaagccagccacaggccctaagctgaccaagaggggcctggcaggcccccggactttgaaacccaaggtggtcaccagcaggaagcagtccttctgtttgctgctccgagaggctgaggcccgctcctccttcagcgactcttccgaggaggactcctttgaccaagatgacagctcagaagaggaggaggaagagctagaggaagaggaggaagacgaggaagaggaaggcattggtagctataggctgggtgctggggaacaggccctgtcgccaagcctggaggagagtggactggggctgctggcccgctttgcggccagcgctctccccagccctgtcgtggggccgcccttgtctgtggtacagctggaagctgagcagaaggcccggaagaaggaagagcgacagagcttgctgggcacagagttcgagtacacagactcagagagtgaagtgaaggttcccaagcagtcagctgctgggctgctgcggaccaagaaaggggtgggggagcccggacagtctctggctgcacccggacctggcagccgggcctctggtccctccagcccagacaaggccaagctggtctcagagaagggacgcaaagcccggaagattcgaggccccaaggaacctggctttgaggcggggccagaggccagtgatgatgacctgtggacgcgacgcagaagcgagcgcatcttcttacacgatgcctccgctgcagtccaggcaaccagcaacacggcgccagcaaccaagcctagccgctgtggcaggggtggtgccccaagcccacggaaggacaccgggcgagccaaggacaggaaggaccccaggaagaagaagagagggaaggaggctgggtcagcagccacactgccaccaccccgtgtttctaccctgcctgactccagggcaccccacccaggggccctggcgactgccaaacgcagcaaggccaaggccagagggaaggaagcaaagaaggagaaccgaggaaaagggggtgccgtgagtaagctgatggagtgcatggctgcagaggaagacttcgaagccaaccaggactcaagcttctctgaggatgagcatctgccgcggggcggggccacagagagacctctgaccccagccccccgctcctgcatcattgacaaggaagagctgaaggatggcctgcgtgtgctcatccctctggatgacaagctgctgtatgccgggcacgtgcagaccgtgcattcacctgacatataccgtgtggtggttgaaggtgagcgtgggaaccgaccccacatctactgcctggagcagctactgcaggaggcgattatagatgtgaggccggcctctacacgcttcttgccccaggggaccaggatcgctgcctactggagccaacaataccgctgcctgtatccaggcactgtggtccgagggctgctggacctggaagacgacggagacctgatcaccgtggagtttgatgacggagatacaggcaggattcccctctcacacatccgcctcttgccacctgactataaaatccaatgtgctgagccctccccagcactcctagtgcccagcgcaaaacgccgtagcaggaagaccagtaaagacacgggggaagtcaaagaaggggctgccacagggcctcaggaggctacagggggcaaggctcgagggcgaggacggaaacctagcaccaaagccaaggctgacagagctgttgtcctggaggaaggggctgccaccaatgaggtccccagtgctcccttggctctggaacccatcagcactccaaattctaagaagagtaccccagaaccagtggacaagcgggcccgagcccccaaagcacgctcaatctctgcacagcccagccccgtaccacccaccttctctagctgcccagctcctgagccctttggggagcttccaacccccgctacagccccgctcgtcaccatgcctgtcaccatgcctgccactcgccctaaacccaagaaggctcgggccgctgaggggtccggtgccaaaggtccccggaggccaggggaagatgacgaactgcttgtcaaactggaccatgagggggtcatgtctcccaaaagcaagaaggccaaagaggccctcctcctgcgggaagatccagggccggggggttggccagagtccacagggctgctcagcctgggcagctactcaccagctgttggcagcagtgagcccaaggccacctggcccaagggtctggatggagacctcactcaggagcccgggccaggtcttcctttagaagatcctggcaactccaaaaacccagacaaggcccaggctgaacaagatggggcagaggagtcagagaccacttccagcagcagcagcagtagcagcagtagcagtagcagcagcagcagcagcagcagcagtagcagcagcagcagtggttcggagacagaaggcgaggaggatgctgagaagaacagggaggatggccggggtgcagggggccggacctgcagtgctgcgagctccagggcctcttctcctgcctcctcctcttcttcctcctcctcctcttcttcctcctcttcttcctcttcctcctcctcttcttcctcctcctcttcctcctcctcttcctcctcttcttcctcttcctcctcttcctcctcttcctcttctaccacagacgaggactcttcttgcagctcagatgaggaagcagcccctgcacccgccgctggtccctctacccagccagcgctccccacgaaggtatccaagccacctagcaaggcacgttcctcagcccactccccaggcaagaaggcacccaccaccacccagccaccgccccagcccccaccccagccccagcagactcttcagcccaagacccaggctggggctggggccaagagccgacccaagaagagagaaggcgtacacctgcctaccaccaaggagctggccaagcggcagcggctgccgtctgtggagaacaggcctaagatcgcggccttcttacctgcccggcagctttggaagtggtttggcaagcccacccagcggcgaggcatgaaaggcaaggctcgcaagctcttctacaaggccatcgtccgaggcaaggagatgatccgaatcggtgactgcgcagtcttcctgtcagccggccgccccaacctgccctatattggccggatccagagcatgtgggagtcctggggcaacaatatggtggttcgtgtcaagtggttctaccatccggaggagaccagcccgggcaagcagttccatgagggccagcactgggaccagaagtcagggcatagcctccctgcagccctgcgggcctccagccagaggaaggacttcatggagcgcgccctgtaccagtcctcccacgtggatgagaacgatgtgcagacagtgtcccacaagtgcctggtggtgggcctggagcagtacgaacagatgctgaagaccaagaaataccaggacagcgagggcctctactacctcgcgggcacctatgagcccaccacaggcatgatcttctccacggacggcgtgcctgtgctctgttgagcgccgcccacccagcggggcccacagagaccccccctccccaccactgccatggcgcgggaccacgtgtgttgtgtgcatgccagtgtgcttgtgggcgtgtgcatgtggccaggtggacgccccaggcaagtgtgagtgtgtacatgtgtgtgcccgtatgcatgcacgtgtgtgcacacatgtgcacacatttccagaccctttctggtcatcccctggtgccctcatgctgagattcccccccccccccacctcagctatcagggtccggctctgctgtcccctcagggtcacctcagcgaggaggacttccctccggcactttgtctgcgctcaatgaggctgccctctgtgctctgggcctgtgtagactctttgattctgtggatggggtaagggagagttccaaggacccaaactggtgtttggtgtagagttcagccacacccagcacggagcccatccaagacctcctaccatggggcgggggggggtggggggggggtgcccaacgccagccagcttcaccaatcacccggggcatccgggtgtccgtatgcccggcctccaccctctcaggacagcctggaattggggaacagggagggcagcccaggagcgtcaccataccccgtgggcccccccagcccagacccttacactacagaaatccccaatggtgctgaaatccgcgcccacgcccggcacggcccgcccggcacggcccgcccggcacggcccgcccggcccctccaccaggaggatccgaaaggttacctgtacagtttcctgtagcctgcccctgtatcatacacctttaaatggagtcaactttttaattatatatataaagataaatatatataaatatatatataaactttttaaaactgtgaaaaatagctatgaaattataaaaaaaaacacattctgacgtgcagaatattattttttatttcctgttagatcgtgaatgtctagcaccggctttatgcctctcccccactcccctgtacccgcacccctgcccatgtgtactgtatgtgcccccaaatggatgagagatggaaatagaaagagggggcccgagcccagcccccagctcagcccgaagcacttaaccagtccccctgtgcctgccagaccccagtggggtccccggaggctttgagcagacaatcttgaaggaaggaaaagccagatttcggttttgttttttcttttctttttggggtgggggtaattactgtttcctgatttttttttttaagtttcttttggaattttgtttgttggcaaattctgtgtgatcttttttcataaaaaaaaaaaaaggaaagaaaaagagaaaagaaaaaatttaattggaaaaatactat

SEQ ID NO: 297 - protein, 2870 aa, Mus musculus
MDGRDFGPQRSVHGPPPPLLSGLAMDSHRVGAATAGRLPSSGLPGPPPPGKYMAQLHPHPGFSHLPSGPSYLHLNHLDPPSSGSPLLSQLGQPSIFDTQKDGFYLPAPGTLHAHTPSSRTPSGHSSGGPAKGSSREGTGKDRAGRGGDPPPLFGKKDPRAREEVSGPRGVVDLTQEARAEGRQDRGSSRLAERLSPFLAEVKAKGALQPSALSLCNGVVDAGLVAELGRGGAKEVARQEENARLLRRAEALLPAARPCGSPLPPPPPLPPKGPPAPPSSTPAGVYTVFREPGREHRVVAPTFVPSVEAFDERVGPIQIASQARDVRAREREPGRPGVLQGPPGSPRLERPEVLREKSSVIRSLKRPPPSDGPPAARSSRSSPDARAYLPPKELLKPEADPRPCERAPRGPSASAAQQAAKLFGLEPSRPPGPEHKWKPFELGNFATTQMAVLAAQHHHASRAEEEAAVATASKKAYLDPGGAMPRASATCGRPGADLHSAAHGPGEASAMQSLIKYSGSFAREAVAVRPGGCGKKSPFGGLGTMKPEPTPTSAGPPRAQARLTHPGVPTAGGGRQLKRDPERPESAKAFGREGSGAQGEAEVRHPPVGIAVAVARQKDSGSSSRLGPGLGDQERTLSLNNVKGHGRTDDECDRARHREDRLLGTRLDRDQEKLLRESKELADLARLHPTSCAPNQPNLMVTGGPTLAGSGRWSADPAAHLATNPWLPRSGSTSMWLAGHPYGLGPPSLHQGMAPAFPPGLGGSLPSAYQFVRDPQSGQLVVIPSDHLPHFAELMERAAVPPLWPALYPPGRSPLHHAQQLQLFSQQHFLRQQELLYLQQQAAQALELQRSAQLVERLKAQEHRTEMEEKISKRSLETTGKAGLSAAGPGLLPRKSAGLANGPAGSHGKAVSPPPSPRDVTSLKAKVIQKVEDVSKPPAYTYPATPSSHPSSPPPDPPTPGLTRKEEAPENVVEKKDLELEKETPSPFQALFTDIPPRYPFQALPPHYGRPYPFLLQPAAASDADGLAPDVPLPADGPERLALSPEDKPICLSPSKIPEPPRDSPEEEQLADREVKAEVEDIEEGPTELPPLESPLALPVPETMVAVSPAGGCGGSPLEAQALSTAGPGCREPSEVSDFAQVAEPQIELPSKTEHRMTALELGTQLTPEPLVETKEEPVEVPLDVPMEEPTTEAGPEDSLPQPSLTEPQPSLELSDCDLPVPEGQCLNLEAQEAVPAPASTCYLEETHSESLLPGLDDPLAGMNAAAAELPQARPLPSLGPGVPAGEKLDTAPSLVLEHSFLQGITLLSEIAELELDRRGQEAADPEPNLVVRPSLESLLAASSHMLKEVLESPFSDPLKNLRLPRELNSNKKYSWMQKKEERMFAMKSSLEDMDALELDFRMRLAEVQRRYKEKQRELVKLQRRRDSGDRHEDAHRSLARRGPGRPRKRTHTLSALSPPCKRGKSHSSSGKLSSKSLLTSDDYDLGAGIRKRHKGPEEEQEALMGMGKARSRNQSWDDHDSSSDFMSQLKIKKKKMASDQEQLASKLDRALSLTKQDKLKSPFKFSDGPGGKPKTGGGCGRFLTQYDSLLGKDRKAKGLGLSLKPSREGKHKRASKARKMEGGFQRQPKSVHSPFASEVSSQSYNTDSDEDEDFLKNEWSAQGPSSSKLTSSLLCGMVPKNSKPATGPKLTKRGLAGPRTLKPKVVTSRKQSFCLLLREAEARSSFSDSSEEDSFDQDDSSEEEEEELEEEEEDEEEEGIGSYRLGAGEQALSPSLEESGLGLLARFAASALPSPVVGPPLSVVQLEAEQKARKKEERQSLLGTEFEYTDSESEVKVPKQSAAGLLRTKKGVGEPGQSLAAPGPGSRASGPSSPDKAKLVSEKGRKARKIRGPKEPGFEAGPEASDDDLWTRRRSIFLHDASAAVQATSNTAPATKPSRCGRGGAPSPRKDTGRAKDRKDPRKKKRGKEAGSAATLPPPRVSTLPDSRAPHPGATAKRSKAKRKEAKKENRGKGGAVSKLMECMAAEEDFEANQDSSFSEDEHLPRGGATERPLTPAPRSCIIDKEELKDGLRVLIPLDDKLLYAGHVQTVHSPDIYRVVVEGERGNRPHIYCLEQLLQEAIIDVRPASTRFLPQGTRIAAYWSQQYRCLYPGTVVRGLLDLEDDGDLITVEFDDGDTGRIPLSHIRLLPPDYKIQCAEPSPALLVPSAKRRSRKTSKDTGEVKEGAATGPQEATGGKRRGRKPSTKAKADRAVVLEEGAATNEVPSAPLALEPISTPNSKKSTPEPVDKRARAPKARSISAQPSPVPPTFSSCPAPEPFGELPTPATAPLVTMPVTMPAWKPKKARAAEGSGAKGPRRPGEDDELLVKLDHEGVMSPKSKKAKEALLLREDPGPGGWPESTGLLSLGSYSPAVGSSEPKATWPKGLDGDLTQEPGPGLPLEDPGNSKNPDKAQAEQDGAEESETTSSSSSSSSSSSSSSSSSSSSSSSSSGSETEGEEDAEKNREDGRGAGGRTCSAASSRASSPASSSSSSSSSSSSSSSSSSSSSSSSSSSSSSSSSSSSSSSSSSSSTTDEDSSCSSDEEAAPAPAAGPSTQPALPTKVSKPPSKARSSAHSPGKKAPTTTQPPPQPPPQPQQTLQPKTQAGAGAKSRPKKREGVHLPTTKELAKRQRLPSVENRPKIAAFLPARQLWKWFGKPTQRRGMKGKARKLFYKAIVRGKEMIRIGDCAVFLSAGRPNLPYIGRIQSMWESWGNNMVVRVKWFYHPEETSPGKQFHEGQHWDQKSGHSLPAALRASSQRKDFMERALYQSSHVDENDVQTVSHKCLVVGLEQYEQMLKTKKYQDSEGYLAGTYEPTTGMIFSTDGVPVLC

SEQ ID NO: 298 - DNA, 10550 bp, Mus musculus
tagatccagcgagaggaacttgaaaggggggttgtgtaatgtaccttttccaatcccgggctgtatatggagatttgggattctttaaaccggcgctacctggattttattaaaaagcggggagctcggcgggaggaaagctggcttttccgggggctgcgggagcggggccgcgggagggcggaggagttggcgcgccgcgcgcccggcccggggagcggttttctaccaaaaaaaggaaaggcgggcaaaaagtgtgaggcggctgcgggtggcggaggggagcggcggccgagggatggcgggcagtacgggcgcctagccgcgccaggaaccgcggcggttgccggagtcgccgtcggagcctggagcccggagccccgccgcgccagataccgtgtacgcctccttcctcatctccgctcagccgcccggaggggactcaccgcgggcggttcatgcgccccgggccgcgggcccgtggttgagcgcaagccccgctggccgccgccatgcacgccgcggagcgcccgccacccgaggacactaggactacatcgaggccgaacttttaagtcccactgaagcaggccggcgggccgggtggggaggctgatcgcggcactcccgcggaggatggatggccgagatttcgggccccagcggtccgtccacggccccccgccgccgctgctgtccggcttggccatggacagccaccgcgtgggcgcggccaccgccggacgcttgccctcctcgggcttgccaggtcccccgccgcccgggaaatacatggccggtctcaaccttcacccgcacccgggcttctcccacctgcccagtgggctatatccatcctacctccacctgaaccacctggacccccccagcagtgggagccccctcctcagccagctgggtcagcccagcatcttcgatacccagaaagatggcttctacctgcccgcaccggggaccctgcatgctcacacgccctcgtccagaactcccagtggccactcctcaggtggtccagccaaaggctcctcccgggaaggtacagggaaggatcgtgcaggccgtggtggagaccctcctccgttgtttggcaagaaagaccctcgggcacgtgaggaggtgtccgggccccgaggtgtggtggacttgacccaggaggcccgagcggagggccgccaggaccgaggatcctcacgcctggctgagcgcctgtctccctttctggcagaggtcaaagccaagggtgcactgcagccgtcggccctgagcctgtgcaatggtgtggtggacgcggggctggtggccgagttgggccgtggaggtgccaaggaggtagccaggcaggaggagaatgctcggctgctgaggcgggctgaggccctgctgcccgctgcaaggccctgtgggtccccactaccgccgccacctccactgccccccaagggtccccctgcacccccttcctctacaccagccggtgtgtacaccgtgttccgtgaaccaggccgtgagcaccgcgtggtggcacccacctttgtgccttctgtggaggcctttgatgagcgggtgggacccatccagatagcatcccaggctcgcgatgtccgggccagggagcgtgagccgggccgtcctggggtcctgcaaggtccacccggatctccacgcctggagcggccagaggttctgcgggagaaaagctcggtcatccgctccctcaagcgtccgcctccatccgatggacccccagcagcccgctcctcccgctcctccccggatgcgcgagcctacctgccccccaaggaactactcaagcccgaggctgatccgaggccttgcgagcgcgcaccccgaggcccgagcgcttctgctgcccagcaggctgctaagctctttggcctggaaccatcccgaccccccgggccggagcataagtggaaaccctttgaactgggcaacttcgccaccacgcagatggctgtcctggcagcccagcaccaccatgccagcagagccgaagaggaagcagctgtcgccacagcatccaaaaaggcctacctggaccccgggggcgcaatgccccgtgcctcggccacctgcggcaggccaggtgctgacctccactcggcagcccacggacccggagaggcctctgctatgcagagcctcatcaaatacagcggtagctttgctcgggaggcggtggcagtgcgccctggtggctgtgggaagaagagcccctttggaggcctgggcaccatgaaacctgaacctacgcccacgtcggcgggtccccctagagcccaggcccggctcacacaccccggggtccctacagccggagggggccggcagctgaaacgggacccagagagacctgagagcgccaaggcctttgggagagagggctctggtgcccagggggaagccgaagtaagacacccgcctgttggcattgctgtggctgtggcccggcagaaggacagtggaagcagtagccggctggggcctgggctgggagaccaggaacgcactttgtcactgaacaatgtcaaagggcatggccggactgatgatgagtgtgatcgagccaggcatcgggaggatcggctgctagggacacggctggaccgggaccaggagaagttgctccgagaaagtaaggagctggctgacctggcccgtctacaccccaccagctgcgctcccaatggcctgaaccccaaccttatggtgactggtggcccaacgctggcaggctcgggacgctggtctgctgatcctgctgctcatttggccacgaacccctggctgccacgctcgggtagtacatccatgtggcttgccggacacccttatggcctgggacccccctctttgcaccagggcatggcccctgcatttccacctggcttagggggctccttgccgtcagcttaccagttcgtcagggacccccagtctggccagctggtggttatccctagtgatcacctgcctcattttgccgagctgatggagcgcgcggcggtgccgcccctctggccggccctgtacccaccaggccgcagcccactgcaccacgctcagcagctgcagctcttctctcagcagcactttttgaggcagcaagaactgctctacctgcaacagcaggcggcccaggccctggagctgcagcggagcgcacagctggtgcaggagcggttgaaagcacaagagcatcgaacggagatggaggagaagattagcaagaggagcctggagaccacgggcaaggccggcctgagtgccgcaggccctgggctcctgcctcgaaagtctgccggcctggccaacggcccggcaggcagccacggcaaggccgtgagcccacccccgtctccccgagcctcccccgtgacctctctgaaggccaaggtcatccagaaggtggaagatgtgtctaagcctccagcctatacctaccccgccacacctagctcgcaccccagcagcccaccacctgcctccccacctcctacccctgggctcacccgaaaggaagaggctcccgagaacgtggtggagaagaaagacctggagttggagaaggagacgcccagtccgttccaggccctgttcacagatattcctcccaggtatccattccaagccctgccgccgcactacgggcgaccctaccccttcctgctgcaacccgctgcggcctctgatgccgatggcctcgccccagatgtgccactcccagctgatgggcccgagcgcctggcactgtctcctgaagataagcccatctgcctgtcaccctccaagatcccagagccacctcgggacagcccagaggaggagcagctggctgaccgggaggtgaaggctgaagttgaggatatcgaagagggccccacagaactgcctccccttgagtcaccattggccctgcccgtcccagagaccatggtggccgtgagccccgcaggtggctgtggaggtagtcctctcgaggcccaggcgttgagcacagcaggtccgggctgccgggagccctctgaagtttcagactttgcacaggttgccgagccgcagatagaactaccgagtaagacagagcaccgcatgactgccctggagttggggacacagctgacacccgagccactggtagagactaaggaagagccggtggaggtgcccctggatgtgccgatggaggagcccaccacagaggcagggcctgaggacagtctgccccagccatctttgactgagcctcagcccagccttgagctctcagactgtgatttgcctgtcccagagggccagtgtctcaacctggaggcccaggaggctgtgcctgctcctgccagtacctgttatctggaagagacccactccgaatccctcctgcctggcctggatgacccactggccggcatgaatgcactggcagctgcagccgagctgccccaagccaggcctctgccctccttgggtcctggagtcccagccggggagaagctggatacagcccccagcctcgtcctggaacacagctttctgcagggcatcaccctcttgagtgagatagctgagctggagctggaccggaggggccaggaggctgcagatccagagccaaacctggtggtgcgaccctccctcgaaagcctgctggcagccagcagccacatgttgaaggaggtgctggagagccccttctcagacccgctcaagaacttgcggcttccgcgtgaactgaactccaataagaaatatagctggatgcagaagaaggaagagcggatgtttgctatgaaatcttccttggaggacatggatgcgctagagctggacttccggatgcggctggcagaggtccagcgaaggtacaaagagaaacagcgggagttggtcaagctccagagacgccgggactcgggggacaggcacgaggatgcccatagaagcctggcacgcagaggccctggcaggccgaggaaacggacccacaccctgagcgccctgtcgcccccctgcaagagagggaagagccacagcagtagcggaaagctgagcagcaagtccttgctgacatcagacgactatgatctgggagcggggataaggaagagacacaaggggcccgaggaggagcaagaggccctcatgggcatggggaaagcccgcagcaggaaccagagctgggacgatcacgactcctcatctgattttatgagtcagctaaagattaagaaaaaaaagatggcaagcgaccaggagcagttggcaagcaagctagacagagccctctccctcacaaaacaagacaagctgaagtcacccttcaagttttccgacggccccgggggaaaaccgaaaaccggtgggggctgtggcaggttcttgacacagtatgacagcctgctgggcaaggacaggaaagcactggccaaaggactcggcttgtctctgaaaccctccagagaaggtaaacacaaaagagcttccaaagccaggaagatggaggggggcttccaggccagaggccagcccaagtctgtccattctccatttgcctcggaagtcagcagtcagtcttacaatacggactctgacgaagacgaagacttcctgaagaatgagtggtctgcccagggcccctccagctccaaactgacctcgtccctcctgtgtggcatggtgcccaagaacagcaagccagccacaggccctaagctgaccaagaggggcctggcaggcccccggactttgaaacccaaggtggtcaccagcaggaagcagtccttctgtttgctgctccgagaggctgaggcccgctcctccttcagcgactcttccgaggaggactcctttgaccaagatgacagctcagaagaggaggaggaagagctagaggaagaggaggaagacgaggaagaggaaggcattggtagctataggctgggtgctggggaacaggccctgtcgccaagcctggaggagagtggactggggctgctggcccgctttgcggccagcgctctccccagccctgtcgtggggccgcccttgtctgtggtacagctggaagctgagcagaaggcccggaagaaggaagagcgacagagcttgctgggcacagagttcgagtacacagactcagagagtgaagtgaaggttcccaagcagtcagctgctgggctgctgcggaccaagaaaggggtgggggagcccggacagtctctggctgcacccggacctggcagccgggcctctggtccctccagcccagacaaggccaagctggtctcagagaagggacgcaaagcccggaagattcgaggccccaaggaacctggctttgaggcggggccagaggccagtgatgatgacctgtggacgcgacgcagaagcgagcgcatcttcttacacgatgcctccgctgcagtccaggcaaccagcaacacggcgccagcaaccaagcctagccgctgtggcaggggtggtgccccaagcccacggaaggacaccgggcgagccaaggacaggaaggaccccaggaagaagaagagagggaaggaggctgggtcagcagccacactgccaccaccccgtgtttctaccctgcctgactccagggcaccccacccaggggccctggcgactgccaaacgcagcaaggccaaggccagagggaaggaagcaaagaaggagaaccgaggaaaagggggtgccgtgagtaagctgatggagtgcatggctgcagaggaagacttcgaagccaaccaggactcaagcttctctgaggatgagcatctgccgcggggcggggccacagagagacctctgaccccagccccccgctcctgcatcattgacaaggaagagctgaaggatggcctgcgtgtgctcatccctctggatgacaagctgctgtatgccgggcacgtgcagaccgtgcattcacctgacatataccgtgtggtggttgaaggtgagcgtgggaaccgaccccacatctactgcctggagcagctactgcaggaggcgattatagatgtgaggccggcctctacacgcttcttgccccaggggaccaggatcgctgcctactggagccaacaataccgctgcctgtatccaggcactgtggtccgagggctgctggacctggaagacgacggagacctgatcaccgtggagtttgatgacggagatacaggcaggattcccctctcacacatccgcctcttgccacctgactataaaatccaatacagagctgttgtcctggaggaaggggctgccaccaatgaggtccccagtgctcccttggctctggaacccatcagcactccaaattctaagaagagtaccccagaaccagtggacaagcgggcccgagcccccaaagcacgctcaatctctgcacagcccagccccgtaccacccaccttctctagctgcccagctcctgagccctttggggagcttccaacccccgctacagccccgctcgtcaccatgcctgtcaccatgcctgccactcgccctaaacccaagaaggctcgggccgctgaggggtccggtgccaaaggtccccggaggccaggggaagatgacgaactgcttgtcaaactggaccatgagggggtcatgtctcccaaaagcaagaaggccaaagaggccctcctcctgcgggaagatccagggccggggggttggccagagtccacagggctgctcagcctgggcagctactcaccagctgttggcagcagtgagcccaaggccacctggcccaagggtctggatggagacctcactcaggagcccgggccaggtcttcctttagaagatcctggcaactccaaaaacccagacaaggcccaggctgaacaagatggggcagaggagtcagagaccacttccagcagcagcagcagtagcagcagtagcagtagcagcagcagcagcagcagcagcagtagcagcagcagcagtggttcggagacagaaggcgaggaggatgctgagaagaacagggaggatggccggggtgcagggggccggacctgcagtgctgcgagctccagggcctcttctcctgcctcctcctcttcttcctcctcctcctcttcttcctcctcttcttcctcttcctcctcctcttcttcctcctcctcttcctcctcctcttcctcctcttcttcctcttcctcctcttcctcctcttcctcttctaccacagacgaggactcttcttgcagctcagatgaggaagcagcccctgcacccgccgctggtccctctacccagccagcgctccccacgaaggtatccaagccacctagcaaggcacgttcctcagcccactccccaggcaagaaggcacccaccaccacccagccaccgccccagcccccaccccagccccagcagactcttcagcccaagacccaggctggggctggggccaagagccgacccaagaagagagaaggcgtacacctgcctaccaccaaggagctggccaagcggcagcggctgccgtctgtggagaacaggcctaagatcgcggccttcttacctgcccggcagctttggaagtggtttggcaagcccacccagcggcgaggcatgaaaggcaaggctcgcaagctcttctacaaggccatcgtccgaggcaaggagatgatccgaatcggtgactgcgcagtcttcctgtcagccggccgccccaacctgccctatattggccggatccagagcatgtgggagtcctggggcaacaatatggtggttcgtgtcaagtggttctaccatccggaggagaccagcccgggcaagcagttccatgagggccagcactgggaccagaagtcagggcatagcctccctgcagccctgcgggcctccagccagaggaaggacttcatggagcgcgccctgtaccagtcctcccacgtggatgagaacgatgtgcagacagtgtcccacaagtgcctggtggtgggcctggagcagtacgaacagatgctgaagaccaagaaataccaggacagcgagggcctctactacctcgcgggcacctatgagcccaccacaggcatgatcttctccacggacggcgtgcctgtgctctgttgagcgccgcccacccagcggggcccacagagaccccccctccccaccactgccatggcgcgggaccacgtgtgttgtgtgcatgccagtgtgcttgtgggcgtgtgcatgtggccaggtggacgccccaggcaagtgtgagtgtgtacatgtgtgtgcccgtatgcatgcacgtgtgtgcacacatgtgcacacatttccagaccctttctggtcatcccctggtgccctcatgctgagattcccccccccccccacctcagctatcagggtccggctctgctgtcccctcagggtcacctcagcgaggaggacttccctccggcactttgtctgcgctcaatgaggctgccctctgtgctctgggcctgtgtagactctttgattctgtggatggggtaagggagagttccaaggacccaaactggtgtttggtgtagagttcagccacacccagcacggagcccatccaagacctcctaccatggggcgggggggggtggggggggggtgcccaacgccagccagcttcaccaatcacccggggcatccgggtgtccgtatgcccggcctccaccctctcaggacagcctggaattggggaacagggagggcagcccaggagcgtcaccataccccgtgggcccccccagcccagacccttacactacagaaatccccaatggtgctgaaatccgcgcccacgcccggcacggcccgcccggcacggcccgcccggcacggcccgcccggcccctccaccaggaggatccgaaaggttacctgtacagtttcctgtagcctgcccctgtatcatacacctttaaatggagtcaactttttaattatatatataaagataaatatatataaatatatatataaactttttaaaactgtgaaaaatagctatgaaattataaaaaaaaacacattctgacgtgcagaatattattttttatttcctgttagatcgtgaatgtctagcaccggctttatgcctctcccccactcccctgtacccgcacccctgcccatgtgtactgtatgtgcccccaaatggatgagagatggaaatagaaagagggggcccgagcccagcccccagctcagcccgaagcacttaaccagtccccctgtgcctgccagaccccagtggggtccccggaggctttgagcagacaatcttgaaggaaggaaaagccagatttcggttttgttttttcttttctttttggggtgggggtaattactgtttcctgatttttttttttaagtttcttttggaattttgtttgttggcaaattctgtgtgatcttttttcataaaaaaaaaaaaaggaaagaaaaagagaaaagaaaaaatttaattggaaaaatactat

SEQ ID NO: 299 - protein, 2817 aa, Mus musculus
MDGRDFGPQRSVHGPPPPLLSGLAMDSHRVGAATAGRLPSSGLPGPPPPGKYMAQLHPHPGFSHLPSGPSYLHLNHLDPPSSGSPLLSQLGQPSIFDTQKDGFYLPAPGTLHAHTPSSRTPSGHSSGGPAKGSSREGTGKDRAGRGGDPPPLFGKKDPRAREEVSGPRGVVDLTQEARAEGRQDRGSSRLAERLSPFLAEVKAKGALQPSALSLCNGVVDAGLVAELGRGGAKEVARQEENARLLRRAEALLPAARPCGSPLPPPPPLPPKGPPAPPSSTPAGVYTVFREPGREHRVVAPTFVPSVEAFDERVGPIQIASQARDVRAREREPGRPGVLQGPPGSPRLERPEVLREKSSVIRSLKRPPPSDGPPAARSSRSSPDARAYLPPKELLKPEADPRPCERAPRGPSASAAQQAAKLFGLEPSRPPGPEHKWKPFELGNFATTQMAVLAAQHHHASRAEEEAAVATASKKAYLDPGGAMPRASATCGRPGADLHSAAHGPGEASAMQSLIKYSGSFAREAVAVRPGGCGKKSPFGGLGTMKPEPTPTSAGPPRAQARLTHPGVPTAGGGRQLKRDPERPESAKAFGREGSGAQGEAEVRHPPVGIAVAVARQKDSGSSSRLGPGLGDQERTLSLNNVKGHGRTDDECDRARHREDRLLGTRLDRDQEKLLRESKELADLARLHPTSCAPNQPNLMVTGGPTLAGSGRWSADPAAHLATNPWLPRSGSTSMWLAGHPYGLGPPSLHQGMAPAFPPGLGGSLPSAYQFVRDPQSGQLVVIPSDHLPHFAELMERAAVPPLWPALYPPGRSPLHHAQQLQLFSQQHFLRQQELLYLQQQAAQALELQRSAQLVQERLKAQEHRTEMEEKISKRSLETTGKAGLSAAGPGLLPRKSAGLANGPAGSHGKAVSPPPSPRDVTSLKAKVIQKVEDVSKPPAYTYPATPSSHPSSPPPDPPTPGLTRKEEAPENVVEKKDLELEKETPSPFQALFTDIPPRYPFQALPPHYGRPYPFLLQPAAASDADGLAPDVPLPADGPERLALSPEDKPICLSPSKIPEPPRDSPEEEQLADREVKAEVEDIEEGPTELPPLESPLALPVPETMVAVSPAGGCGGSPLEAQALSTAGPGCREPSEVSDFAQVAEPQIELPSKTEHRMTALELGTQLTPEPLVETKEEPVEVPLDVPMEEPTTEAGPEDSLPQPSLTEPQPSLELSDCDLPVPEGQCLNLEAQEAVPAPASTCYLEETHSESLLPGLDDPLAGMNAAAAELPQARPLPSLGPGVPAGEKLDTAPSLVLEHSFLQGITLLSEIAELELDRRGQEAADPEPNLVVRPSLESLLAASSHMLKEVLESPFSDPLKNLRLPRELNSNKKYSWMQKKEERMFAMKSSLEDMDALELDFRMRLAEVQRRYKEKQRELVKLQRRRDSGDRHEDAHRSLARRGPGRPRKRTHTLSALSPPCKRGKSHSSSGKLSSKSLLTSDDYDLGAGIRKRHKGPEEEQEALMGMGKARSRNQSWDDHDSSSDFMSQLKIKKKKMASDQEQLASKLDRALSLTKQDKLKSPFKFSDGPGGKPKTGGGCGRFLTQYDSLLGKDRKAKGLGLSLKPSREGKHKRASKARKMEGGFQRQPKSVHSPFASEVSSQSYNTDSDEDEDFLKNEWSAQGPSSSKLTSSLLCGMVPKNSKPATGPKLTKRGLAGPRTLKPKVVTSRKQSFCLLLREAEARSSFSDSSEEDSFDQDDSSEEEEEELEEEEEDEEEEGIGSYRLGAGEQALSPSLEESGLGLLARFAASALPSPVVGPPLSVVQLEAEQKARKKEERQSLLGTEFEYTDSESEVKVPKQSAAGLLRTKKGVGEPGQSLAAPGPGSRASGPSSPDKAKLVSEKGRKARKIRGPKEPGFEAGPEASDDDLWTRRRSIFLHDASAAVQATSNTAPATKPSRCGRGGAPSPRKDTGRAKDRKDPRKKKRGKEAGSAATLPPPRVSTLPDSRAPHPGATAKRSKAKRKEAKKENRGKGGAVSKLMECMAAEEDFEANQDSSFSEDEHLPRGGATERPLTPAPRSCIIDKEELKDGLRVLIPLDDKLLYAGHVQTVHSPDIYRVVVEGERGNRPHIYCLEQLLQEAIIDVRPASTRFLPQGTRIAAYWSQQYRCLYPGTVVRGLLDLEDDGDLITVEFDDGDTGRIPLSHIRLLPPDYKIQYRAVVLEEGAATNEVPSAPLALEPISTPNSKKSTPEPVDKRARAPKARSISAQPSPVPPTFSSCPAPEPFGELPTPATAPLVTMPVTMPAWKPKKARAAEGSGAKGPRRPGEDDELLVKLDHEGVMSPKSKKAKEALLLREDPGPGGWPESTGLLSLGSYSPAVGSSEPKATWPKGLDGDLTQEPGPGLPLEDPGNSKNPDKAQAEQDGAEESETTSSSSSSSSSSSSSSSSSSSSSSSSSGSETEGEEDAEKNREDGRGAGGRTCSAASSRASSPASSSSSSSSSSSSSSSSSSSSSSSSSSSSSSSSSSSSSSSSSSSSTTDEDSSCSSDEEAAPAPAAGPSTQPALPTKVSKPPSKARSSAHSPGKKAPTTTQPPPQPPPQPQQTLQPKTQAGAGAKSRPKKREGVHLPTTKELAKRQRLPSVENRPKIAAFLPARQLWKWFGKPTQRRGMKGKARKLFYKAIVRGKEMIRIGDCAVFLSAGRPNLPYIGRIQSMWESWGNNMVVRVKWFYHPEETSPGKQFHEGQHWDQKSGHSLPAALRASSQRKDFMERALYQSSHVDENDVQTVSHKCLVVGLEQYEQMLKTKKYQDSEGYLAGTYEPTTGMIFSTDGVPVLC

SEQ ID NO: 300 - DNA, 42947 bp, Homo sapiens
tgctcttctctgttggtgctgatgtttgaaaagtaggtgactggttgggggctgggtatggtggctcaggcctgtaatcccagcacttcggaaggccaacgtaggaggatcacttgagcttaggaggttgaggccagcctgggcgacctagcaagaccttgtctctacaaaaaataaaaataggttgggcgtggtggctcacgcctgtaatcccagcactttgggagaccgaggcgggtggatcacccgaggtcaggagtttgagatcagactggttaatgtggtaaaaccccgtctctactaactaaaaatacaatattagccaagtgtggtggcacatacctgtaatcccagctacttgagaggctgaggcaggagaatggcttgaacctaggaggaggaggttgcagtgagctgagatcgtgccattgcactccagcctgggcaacagagcgaaactctatctcaaaaaaaaaaaaaaaaaaaaaaaaatcacccgggtatgctggtgtgcctgtagtcccagctacttaggaggctaaagtgggaggatagtttgagcccaggaggtcaaggctgcattgaactatgattgcaccactgcgctccagtctgggcaacagagtgagacccggtctctaaaagaacaaaaaagtagggggctggattctttctctccttaaaaaaaaaaatcccataagaagtggtcatttctctctgggcagtccagcctgagtgctgagccactttgaaaggagggaggagagagacgccctgggacgcctgtgtctgggcagttcccccagctgaggacagtcgggttgtcacactggtctcctgggttctcgccccagtctcttgctttttggagcgagccctctgcctttgtcaatgggtttaagtccaagctctgccctttgtagctacgtaaccttgaacaagagcctcgagccctctggcctctgggggcggctcatctgcttgatgctgggtgggctgacgggcacatagtgggtgcgttataaacgcctctctctcatctgctcatattcaggcattagggtcttagaatgcacctgcctgtgcaggggagccctgggtcttcctgttctcacataggatctaggtctggcctcagggggccttggaccttgagatggatgaaggacaggcattacctacatttgtgagccccacgcagtcagagcccccatgcccaagaagctaagaacgataaggggcatccttgccagatgcggcggctcatgcctgtaatcccagctctttgggaggccaaggtgggcagatcgcttgagctcaggagttgggagactagcctaggcaacatagtgaaaccccgactctacaaaaataaaaataaaaataaatcatccgagcatagtggtgtggcatctatagtcccagctactgggaggctgaagcagggaaggatcacctgaccccagcaggtcgaggctgcagtgagatcgcaccactgagccccaacctgggtggcagagtaagatcctgcccccaccccaaaaatagaaagcaatcgttgccgttgagccagcagcccgtatgaacagacagctccatgaggtctcctgtgagggcgtggacctgtgcagaggaggggctgttactctccccattcagatggggagacaggcctgcagggatgaggcaaggctgagcggggagccctgagctgagttttgtctttcctacctcttcactggcccatcacctctagggtggggccaggtctgggagggaggggctgtggggatgtccccacctccagcttcacagggggcggctgggggtgcagagccgggtgtacgccatggtgttggtgacaagcctgctggggcctctatccagtcactcccccccgatccgcttccccggacccctggagagcaaccctatctggaactgctcagagagaggccaggaaggggttgccatgggaacggggcctctgcgtgagccttgggttcctaatggctgcgatgtggggcgtgtgacctgtgagtggagtcgttagcgctgcagactcgggggcttttgctgcaggacaccctcaccccaccatgggccctgggctggggctgggcctctgggcggcctgcagagagggggcggcagtgacgtggctggagagggccctgtggcactccctgtgtggggccgtgtatgttggtggtcagcagggccgacttggacgctgatcacagccatgacgcctccatgttagtcttgtgacttgggcatgtttctttatctccctgtgcctcagtttcctcatctggaagatagggatgagggctgggatctgcctcctgggttgatggtgattgaatgagttcatgtttgcaaagtggcctggggccctgctgggcacagggacagcctttgtttatttatccactttattttattttttatttttattatttaattaattaatttatttatgagatggagtctcactctgtcgcccaggctggagtgcagtgctgtgatcttggctcactgcaacctccgcctcccgggttcaagtgattctcctgcctcagcttcctgagttgctgggattacaggcacctgccaccgtgcccagctaatttttgtatttttagtagagccgaggtttcaccatgttagccaggctggtcttgaactcctgaccttgggtggtctgcccaccttggcctcccaaagtgctgggattacaggcgtgagtcactgcacccgacctgagtttacttttctttctttcagtctttccttctttcctttctttttctttttttttggaaacagggtctcactccgttgcccaggttggagttcagtggtgcagtcatggctcactgcagcctcgaggacacagacagtgaatgatcaataagcagaatagctgtgtatagtcaagagaacgtgatggagcagaggtggtcagggagggcttcctggaggaagtggcacttgaagctgagctctgatggtggaggtccaggtggtgggaatggtgtgtgtgtggcccagaggtggggaaggggacaagtgtgacatgtgcagagagggtggggcatcctcgagaggccggccaggtccccacttgggcctgtggggtgacagataggaccaggattagagcggatggagggccacagagtgaggagggtagaggaggggcccggccaagcgcaggggtgggggacagagggctcactatctctcttcagaggccaaccacatttgcagggagcaacctggggctgtggcccttgaggccctgagggtggcaggtgctctgatatggggctggccagcagactggcttctgtggcaggtggcgcttgggatgggaagcccctgagaccattcacagtgacagccgggacagtcggggggacagagggcttggggcagcccaggctgcactctaagtgcctgcctcttctgggggcacggggagagccctgtgctcaaagcttgtcccagactccaggaggacccagggggcgtgagggtggccccctcaggtggctgagcctctgggattctgtaagctgggacggctgtctcccctgggagaaggaagcttgatctcatgactcgatttctcagcacagctgtgggactctggagtggccctccgttgccccagtcctgcctgagacctgtcactgcccttctgggcctcagtttccccgtgaggtccacaggcagggccccttgcagtcctgactgaggggtgcatggtgggctcagcttctgctttgatacaggagctacgttgatgttggaggtccaggtagccctggaggcccgtgtccaggcgccctcgtcaacacgcttctccccgtgccgggctgcccggctgtccctccgtacactcggtcctgcaggcgtctgggccggcatggctgtgcccctctctgggttcctctcttctgcttctgggactggtgggttcccaccttcctgcagggaaagggagatgctctgtggcctaggctggagtatggtggtgtaatcacagctcactgcagtctccacctcctgggctcaagccatcctcctgcctcagcctcctaagtagctgggaccacaggggcatgacaccatgcctggctaattttttatgtttttgtagagatggggactcactgtgttgcccagattggtctcaaactcctgggctccagtgatcctcccacctcggcctcccagagtgctgggattacaggcgtgagccattctgtcgggcctggggtgctgcttattaggagctcctggtatttgggggtgtgggaagggagagatgagaggagaagcttgattccaagtttcctcacccattagggtcatggctgtggggccgctgtagaccccagttaggacagctgggtggggaccttgtctccagcagaaggatagtttctctgtgctggcggctgatcccctgacattgcagctggcggtgctggactgggcccttgggggtggctgatggccggggtctgcccacagtagcgctgcgtaggaggacctagctcccagcccacccctcttcccggaagccctgggaaggccggccccaaggggagtatcagccgtgcctccgcctgtgcgaatggcacctgggagccgacgggcaggttttcgagctgcacacctggtagcctctgccgtggggctcagcttcctcccattcccgggccttcacctgtccggtgtgtcccatctctggctcatggtgttgaacactcaaagaggggccagggcagggtggcagggacaaggaggtaccaggagggccagacggggctcctgccactccgccgctccctgtcccctctcctctggtgaccatccatgtgccaggcctgggactcaggggctggctatagggagggacagggatgggtgagcccggtagcatctcccactcagggggccaaggccaccccctccacccaagtggataatgttctttgggtttacttttctatcttgattttttttttttttctttagagtctgggtctcgctctgtcacccaggctggagtgcaatagtgcaatcataatagggagtcactgcagcctcgacctccccggcgcaagagatcctcccacctcagcctcacgagtacctgggactaccggtgcatgccaccatgcccgcctaatttttgtgtgtgtgtgttttttgtttttttgtttttttttttgacggagtcttattctgtctgttgtccaggctggagtgcagtggtgcaatctcggctcactgcaacctctgcctcctgagttcaaatgattctcctgcctcagcctcctgagtagctgggatcacaggtgcgcaccaccacgcctggctgatttttgtattttttttagtagagacggtgttttgccatgttggccaggctggtctcgaactcctgacctcaggtgatccgccccgccccccccacccggcctcccaaagtgctgggattacaggtgtgagccacctcgcctggctagccatgtgtatttaaactgtcttgggacacacaggcctgcgtggttgggaccacagtctggcttcatgtggcccaggtccggctagtttttgggttgtgttttttttctccatttggactctgccctgtcctcaccaaatccccagctcagaatctgccttcccgtcattaaaatagcattagtggcggggctcggtgactcacgcctgtaatcccagcactctgggaggctgaggtgggtggatcacgaggtcaggagatcgagaccatcctggctaacacggtgaagccccgtctctactaaaaatacaaaaaactagcggggcgtggtggtgggcacctgtagtcccagctacttgggaggctgaggcaggagaatggcgggaacctgggaggtggagcttgcagtgagccgagatcgtgccactgcactccagcctgggcgacagagcgagactccatctcaaaaaaaaaaaataaataaataaaaataaaataaaataaaaatagcattagtaagtgcacccggcctcacgtttcattgttatgtgacaagttttatgacattttcttacaatatccctggctgttggcctaattatcgccacggttgtctgtctaggggacatagacaggccttttggatgggggatgacagagcggatggatgatttctggccctgaggaaccccagttggggtttgggggagcttgatgcgtcataaggaaagatgttggggtgaaggcactacacggatggctgtgcaggaccgtcggggctctggggggcccagggaggggtgagggcagtggggccaatgggtctgggatgggctcggtgctggctgggggctcacttccacctggccccctgcagggcacggccgagcagatgaggactgtgtggacgaccgggccagacaccgggaggaacggctgctcggggcacggctggaccgggatcaggagaagctgctcaggtgagggtgtcgggggatcctgagggtctagggggtatctaggagcccctgggggtgaggggcagctggatgaccccaggtgggcttggcccctcgaccatggatgctatggtactgagagcgggagtcactctggtcctcagcatcgggccagccctgcccaggccaggtggccccactgcccctacagtgagtgtggaaggccccgggaggcccttcagttccgagcagtggttgtcctgactcatggcctggtggcaaacagttccttggggcaaccccgcttctccctctcgtcccctgggctgtccgagctgtcgctgacacctatgatcctccttccagagagagtaaggagctggctgacctggcccgcctgcaccctaccagctgtgctcctaacggcctgaaccccaacctcatggtgacggggggcccggcgctggcgggctcaggtcgctggtctgccgaccccgcagcccatctggccacgcacccctggttgccccgctcgggcaacgcatccatgtggctcgctggacacccctacggtgagtgtggggcacagggtctctccccttctctgagggaggggtgggagggggcgggtgcaggacaagagctcagggctggctcctgcctgccgtttcctggggggcctgggcctgcctcccgcattcgtcggaagaaggaatgataatggcctctgcctcgtggggcccctctgccatgcctgtttggggcagatgcccaatgcgggtggctctggggtgctctttgcagccagccagcacccctgtcccttggcttccccactggaggccccaggaggttcaggacttgggaggtggtgctgggctggggctgcccgaggacaaaccgcttgggggctcccagcactgactcaggcctgggcttctcctcctaggcttgggtcccccatctctgcaccagggcatggcccctgcgttcccacctggcctggggggctccctcccgtcagcctaccagtttgtcagggacccccaatcgggccagctggtggtcattcccagtgatcaccttcctcactttggtaagtggaccttctatgtggccaccatgggccagactggccatgcccagcgagatggtctctgatgccaagggcttcctgctgaggggtggcggccggcagatctggggctggggaggcggaccggggttcagagagaacatctgttgccagtgttgtaaagccttggggtccttgttgcaatgagctcctgcccaaaaactccataaagagaagcgagacaggcagccctgggtgggggctgggattccccttacctggcgccaccgcctccccaggaatccaccttgtagaccactgggaggggtgggagaaggcgttccctaggtcctcacagtggtcctcgtacgtgtctgcgtgctgacctgctctggttgcgaggctgtgggaacatcccaccccgggtgtggacagggctgtgttccccgggcctggggtgcacacgtggcccatggaggacaggacaaacttcctggcccctggggagcagccgggggcccgcagagagcccagctccccactgtgtgggtgtggcccctctctggcttcagcttcccctcgtaatgggcatggtggtggagcatcaggccgcaggtgcagcgcactgtctctgtccctgcagcggagctgatggagcgggccaccgtaccgcccctctggcccgccctgtacccgccgggccgcagccccctgcaccacgcccagcagctgcagctcttctcacagcagcacttcctgcggcagcaggagttcctgtacctgcagcagcaggcggcccaggccttggaactgcagaggagcgcccagctcgtggtaagtcggggaggatgaggcgcagctccctctgggggcccccatgggtgacgaggcagacgagtcagccagcagaatctccagacagttacagggagggagaaaacagcagaggggcaggtggtcagggagggcttctggaggaggcagcagtggaaccgagacctggagccatctgtagaagagttctccaggcggagggagctgtgagcagaggcagatggagattggcagggcagggtgcaggagcgaggaggaaaccaaggcagagaggtggccttggggactggggaagggtgattggacactgaaggagtccagtgggctcccgctgttgcctgagcccagcctggcctcttctctccaggtggcctctcggagaggcacaaggaggcctggccagctgcctcctgacggcatggtcccataagataggggacacaaagggtctgctctggaggagtcggcccaggtggtgcatacagcaagaagctctcagagcctgagccctgggtctgaatcttagctctgccaggcctggctgtgtgctcatgggcaagtgcctttacttctctgggcttcaggtttcctctcccagaaacagatgctagcgttgcctagtccttgggttgctaaatgtgactgtttagtaatcgggagagcggcctgtccttggagcgctttgttctggtgtttgtttgtttgtttgtttttgttgtttttttgaggtggagtcttgctctgtcgcccaggctggagtgcagtggtactatctcgggtcactgcaacctccgcctcctgggttcaaacgattctcctgcctcagcctcccgagtagctggaattacaggcacatgctgtcatgcacggctaatttttttctctatttttagtagagatggggtttcgccatgttggccaggctggtcttcctggcctcaggtgatccacccgccttggcctcccaaagtgctgggattccaggcgggagcactgtgcccggcccctagtgtgttttgtgtattgactgaccggcccaggtaggcattggtggtcgccgagctgactccctcccatttcctcataaaagacatgcctggcttcctcctgccctctttggggccttttgagaccctaaaatgatgacgcagtgaagcaggaaggtttagcaggtagtgagtgcgcccaatgccatcgaggtgtggggccttgtgccccccatctggccccccttgtcctgactgtgagggtccgtgcagggccggggtcctggtggaggtcccccatcagccctggttcgaaggggctcaccagagctcctcacccccagcgctgccttttggggttctgcgtggaacgctgtgcttatgacacatgggctgggatggaatgtctgtctctggcctgggacggggtgggcagcctggaccccaggccctgcatgaggttctcctcggactcggggacccttggggggacagggcaggtgcgggcgtcggggagggggaaactcgtgccgtgctgaccctgcctgccggccccttcccagcaggagcggttgaaggcgcaggagcaccgggcggagatggaagagaaggggagcaagcggggcctggaggctgcgggcaaggctggcctggccaccgccggccccgggctgctgccgcggaagccccctggcctggccgccggccccgcgggcacctacggcaaggccgtgagcccgccaccatcaccccgcgcatcccctgtggctgccctgaaggccaaggtcatccagaagctggaggacgtgtccaagccacccgcctacgcctaccccgccacccccagctcccaccccaccagcccgccgcccgcctccccaccgcccaccccgggtatcacccgcaaggaggaggctcccgagaatgtggtcgagaagaaagacttggagttggagaaggaagcccccagccccttccaggccctgttctcaggtaggatgcagctgagaccctcagggtctcactctgcccctggagcggtaaaactgctcatccatcttttcattgacccgttcgatcgttcgttcattccacctccacggagcacctcctgcgtcccaggcctgccgccagacactgagacaaacacaggagctcacagtcaaatccagcctctccccggcccctcctcagcggcagtgtcagggaaatgggtgtaatattagaaactgcttcaggatgagttgttctgagttttccaccgagccagacctgtcacacgctcagcatgcagtcggcgctaagttctgccttgctgatgatggtccagggacacccattctgggcagctttccccccgttctgtgggtcccatgcacacacccgctcttgccgtcttctgcatcagaggggacctgcagcaggtggctttgggggctgggactgtgttcttcctccctggggggtatcaggtgtgtgagcgtgtgcttgggaggactttggttcaacttcagattctggcaccaaggctgggtgagcttgggccagtggtggcaatcactgagcttggcccggcgcctgtctctcctttgtcagtttccttttgtgtgcctccagctgctgggctgggagtggtgcagagaatcaggggcacacagccctgctctcagggagattacacttgggggacagaactgggttgctattccttttcttttttttgagatgggatcctcactctgttgccccagcttgtactgcagtggtacaatcacagctcactgcagccttgaacacctggactcgagcgatcctcctgtttcagcctctcaagcagctgggaccataggcacgcatcactggacttggctatttatttatttatttttgagacggagttttgctcttgttgcccaggctggagtgcagtcgggcaatcttggctcactgcaacctccgcttcccaggttcaaacgattctcctgcctcagtctccctagtagctgggattacaggcatgtgccaccatgcccggctaattttgaatttttagtagagacggggtttctccatgttggtcaggctggtctcgaacgcccaacctcaggtgatctgcccacctcagcctcccagagtgctgggattacaggcgtgagccaccatgtctggccaatttattttttatatttgtacagatgtgtcttgctttgttgccaaggctggtcttgatctcctgggctcaagcagtcctcccaccctggcctcccgaactgctgggattgtaggcttgagaccactgcagctagccctgctgttacattttgttttgctttgagatagagtctcactctgtcacccaggctgccgtgcagtggtgccatcatagctcactgcagccttgatctcccaggttcaagtgatctttccacctttgcctgtgaagtagctcggattacaggggtgcgccaccatgaccagctaatttttttttctttttttttttttagtagagatggagtcttccaggtcaggcacagtggctcacgcctgtaatcccagcactttgggaggctgaggcgggtggatcacctgaggttaggagtttgagactggcctgaccaacatggtgaatccccgtctctactaaaaatataaaaaattagccgggcacggccgggcacagtggctcacgcctatagtcccagcactttgggaggctgaggcgggcggatcacgaggtcaggagatcgagaccatcctggctaacatggtgaaaccccatctctactaaaaatacaaaaaaaaaaaaaaaattagccaggcatggtggcgggcgcctgtcgtcccagctacttgggagggtgaggtaggagaagggcgtgaacccaggaggtggagcttgtagtgagccgcgatcgcgccactgcactccagtctgggtgacagagcgagactgcgtctcaaaaaaaaaaaaaaattagccaggcgcggtgggtcatgcttatgcttcttgtcccagctgctcgcgaggctgaggcaggagattcgttggaatccaagaggtgcaggttgcagtgagctgagatggcgccgttgcgttccagcctgggcaacaagagtgaagttctgtctcaaaaaaaaaggaaatggggtctcactctgttgctcaggctggtcttgaacttctgaatttaagcgatcatccccctttggcctcctaaagtgctgggattacaggcgtggcccaccacgcctggctctgctgttagattttgaacaactgctttaatggggtggagcagtaggttcctggggagtggagaccagaccacacaaggtgggtaaaggcagctgtaggcctttgcagacctcatgaagtgttggcttctggtctagccttgtgctgggtgctgagtgggaaaggaacaagagagaccactgtggttctttgccttcaagaccacaagaccttggggacaagaaggtggctggtttttcactttggggccactgcatggccctggggtttctgagatcccacctagaacagctcccaccctgtagctgggtgagcagggggcggctgcgtcctgggtctctgtctggggtggtgggcgggtgtcagtggggacatgggatatcagatcctagggctcccatgctgacccctgtgtccttggcagatatcccgcccaggtacccgttccaagccctgccaccgcactacgggaggccctaccctttcctgctgcagcccacggccgccgccgacgcggacggcttggcccctgatgtgccgctcccggctgatgggcccgagcgcctggcactctcacccgaagacaagcccatccgcttgtccccctccaagatcacagagccgctgcgggagggcccggaggaagaaccgctggctgagcgggaggtgaaggcagaggtggaggacatggacgagggccccacagagctgccgcctctggagtcgccgctgccactgcccgccgcggaagccatggctacccccagccctgcagggggttgtggaggtggcctgttggaggcccaggcgctgagtgccaccgggcagagctgcgcagagccctctgagtgtccagactttgtggaggggcctgaaccacgggtggattccccgggccggacagaaccctgcaccgccgccctggacctgggggtgcagctgacacccgagacactggtggaggccaaggaggagccggtggaggtgcctgtggcggtgcccgtggtggaggcagtgcccgaggaaggcctggcgcaggtggcaccgagcgagtcccagcccaccctagaaatgtcagactgtgacgtgcccgccggggagggacagtgcccgagcctggagccccaagaggccgtgcctgtactcggcagcacctgcttcctggaagaggcaagctctgaccagttcctgcccagtctggaggacccactggctggcatgaacgccctggcggcagctgcggagctgccccaggccaggcctctgccctccccgggtgctgctggagcccaggccttggagaagctggaagcagccgagagccttgtcttggagcagagcttcctgcatggcatcaccctgctaagtgagatcgcagagctggagctggagaggaggagccaagagatgggaggtgagagtgcgcgacctctgagttctgcagattcgtgagttttagttttgtggtgatggggtcttgctgtgttgcccaggctggagtgcagtggcacaatcttagctcactgcagcctcaaactcctgggctcaagtgatcttccctccccagcctccccagtagcttgggctacaggcgtccaccaccatgcccagctaactttttaaaaagttcttttttttagagatggggtcttgctctgttgcccagtctggtctcaaactcctggactcaagtgattttgcccaccttgacctcccaaagtgctgggattataggtgtgagtcgctcgctgtgcccggcctcttaaacatttttttataagatttttaaattatgaaaaacccggaatatggtttattcatattaattttttaaaaaattgtggttaagatacacataacaaaatgttccatctcgagcatttttaagcgtcctgttgagtgagtggcatgttaagtgtgtttgcactgtgcagccagtctgtaggtttcctggtggtgaaatttctcattctattgatggtgtgttttagcaggatttcttgggttgcaaggaacagaaactctcatttaaattggtttaggcaggagagaattaattggctcttggaactgaagtccggcagtaattaggtaatttcaggtatggctggatctaggtgttcaagccaagaaaccaagtctttcttttcctacacaggcccttccctagtctctctctctctgtgtccccgtctccttccctccttccctccttccctcttgctgttcgacttttctctctgttggcctcattcaaggccgacttactgtcctcactggggtggggggtggtctgtcagttcctcccaggtccctgggcctgctcagcagccttccgaaagaggccacctctttcttgctagctttggcaaaaacactgagattcattctcaagggctgactgcggttcatgctttgttgttgttgtttttctttttttgagccatagtctccctctatcacccaggctggtgtgcagtggtgtcatctcggctcactgcagcctccgccctcccgggttcaagtgattctcctacttcagcctcccaggtagctgggattacaggcatgtgccaccatgcctggctaattgttgtatttttagtagagatggggttttgccatgttggccaggctggtctcgaactcccgacctcaagtgacccgcctgccttggcctcccaaagtgctgggattacaggtgtgagccaccgctcccagcctcggttcatgctttttgcgggcatcaaactgagttctgggacatgggctgcgctgatcattacctgtcctttgatctgggatgtgttgcctctggggtgtagggaagggggagggtagttctcaaagagaatgggatgccttcagcagaaagggcactgaatgctgggccagacacagaatgactgatgttcagcatggaaaactgggcctagaactggtttggaggaagggccggggcaacacccgttgaagagatgatatccctgccagtgttttagtatatttcctctagaacacacatacacatatttacttctcaaattaagatctttttgtaaatagtgttctgtaacctgccctgcccttttcacttaaattttttttttttttttttttttttgagacagagtctcactctgtcacccaggctggagtgcagtggtgccatctcggctcactgcaacttccgcctcccaggttcaagcgatttttcctgcctcagcctcctgagtacctgggattacaggcacgcaccaccatgcctggctatctttttgtatttttagtggagatggggtttcaccatgttggccaggctggtctcgtactcctgacctcaagtgatccacccgccttggccacccaaagtgctgggattacaggcgtgagccaccgcgcccggacactttacttaaaatgttctttattaaacatttttcaaagctgtgggttttttaattttttttttttttttacaaaaagtagagatggggtttcgccatgttggccaggctggtcgcgaactcttgaactcaagtgattttcccaccttggactcccaaattgctgggattacaagcgtgagcacccggcttaaagctgtggtttttaaaaaatcattgttttagggactgcccaactttctgcctggtggtggccctggcccttgatgacccagtcttagatggtcaggcattttcgtctgctttaaaacaaagttgttttttttttttctccgttgcaaataacatgatggttatccttgaagaaaaaaaaactttgtccgtatctctgatttgcctgggattgtatgcccagaggtagaactgttgggtccaaacaaggccacatttttcaaggctttgtgactgtcatggtcagatggccctcaaggaagcctggagaagccacgctgccattggcctgtgtgagcaacgcccccctccccactgggaggcacttgtcctaaagttcattgctgcttttctctcacgaaaatagttcaatagaaacttttttttttttttgggtagaagaaaatcaaaattcccttggttggccaggcacggtggcacacgcctgtaatcccagcattttgggaggccgaggcgggcagatcatctgaggtcaggagttcgagaccagcctggccaacatggtgaaaccccatctctactaaaaatacaaaaattagctgggcgtggtggcgggcacctgtaatcccagctactcgggaggctgaggcaggaaaatcacttgaacctgggaggcggaggttgcagtgagcccagatggtaccactgccctccagcctgggcaacaagagtggaactccatctcaaaaaaaaaacaaaaaacaaaaaacattcccttggtcttcccacctggtactggttttgtttttgtttttaattatttctgggacagaatctccctctgttgcccaggctggagtgcagtggtgtgatctccgctcactgcaagctctgcctcctgggttcaggtgattctcctgcctcagcttcccaagtagctgggattacaggcacatgctaccacatccagctaatttttgtatttttagtagagacggggtttccccatgttggccatgctggtcttgaactcctggcctcaagtgatccgcccgcctcagcctcccaaagtgctgggattacaagtgtaagtcactgcacccagcccagaattctccaccctattaggacaccagccttacggaatgaaggcccactgtcatgacttgaacttgaccacctctgcaaacgccctgtctcccacagaggttacctaatgaggttactaggggttaggactctcgcatattaaattagtggggacacgactgaacccatcaccactggcctagaggtcacttgggcgtcccttgcctgatcagttaagagcttagggataataggtttgtgggagggtgaaggaggtgacagagttgtaccttggtcccctcttggagaacagaacagccctccatccttacctgacattgtagactcttaagtctcgcaggacctcgaggcgggggtatggggtgggtgagatggtttcaatctaacatcaacctttgggagctgatcaggtttgcggctttgtggcctcagtttccctaaagatataagaagagcggccagccgcggtggctcacgcctggaatcccagcactttgggaggccaaggcaggcggatcacttgaggtcaggaatttgagaccagcctggccaacatggggaaaccccatctctactaaaaataaaaaaattagctgggtgtggtgacacatacctgtagtcccagctactcaggggactgaggcagaattgcttgaatccaggaggcgaaggttgcatgagccaagattggtcactgcactccagcctgggcgacagagtgagattctgtctcccaaaaaaaaaaaaaaaaaaaaaaaaaagatataagaagagcaaaacaagcattctcaactagggatgattttgtccccccaggggacattggcaaccacatttttggttgtcacagcttggggggagcactactgccatctagtgggtaaaggcagggactcagcaagacaccctacagtgaaggcagaggacaagcccccagcagagatgcgaatgaatagtgaaatgtgaatagtgccaaggaagagaagctccccctcagcagcatcattagtcatgtctgtctctggaactttgcacactgccaatagagaatatggttttcggctcaccgcagtctccgcctcccaggttcaagcgactctcctgcctcagcctcctgagtagctggcattataggcatgcgccaccaggcccggctagttttttgtatttttagtagagatagggtttctccatgttggtcaggctggtctcgaactcctgacctcaggtgatccgcccgcctcggcctcccaaaatgctgggattgcagacgtgagccaccacacccagccaaaaattggtattttagatcacaaagaaaatgtcagccgggcatggtggctcacgtctgcaatcccagtactttgggaggccgcggcagaaggactgcttgtgcccaggagtttaagacccgcccgggcaacatggcgagaccccgtgtgcattaaaaaaatgaaatgtcaattgaaaaattataatagaactcatttaaatttggtagagactaaagcaagatctctgtggttggagcacccttcctggagggtagggggagtatttatcagagaactgcacacacctggtcatattcatcacactggtgaggctcttcctgtcacacgtgtcccagctatgtgcccatgtgctcctattacaaaaagataggaggccggacacggtggctcacgcctgtaatctcagcactttgggaggctgaggcgggaggatcacttgagcccaggagttcaagaccagcctgggaaacatagcaagaccccatctctacaaaaaaatacaaaaactagctgggtgtgacggcatgtgcctgtggtcccagctactcaggaggctgaggcagggtgattgcttgagcctggcagcttgaggctgtggtgacgtgtgatggtgaactccagccagggtgggggacagagtgagaccctatcttgaaaagacaggaaacaatctaaatgccatcaatgggagatgacttagatgaatcaaaactcatcaattcaagagtgttctaggctgcccttccgcccccgcccccccacatgattctgcgtaggctcctttgcacgtttggccatttaaaattgctggcattctagtgtttttgacctttagagatggcagtttttataaggtccaagctcataatgaggaggtagatgtttgctttgtgctaatatgagaaaagacattaagcagaaaaaaagcaaaatgtgatacagtatgtactgattgagatcttttttttttttttttttttcctgagacagcctccctctgttgcccaggctggggtacagtggggctatcatgcctccccgcaacctctgcctcctgggttcaagcgattctggtgcctcagcctcccaagtagctgggattacaggtggtcaccaccatgcccagctaatttctgtatttttagtagagagggggttttaccatgttggctaggctggtttcagactcctggcctcaagccatccacccgcctcggcctcccaaagtgctgggattacaggcatgagccaccgtgcccagcctgagatcgtgtgtgtgtgtgtgtgtgtgtgtgtgtgtgtgtgtgtgtgtgtgttttctttgagacaggctcgctctgttgcccaggctggagtgcagtggtgtgatcatggcttactgcagtctcaacttcctgggttcaagtgatcttcttgcctcagcctcccgagtagctgggactacaggcacccagtttacatttatattttatttaattttgtttttgagctggagtctcgctgtgttgcccaggttggagtggctcaatctcagctcactgcaacttctgcctcctgagtttaagcagttcttatgcctcaacccccgaatagctgggactacaggtgcttgttaccatgcccagctaatttttgaatttttagtagagacagggtttcaccatgttggccagactggtctcaaaactgctcacctcaaattatccacctgccttggcaacccaaagtgttgggattacaggcgtgagccactgcacccggcttatttttatattttaaaggatgcccgtggatgtcgtgtgcatttgaatatgcataatcatttctggaactgtctactggaaactgcacccacagtagcctcccgagggagggacctgtgtgttggaggaggaaggaagcgggctgtctttttttttacacctttctgcttggtttgtgtttttcatcctgggcttttttctgattataagagctatgcatattcactatggaaaaatgcacgtacaaataagtggaaggagagccgtactgctggaaagaacccttcggtctttggaggccctccctctggaggcttatgctgtgcctagcctgtactctgtgaatagagcacaggaccctgtgccaggcgtgctgccttctctcctgttcgattgattgattgattgattgagatggagtctccctctgtcacccaggctggagtgcagtggcgccatctcggcttactgcaagctccgcctcccaggttctcgccattctcctgcttcagcctcccgagtagctggggctacaggcgcccgccaccacacccggctaatttttttgtattttttagtagagatgggatttcaccgtgttagccaggatggtctccatctcctgacctcatgatctgcccgcctcggcctcccaaagtgctgggattacaggcgtgagccaccacgcctggcctatttatttattttttttgagatggagtcttgctctgttgctcaggctggcatgcggtggtgcaaactcagctcactgcaacctctgcctcccgggttcaagtggttctcccgccttagtctcccgagtagctgggattccaggcgtgtgccactacacccggctagtttttgttatttttagtagaggtggggtttcactgtttcaccatgttggctaggctggtcttgaactcccgacctaaggtgatctgcccgcctcagccacccaaagtgctgggattacaggcgtgagccaccatgcctggccttctccccgttcttgtttagagatgctcaggacttccggcatgtcacaaaggcctctgtctactcagcaccttgggggatgggcacgtgtggcctggggcctgcgcttgctttgggcctcggcatccccgtttggggttggggaaggggtggcagcagcgccctgttacctacctcctgtccacaggtgcggagcgggccctggtggcgcggccctccctggagagtctgctggcagctggcagccacatgctgagggaggtgctggatgggcccgtggtggacccactcaagaacctgcggctcccgcgggagctgaagcccaacaagaagtacagctggatgcgcaagaaggaggagcgggtgagcggctggctgcttcctccctggggtccgcgggggaggctgggtgggaggcccctctgtggaggtgccctactgcctggggcgtggctggctttggcgccagagaggcctgagctacgttcagctccttgtgctgatgtgctgtgtggtcccagtcaagtggttgcccttctcggggactcagtttacctgtctgctagcatgtcaggctcatcacacaggtcgcggtgtgatccactggaaacagagtagcccagggtcacatgtagctctggccttaggtgcccacggggcctggggctgcagcatccccttgctgagccttccgtttataaatgacacagtggccctcactgatggagcaggtgtcacacgcaagcactgtgcttcaggcatgacatctaattgagcactgccacagccccgcagagccagcacagggtcccttgcatacgatgaggccatggccacagtcaggaggtggcagcggtgggactcgagccccagctcccagtgcagtctccccttcctcaggggcacccctgggtgggcggtgggcgtcgttaggcagtggcatcctcaccccctcctcctctcccggttcttcccccagatgtatgccatgaagtcctccctggaggacatggacgccctggagctggacttccggatgcggctggccgaggtgcagcgccagtacaaggagaagcagcgtgagctggtgaagctgcagcgccgccgggactccgagtgagtgtgtcccccgcccgccccgtggggcccctgccccggcccaccaggcccccaggcgcgcagcagccgtcgaggtgtgcgtggacccggcgccgtgtgtgcatcgtgtgcccgttctccgcgccccgcccgccccccagcgtcacagccaagcgtgtgattctttttaagggacaggcgcgaggaaccccatagaagcttggcacgcagaggccctggcaggccgcggaaacggacccacgccccgagcgccctgtcgcccccccgcaagagagggaagagcggccacagtagcggaaagtaaggctggcccctcggtgggtcggggactggcacacagcttgaggggaggagcccgggccccacgcagggcctgcctcggggtgctgggggacctcgcgtccctcgggctctgacctacccgcagcagtggccctcggggagcacggcctgtgctgcccgggccaggagggagcgaggccggtgctgagcctggaggatggctcctgcgacagatttttcccgtgtcctaacccagcgcttcacctgtcttcctgccacgcctgcctcctcacgcctagggcctaattcctcctcttttccacgcgcctcctccctgcggaaggacccgctgggctgccagccttgcttgttgggacgggctatgacccggctgtcgctcggtctccgccgtgccggacctgctggcttgccccgagaccagggctggccccttctggcacttggggacaagcttctcctcctcgggcggcggtcgcagccttgtggggcacctgtgtgggtctttctgaacgccagctggaatgagagcttttcccgcagggcgaggcgtgcacagaaaagatgcttcgtccttccctcggtgtctgtagcacgatcggaaaggggcccgtcaaggaaaggggttggagtgttgggagcctggggcaggagggtggggtagacgctaggcggctcaagacctgccctgaggaagcagaaggagcgtggggggaccttcggagggcacaggagaggcagtgggaaggccacagttcttctcaggataaaacagccccaaggcccccatgtcttgcatttaacattcttggatgtttctgaccgaagagaggatggagagaggtagaaatctccctcaccagccgcagcaggggcagggagagcttcccggagaagagggcaggaggctgcggccaccagcagcgtggtggtcaggggtgtggcctgcactggttaaatttcctgttcttgagtcccagcaccaccccttagtgtgaccgacctcgggccaggtgttagcttttccgagcctgttttctcatctataaaaaaataagtacacaggttggccacggtggctcacgcctgtaatcccagcactttaggaggccgaggcaggcggatcacttgaggtcaggagtttgagaccagcctgggcaacatggagaaaccccttctttactaaaaatacaaaaattagccaggtgtggtggtgtgtgcctgtaatcccagctatttgggaggctgaggtgggagaattgcttgaacctgggaggcagaggttgcagtgagctgaaatcgagccattgcactgcatcctggcaacagagtgagactccatctaaaaataaattaaataaataaataaataaataaataaataaataaaatacagcagcagcaaacgtttgtggccaaaatataaagccactaacacagtgcaagacacacagtgagtgagtgccaagtacagatcggctgtttcgatcacctgtgaagtttcagcttaaagcaagcaagtggggcttctaagccatgtctgtgtccccactgcgcacgggattccagagaccagcaagtggctccttcttcgttttttttttcccttactggaaaagagagactggaatccttcttcgtgtaaacttgtgttccgaactccccctgccatcctggtggatttccttggcgtttctgatctttgttcttggcacgatttggtaaataggtatctgaccgcacagagatgtgtgtgtgtgtgtgtgagtgtacgcgtaaaagcgcacaagaaagaaaatgctttcttccttctttcaccttaaactctcattctgcctcattcacaaatatcccagaattccagcactgttgttttacaagatccatctccccacgcccgtcactctgccatcactgtccacgctcagggtccagagcccaacccttcagggccatgagggtggacctcagcctgcgagccttgtctggccagggtgctgaccggcagtgtgtctgcgtttcaggctgagcagcaagtctctgctgacatcagatgattatgagctgggagcagggataagaaagagacacaaggggtctgaggaggaacatgatgccctcatcggaatggggaaagccagggggaggaaccagacttgggatgaacatgaggcctcgtcggacttcatcagtcaggtgagtaacccagtcttccaggtgtgtgagatctttcagggaggtgtctggagggtgtgttaagagttcacgctcccttcgcaggccctttgttcctgtacagaaaccttagaagtggttgtcttcaatgccggaatgactcttctccaatcttccttattgtacagagggggagattaaggcccagaggaggtcagagacctaccgacgtaacacagcctcagagacaggaggcctaaaagctatctccctctgtgtgctgcatgaccctttgctaaagccaaggagagacacaagttcttaaccaagtaatacaattgctctgttgtttaatggtgtaatagtttaatgagcagctctgccattctgtagttctaagaaacaagggcttggtgccatggtaatttcctctctgaactctccaggggtaatgggctgagagccaactccttgattcttcttatttcttcagaacattgaaatcatccacttaaggtgcctttttgtaaatactaatgtaccttgccatccctccccataaagtccagtgcaaaggggtagtttttttttgtttgtttgtttttttgagacagagtcactcagtcacccaggctggagtgccgtggcacgatctcggctcactgcaacatccgcctcccaggttcaagcgattctcctgcctcagcctcccaagtagctgggattacaggtgcccaccactatgtccagctgatttttgtatttttagtagagatggggtttcaccatcttggccaggctggcctcgaactcctgacctcaggtgatctgcctacctcagcctcccaaagtgctggaattccaggtgtgagccactgcacccagctgaggggtattttggttgacttggctgagaggggcaggctcatggagggagacggggtctaagagaagaaagattgccagtgttaacaccagatcgtttttactttcaaattgtggtgagggatgcttttgttttaattgacaccatcccagcttttttcttccttaagaaatgtcacctgattaaagaaaatagagataaaatgttcaaacctggggcattaatggctttgaaactgcgtgtttcgcttcaacaaatgactacagctgacgatagacatgcaggcaggaatttaatctgtgaaatctctaatcgttctttctgcttcaggcatccaaggaacacttgaggcattttttttggcagcttcggcccctttagttggatgaactggtttggagtgtgcactagtactttgtcagctgctgtaggtggctgagataggcatatcagctgcgcttcaatctgggtttttgatcttgattcctttcctcctcccttaatccggctgccttcttcaggccatcggcagcagcacttggtcgaagtacttccttaggaggcaccaagcagtgccacggaaagccagggccagcgatcagtgtaaccacagcaccagctatttaataagtggttaccttgtaccagacgttgtggtcactgcataccttatctgagttcatcttcagaagcaccttgcgatacccagacacaagtacccccattttacagagttacacattgaagctggccagtcgtggtcagcctggaatcccaacagtttgggaggctgaggtgggagaatggcttgagcctaaaagtttgagaccagcctgggcaacatgatgaaaccccagctctacaaaaataaaaataataaaaattagccaggagtggtggcgcacgcctgtattcccagctaccagaaaagctgaggcgggagggtcacagagcccagaggtcgaggctgcagtgacttgcgactcccagctagtcgggagcctgaggcaggagaaatgcttggacctgggaggtggaggttgcagtgagccgagatcgcgccactgaaccccaggctgggcgacagagcgagactccgtctctaaaaaaaaaataaatatatatgcgtgctaagaggagttaaatcacagaggcaggtgaaggattggagcccaggctgggcagagcatgtgcactgaaacccactatactgttttgtcagatcttttaacccatgacccaccttccctctccagctaaagattaagaagaagaagatggccagcgaccaggagcagttggcaagcaagctcgacaaggccctctccctcaccaagcaggacaagttgaagtcgcccttcaagttttcggacagtgctggggggaaatcgaaaactagcgggggctgcggcaggtacttgactccttacgacagcctgctggggaagaacaggaaggcgctggccaagggcctcggcctgtctctgaaatcctccagagaaggtaaacacaaaagggcagccaaaaccaggaagatggaggtggggttcaaggccagaggccagcccaagtcggcccattccccgtttgcctcggaagtgagcagctactcttacagtaagtagcgtatgccgcgccacctctggtccgctgcttctctccttttctcccctcttctctccaccgtcctccttcccccccccccccactctctctctcgctctcgctctctctctggggcgcactacagtgcctgagcttggcatggcctccaagccggaagtgggggggggaggccgcctgaagcggatatgcctgtgactggcgggtgtgatgccaggcaggtgcttgtgattggtgggcgcccgtgattggcggttgggagccgacctccgccggccctgtcttgcccgccctccatttgcctaccggatgtcataggcgaggaagccttgtgcgtcatagagtttgcggctgtttggcctagagaggcctggagcgcgactgctcttgagggtcctagaggtgaccggactcccctacccacaggaagcatgccgtctgttgcggaccacggctttgtcgcgaagtgttggcggaagcagtgtttatggagcgcccaccgtgctcggctatggatgcaggggttcattggcgttactgtgtctgtggcagctctgacagtggtacccccatgttgttactggggatgatgtggcccgagagccagaggggagtgtgtgcgctcgggtgcggagaggcgactcggggttaaacctggttcggcccgacccacctacccactggaacctgctgccatcatggctgtgtcccactattttcttttttttttttttttttttaatttgagacggagtctcactctgtcgtccaggctggagtgcagtggtgcgatcttggctcactgcaacttctagctcctgggttcaagcgattcccttggctctgcctcccgagtaactgggactacaggcttgtgccaccacacccagctaattttgtatttttagtagagacggggttttgccatgttggccaggctggtcctaaactcctgacctcaggtgatccacctgcctcggcctgcaaagtgctgggattatgggcgtgagctactgtgccgtgcgttttttgagacagggtctcttcttattgcttaggctggagtgcagtggggccatcataactcactgcagcctcgagctcctgggctcaagtgatcttcctgccttagccctccgagtagctgggactaggtgagcaccaccacacccggctaatttttaaaattttttgtagagacagggtcttgcagtgtttcccaggctggtgcctgggctcaagcaatcctcccctctgaacctcctgagtatctgggactacagctgtgtaccaccacgtgcagctaatttatttttattttcgtagagatggggtctccctgttttccaggctagtctggaactcctggccttaagcaagcatcccactttagcctcccgaatagctgggaccataggcgcacactactactatttttatttttatagaggctgagtgttgctgtgttgcccatgctggtcttaaactcctgggatcaagagatcctcctgcctcagcctcccaaagtgctgggattacaggcgtgagctgccttgcctagctgctattgagctcttgaaatggagcattcctgatgggactgaagaatggagttttatctcatttaacaagagactgtcagattggagcgtcctcatggttatggcctcttgtggcccagaacctgctgcctggcaggtagtgggtgcttgctcagtatctgtggacagagcacctcatgcccagggcggacaggtgctaagtttgtggctagctgcagggaggccagaaggagggagcttcctgggttctggcccatgtcagtgtcagtggtgtttgttctgggaatccccaggccctggggcgggtggagagcttttgcattggcagctgcctggttctgtgtgtctggggcttttgattggctctggccggttcatgggcggagaagggggagtttgactgtcaagggcgaaaagtcgccgtgtttattgataccgtaaagcatgttttcttaaggaaataaaaagtgtttatggactcagagttaagatatcgtcacctgctttacggggtcgttgggggccttaagtgagcttacgtgggcagagagctgaacgtggcacctggcacggaattaagctgctagttttttcagggtgcgtgtgtttcgtctgtcctaggctagcaggtcaccaggactcatgctccctgtgggtgtgagttaagcagctggctcatgccttctgtgctgaggacatatgagagtgtcgtggtttcagtgcttctttgattgggatgggtgtgatcagagcagtgtagcctaggctcctggccagtgtgtgggcacaagcaggaagagacagtgccagagactcatcactctgagggggaagggaggggctttcttttgctctctcaatctctgctcattttggaaaagtgaagggggttcagggaagtcgggggagattgctgttcttttgatcttctgagggattggggtctgtggatgcagtttgggtggtagctgaaagaattccccactttcaggtggacgtggatggggtggagctggaggtcagagatgtgctctgtctctgatgtctctggggtgctccgagctggtgtgttcactcttggcacgtgtgagggaatgtccgttttatttatttattaattattactattattattattattttgagatggagttttgctgtttttgcccaggctggagtacggtggcatgatctcggctcactgcgacctccgcctcccgggttcaagtgattgtcctgcctcagcctcctgagtagctggggttacaggcacgcaccaccacacccagctaatgttgttatttttagtagagacggggtttcaccacattggccaggctggtcttgagctcctgacctcaggtgatccgcctgcctcggcctcccaaagtgctgggattagaggcatgagctgccgtgcctggtctgggaatggtcaaatgggcaacttcactccatcgtgcctgtgtcgaaaactccactgtcctggatgagagaaacggactcatggagcagtgaggaattcagtgggcctggctccagcaggacggtggctgtgggattcacctggctctgcagagcgctcctctgtttattttttataatctgcttttctgcaattctgggtcagagagagtgcagggttcacaaggaggtaggggtgtgtccagcagggagttgctgagctggacggaggtcgaagcgagaacggtctcctcttgctttttcagtttcgattgtaggggtcgctggcatgccctgtgggtttttttttttttttttttctttagatgatgtcttgctctgtcgcccaggctggagtgcagtggtgtgatctcggccgcactgcaacctccacctcccgggttcaagtgatcctcccacctcagcctccggagtagctgggataacaggccctgtccactacaatacaatacaaatagaaaatacaacagtttgtgtattttttaaaaatacagacggggttttgccatgttggccaggctggtctcgaactcctggcctcacgtgagctgcccgcctcagcctcccaaagtggtaggattacagatgcaagccattgcacccgacctccctgtgggttcttgtaggaggccaagttggttgtcacccacttagcctctccagcctgggacacagcctcgggagggacagattggagcatacaagagagagcgcactttgactggttcgatgggcaggggctggtagcctggcggggctggacccttgtcccacccaagagttgccggaccatcctgaggttgtggggtcttgctggagtgaaagcttaggtgttggtgggagcagtcagaggaatgcccgccacggatgcgtgcatgtggtttctcttggactcggaggtggcaggtgctgccagagctgtagctgtgttggttcacgttccccccgtctggagtggatttcagcagatcaggggattattctctgtctctggaacccctgtcttcccatcttgcccagtaagaaaagcagatcaaaatggcgtgagcatggcgggggccggagcgttgcctgcctggcaggctcccctcccaaagctggctggttgtctccccggaagatttgaagactcttgtcctccgttgtatagttaggctggagactctggggaagccagcagtggtgggccggctcactggctcgtagaaagaagggcaagggatctgctagcggtaacagcgtttgcccattcccatggtgtaaacacccttactgtggcctgtttcgtgctgccactgggaggctgctgggaggggcactgggaagagaatgcatgattggctgtcatgagccctttccctcctgagtcaggtcctctgcggttgtcacccttgggccatcgtaatcccatgggacaggcagtgaccaccgtgaccttcctgagcatagggcttctctcatcctccggtgcccggaaagcctggagtgactggtgggtgaggctggcagcatccagtctaggaagggcctgggtccagcactcggaagatgccatgcaatgaccgaggcacccagggcaagggagaagcctggactgggaggggagctggtgacatggggcaaggcctttgtacggccgcctactaggtattcggacctgtttgttctggcaccttccagtacgttctcagaaccattaaaaccaataaaatgacaccagctcctgctgccctgtgacttatctctattaaaaactactttgactgcagatacggactcagaggaagacgaagaattcctgaaggacgagtggcccgcccaaggcccctccagctccaaactgacgccttccctcctgtgtagcatggtggcaaagaacagcaaggcagctggtggccccaagctgaccaagaggggcctggcggccccccggactctgaaacccaagccggccaccagcaggaagcagccgttttgtctgctgcttcgagaggccgaggcgcgttcctccttcagcgactcttcggaggaatcgtttgaccaaggttactagctccaaacacaaaataccttccgtgtttcctagcgagagagtgcgtgcgagtgagcgagagggaagcgagtgggcgcacgggagagatggtgggtgaggaggcccgtgcggatggccgcaagaaggctgccatctgggttcttggcagcgtagcctgctgttatcagccgaatgattttgatttttgctttgatttgtactgtatcattgtgataatatccccggctggctctttttgagctgttatatggactgcttttgagtctgcgtttctctccacttgccctcctccctgccctcctccccctcccccgagttccccccacccccgcactcacgttttctgcccacccagagaccccaggcttggttcgggctctctttgggcacgggttcggtggaggcttcccgaggaacattttgtaaatggaattctgtcgtgtgggcgtgtgacttgatgtttgtaccgcgattttggtaataccaagctttattaaacatatcgagttcatttttaactaaacctgtgtgccttgtctctcttgctgtgtccttactagacattaggttgacgcttccctctcattttgtttctcccccacctcctcccctccctcctccccacccagaaggagtagggacgggaccgtgccgcctgccgcttgcctgtgttattcaaatatccctggtagcgattggcattcatttcatttttcaggtttaaaatcaagcgccttcacctccagcatcatcatgtttttttagttgcttgttttgtcttttattttcttaaagctctattcttacttgccagtggttaaaaactattatttacaaacacttgtcttctcacgtgtatttctgttttgaagggtgcgtaggcagtgcagggcccagagcctttgacacccctggtctctgtcattcaatacgaaagcggctccgttgccgcatcaagggacggagcatcgtgctctgtttggagagaggctggcctggtcccagcccggggtcctcagccacctcggttctcaagagagagctgccaggcccctgagaacccgctggccttgccctttccagtgtcagaattgtgcttctggggttagatgtgtgtgagccttttgggcccttcaaccagaaatgccccaagaaagggaagcaagtgaatctctgacattttttcctagccctggttttaggatttgcttcagggcgaactcccactagggccagctgaggggatcccccaggccctgggtagccacacctggatgtcagctactccctgaggaaggtctggaggtgtcatcgtgtccctgggtctgacctggctcgggcaccccgggacctgaatgctgcccccgccccccgcccgccctgtttttccagccctgctcttgaattcctggtctaccgcctcccctcccagacctcccctccaaattggcagagatccttttgggtgaccaggaggtggtatggcgaggagtacgatgccccggggcccatgttcccctgggctgctactacccctctgagcgaacaccaccccggaccgagaagagaggcccccgacccactggccagcctcgttttccgaggcctccccctgcccgggctgtccgtggatgagctgggttagtttacgatccccttctccctccccggcctcctccctttcccccatctcccccatgggctggaccccacgcccccttaaagccgcggtttccgcttccaagtttttgagccctcctgccccagctgagaccccacagagaagcaggcagcgccctaggcctcttaggaaggggctccgggctggcgccgcagtgccaagtggacgggacccagataggggagtgcggggggtgaggggaggcgggggaggcccaggctcctcagtgcccccctccacccccgccagtccaccactgagcaggtcttgaaagggatatttgggtaatagggcctcgctgacctggtactaaactccgtaactggcttggcttttctagtatgtctgcttcttccagcagcccgaccatccctccacccttgacccctccccatgacgctttgaatgtctgttttggtctcttgcatttgctctcacgctgcactctggacgcaaagcgaaggctgggagtagggcagacggcgcagcgggtcactgagcttgggtgcgagcctggctcgttgctccgtaggtaggcaaaacgcttttctttctgtcctccgtgcacctccctcctcggggttcgcccccaccgggtctggcagcagcagatcgctctgacatttaccaccaacctgtcaccgccaaccccatgtcctgagccaagatctttttttgttgttgcttttttctttaaataataataataataaaaagtttttctgcatttccttgggttactttgatgggacttttttcccccctccctgtccccagccctcggcaagctgcattgcctcaggtgtggacaactccagaaaggttttcttggtcctcagagcccctctgctccccagcctgctgcggacgctagcggggtgtgcaccagaccccgcaggagcagcgggtgtggccttgtcaagcacgcagggaggcgggagggtctcccatgccgaggtgcgggcattgggctgctctcggctttctgggctctggcgtggacgttgcgggcatccagaaacccagagctcgccctccccccgcagccccagctgcttgagaattcctctggatgggaaagatttctggagtctgcgcacctgagtggctagaagggaagatccctggcctcacgtccaaccccctgcccccaccccacaaccagccccctgcccaccaccctgctcaaattggcccaccccagggagacctgatgtgggggacccaggcgctgttgaaaagtctgcctacacttagcctgctttgccgctgtggcccactggggcggagacagagccatgtgacgcctgcaatgtgaatgatcgcaagtgtgcactgcctgcctgcctgcccccgcctgcctggctggcctctccagcctgcttcatccattgctccgggggccagtctcccctctcaccctcttaacaaacctcctccctctccctctggctcctgcctccctccctccctccctccctctactcctctgcggactcctcagactcatcaccttcaccgccttcctctctgaggtggcccagcagaaatccgggctgtctccaatacatgagtagacagaacctctgccctcattggcacctctggggccaccacttttggccacaagttgcttaagcaagcaggcggcttggggcgttggcaggagactgtggagttggctgtccgtcttccccgtctgtctatccgagcctagactgctccccgccctggagagaaagggtctggtgtccacctcttcttgctggaaggggccaccttccagccctgcggcccctagagtcactttcccgctcccagcactctggtccgtgaggcagatgggcacccctgtcacctgctcatgggtggcactttggatgttgcatctcagggcagagtttgctctctcaggccttccacctgcccgtccttggaagcaagtgtctgcctcaagacagtctctctttttggtggggggttttggtttgtgtgcagggagcctcctgtctgccagctgcctttgtcctgagagcctgggctgggctccggggactgcagactctcaggcaggcagggaaggtcactggatgaagctcatcttaagtcaccgaccagagaggcaggctggggcttctttatgtttttaaagtttttattacttattattattttttgagacggagtcttgctctgtcacctaggctggagtgcagtggcgatcgcggctcactgtaacctccgcctccggggttcaagtgattcttctgcctcagcctcctgagtagccgggattacaggtgtccgccactgcacccggttaatttttgtatttttagtagagatggggtttcaccaggttggccaggctggtctcgaactcctgacatcatgatccacatgccttggcctcccaaagtgctgggattacaggcgtgagccactgcgctggcctatttatttttgagacagggtctcgctctgtcacccaggctggactgcagtggtgccaccataactcactgcagccttggattcctgagctcaggcgatcctcccgcttctgcctccggagttgccaggactgcaggtgtaagccaccacgcctggctaattttaaaatttttgcgggggggctgggtgtggcggctcatgcctgtaatcccagcactttgggaggctgaggcgggcagatcatgaggtcaggagatggagaccatcctggctaacacggtgaaaccccgtctctattaaaaatccaaaaaaaaaaaaaaaattagcctggtgtggtggtgggcgcctgtagtcccactactcgagaggctgaggcaggagaatggcgtgaacccaggaggtggagcttgcagtgcgccgaaatcgtgccactgcactccagcctgggtgacagagcgagactctatctcaaaaaaaaaaaaaaaatttttttttttgtagagacaaggtttgctctgtcgcccaggctggtcttgaactcctagcctcaagagatcttcccgcctcagcctctcagagggctggaattacaggagtgagccaccttgcccggccctggggcttctttagacagcctgccagctctgggttcgagcctgctcttctactgcccgagtgcttaaccccattgggcctcagtctacccctgcccttcctgggcatcccatgagtgaagagtcacagctgactttagctccctgggcatggggacagcacagttcctgcctgcaagtcacgggggtggccctgtttctgttcgattgtctttaagcttgcaaatcgctttctcctccatgcaaatgattctctctggaccccggccttggctgagccagtgggctgggagggtcaccccttgctgcaggtgagaaaatagaggctcagagagggccgaggacttgcccagcctccccagaatgggggagttgctaggagtcaacttaattttttctaattaatttttctaaaaaattagtcacggggactctgcgttgcccaggctggtctggaactcctgggctcaagtgatcctcctgcctcggcctcccaaagtgttgggattacaggcgtgagccactgtgcccggctggggtcaactttattttattttatttttttgagactgagtctcactcttgtcacccaggctggagtgcagtgatgcgatctcagctcactgcaacctccgcctcccgggttcaagcgatgccaggagtcgactctagactccagatcccttctcggggctgaaaccatgggggtcccctggcccccaggaagagtccgaactccactttctcctgccgccagcccccaggactcagctggcgaagctgccgcaggcacctgtgcccagaacccctagcctgagtccccagggccctcttccgtgctcacctccctccgcttcctctttccttctcctcctgcctctgtgttgtgtgttggggcgtgtgcgcgtgtgactgtggagaacgctgtctccagtccttgtccgtgtgtctggcccctgccacagcacaggtgcatgttggtgcccctcacagaagcccaccctgacacacaaggccgctgcccacctccgggctttctgggatgcccgcgttgggctcagctggccgggggcattgggccatcggatggggggaacccgtgggctgggtctgcatccacccccagcggccccctgctcaggactgagggactaggctggagcccagaggccactctgggccagggggcggtggggggtggccctcgccaaggccaaggctctgactcggtccctgttttctgcacgccagatgagagctcggaggaggaggacgaggaggaggagctcgaggaggaggacgaggccagcggtggtggctacaggctgggtgcccgggagcgggccctgtcaccgggcctggaggagagtgggctgggcctgctggcacgcttcgccgccagcgccctccccagccccacggtgggtccatccctgtctgtggtacagctggaggccaagcagaaggcccggaagaaagaggagcggcagagcctgctgggtaagtggcagcaggtgggctgcggtgggggtgggtgggaggggcggacgccattgccccatcccacaggtgaggaaactgaggctcagagatgcaggtgcagagctgggaatgggcagaaccccagcctcgtgggccagccccgtgctgatcagggatgctcgcgacaggggccctggcctgccatctccaaggaggggattcttcgccttgcaaagggcgacctccttcagtctcacactgccagcaaacacagccctgttttgggcacttgaggggctgcgggagctccatggaggtccctgacccagcctggggtttgtgggggccactccaggttggtgacacccagtctggcccgtgagagagacgtggggttacccgagacacaggtgcaggggaaggaacagccacgtcacggtagaaagaagagagagcgcatctcattcagactttgtgggatggtgggggtgcggtctgtgccatgggagaacgggtgggacaggcctcatgtggcctgggcttgagcctggaggagtcaggtggggtgggcaggcaccaagctctctttgacttgcccacaatccagataggtaaaccaaggcagcaggcactcacacttgggcaggcagctggcgcttaccccggtccatgtctttcctgtctctccatctctgactgtttccctgcatcagggccctgccttcttgggaccctctcgtgggccctccctgttctcaccgggctgagtgccctcacacggacgcagctcacctgcagctggggtcagtgccggagatggagatggtcatgcatgtgttcaggctctgagttcccctggccccagcaggggagggtccttctgacccccccggcatccttttctgagccacagtaggggtaggtatgaggctctcctggcaggggctaggacaggaaaacaggtattgctgcccctgaaggccccccagctgcccctggcttcatgccctctgcaggttcgtggagcaaagccccacccctgacctccagtgtcttggaaccccatttgtggcacccacgccaggctccagaccctgccttccccctcctcgctctcatgccctgccattgtttgctgggctccaggcctggcagtcctggaaagaggcaccagggccccctacaaggctacctattcttaggtattcttcatacagaagcagctggagggtgtcttcagagtgcacacttggccaggccactcttctgcccagaacctccaaatggcttcccgctgccctctgatcagtgctacctgtctgacccaccaccatcagactctgattgcttggacaacattatcctgtccacagcccctaaatgcaccagccaggctagtactctcagacatttacacttgctattcatacaccccaaacatccatttcacccagactgcccaaggtattggcatatggtccaaattattcctttattctgcgttgactgtctgaagggtctgtagtgatgtctcctttttcattgctgatacagattgtttcttcttactctgtttcttggccagtctggctagacgtgattagtttcattggtttctactctttgttattttcttccttctcattcctttgggtacacaagcatgtcttggagatactgcaggattgcttccaaaccataaagcgaatatcacagtaaagcaagtcacgtgaatgttttggtttcccagtgcatataaaattacgtttaaactatactgttgcctattaagtgtgcagtagcattatgtctgagaaaacagtgtacataccttaattaaaaaatagattattggccatgcacggtggctcacacctacaatcccggcactttgggaggccaaggcaggaggattggttgagctcagtagttcaagaccggcctgggcaacagagcgagaccccatctctacaaaaaataaacagaaaaattagccaggcacggtagcatgcgcctctggtcccagctacttgggaggctgatgtaataggatcactggagctcgggaggtcgaggctgcagtgagccgagaatgcgccactgcactgaagcccaggcaagagaatgagaccctgtctcaaaaataaaagaccaaaccaaaagcatatgtttacactatcctgtagtctcttaagtgtgcaatagtattatgtctttttcttttttgagatacggtctcgctttgtcacccaggctgaagtgtagtggcgtgatctctgctcactgcaatctccacctcctggattcaagtgattctcctgcctcagcctcccgagtagctgggattacaagcacacaccaccacgcctggctaatttttgtatttttaatagagacagggtttccccatcttggccaggctggtctcgaactcctgacctcaggtgatctgtccgcctcggcctcccaaagtgctgggattccaggtgtgagccaccgcgcctggacgtaatagcattatgtctaagaaaacattgtacatatcttaaaaatagtgtattgccaaaaacgctaacgatcatctgaacctttagtgagttgtaaactttttgctgatggtgggtcttgcctcgatgttgatggctgctgactgattagggtggtggttgctgacagttggggtggctgtggcaatttcttagaataagacaacagtgaagtttgccacatcgattgactctttcaagaaagatttctctgtaacatgcaatactgtgatagcgttttacctatagaacttctttcaacattggaagcagtcctctcaaaccctgctgctgctttatcggctaagcttgtgcaatattctaaatcctttgtcatttcaacagtgttcacagcatcttcaccaggagtagatgccatctcaagaaaccactttctttgctcctccataaaaagcagctcctcatcttttcaaatgtctcatgacattgcaacaattcagtcccatctccaggctccactctaacttgagttctattgctgtttccaccacgtctgcagtaacttcctccagtgaagtcttgagcctttcatagttgtccgcgagggttggaatcaacttctttttttctttttttttttttttgagactgagtctcgctgtgtcgcccaggctggaatgcagcggtgcgatctcggctcactgcaacctccgcctccccagttcaagcggttcttgtgccttagcctcccgagtagctggaattacaagtgcccgccaccacacctggcagatttttgtatttttagtagagacagggtttcgccatgtcggccagactggtctggaactcctggcctcaaatgatccacttgcctcggcctcccaaagtgctggggttacaggcgtgagccactgcacccggcctagaatagtgaattctttccagaaggttttccatttactttgcccagatccatcagaggaatcatcatccgtggcagctgtagccttacaaattatattccttaaataacgagacttgaaattcaaaattactccttcatctatgggctgcagaatgggcgccgtgctagcaggcatggaaccaacattcatctccttgtacgtctccctcagagctcttgggtgacaaggtacattgtcaatgagcagtagtattttgaaaggaatttttttttgtgaacaataggtctcaacagcaggcttaaaatattcagtaaatcatgctgtgaactgagatgctgttaccaaggctttgttattcccttttttttttttttttttttgagacggagtctcgctcttttgccaggctggagtgtggtggtgcgatcttggctcactgcaacctccgcctcccaggttcaagcgatttttctgcctcagcctcccgagtagctgggattacaggcgtgcaccaccacatgtggctgatttttgtatttttggtagaaacggggtttccccatgttggcccagctggtcttgaactcctgacctcaaatgatcctcctgccttggcctcccaaagtgctgggattacaggtgtgagc

SEQ ID NO: 301 - DNA, 2958 bp, Homo sapiens
gatggaagagaaggggagcaagcggggcctggaggctgcgggcaaggctggcctggccaccgccggccccgggctgctgccgcggaagccccctggcctggccgccggccccgcgggcacctacggcaaggccgtgagcccgccaccatcaccccgcgcatcccctgtggctgccctgaaggccaaggtcatccagaagctggaggacgtgtccaagccacccgcctacgcctaccccgccacccccagctcccaccccaccagcccgccgcccgcctccccaccgcccaccccgggtatcacccgcaaggaggaggctcccgagaatgtggtcgagaagaaagacttggagttggagaaggaagcccccagccccttccaggccctgttctcagatatcccgcccaggtacccgttccaagccctgccaccgcactacgggaggccctaccctttcctgctgcagcccacggccgccgccgacgcggacggcttggcccctgatgtgccgctcccggctgatgggcccgagcgcctggcactctcacccgaagacaagcccatccgcttgtccccctccaagatcacagagccgctgcgggagggcccggaggaagaaccgctggctgagcgggaggtgaaggcagaggtggaggacatggacgagggccccacagagctgccgcctctggagtcgccgctgccactgcccgccgcggaagccatggctacccccagccctgcagggggttgtggaggtggcctgttggaggcccaggcgctgagtgccaccgggcagagctgcgcagagccctctgagtgtccagactttgtggaggggcctgaaccacgggtggattccccgggccggacagaaccctgcaccgccgccctggacctgggggtgcagctgacacccgagacactggtggaggccaaggaggagccggtggaggtgcctgtggcggtgcccgtggtggaggcagtgcccgaggaaggcctggcgcaggtggcaccgagcgagtcccagcccaccctagaaatgtcagactgtgacgtgcccgccggggagggacagtgcccgagcctggagccccaagaggccgtgcctgtactcggcagcacctgcttcctggaagaggcaagctctgaccagttcctgcccagtctggaggacccactggctggcatgaacgccctggcggcagctgcggagctgccccaggccaggcctctgccctccccgggtgctgctggagcccaggccttggagaagctggaagcagccgagagccttgtcttggagcagagcttcctgcatggcatcaccctgctaagtgagatcgcagagctggagctggagaggaggagccaagagatgggaggtgcggagcgggccctggtggcgcggccctccctggagagtctgctggcagctggcagccacatgctgagggaggtgctggatgggcccgtggtggacccactcaagaacctgcggctcccgcgggagctgaagcccaacaagaagtacagctggatgcgcaagaaggaggagcggatgtatgccatgaagtcctccctggaggacatggacgccctggagctggacttccggatgcggctggccgaggtgcagcgccagtacaaggagaagcagcgtgagctggtgaagctgcagcgccgccgggactccgaggacaggcgcgaggaaccccatagaagcttggcacgcagaggccctggcaggccgcggaaacggacccacgccccgagcgccctgtcgcccccccgcaagagagggaagagcggccacagtagcggaaagctgagcagcaagtctctgctgacatcagatgattatgagctgggagcagggataagaaagagacacaaggggtctgaggaggaacatgatgccctcatcggaatggggaaagccagggggaggaaccagacttgggatgaacatgaggcctcgtcggacttcatcagtcagctaaagattaagaagaagaagatggccagcgaccaggagcagttggcaagcaagctcgacaaggccctctccctcaccaagcaggacaagttgaagtcgcccttcaagttttcggacagtgctggggggaaatcgaaaactagcgggggctgcggcaggtacttgactccttacgacagcctgctggggaagaacaggaaggcgctggccaagggcctcggcctgtctctgaaatcctccagagaaggtaaacacaaaagggcagccaaaaccaggaagatggaggtggggttcaaggccagaggccagcccaagtcggcccattccccgtttgcctcggaagtgagcagctactcttacaatacggactcagaggaagacgaagaattcctgaaggacgagtggcccgcccaaggcccctccagctccaaactgacgccttccctcctgtgtagcatggtggcaaagaacagcaaggcagctggtggccccaagctgaccaagaggggcctggcggccccccggactctgaaacccaagccggccaccagcaggaagcagccgttttgtctgctgcttcgagaggccgaggcgcgttcctccttcagcgactcttcggaggaatcgtttgaccaaggttactagctccaaacacaaaataccttccgtgtttcctagcgagagagtgcgtgcgagtgagcgagagggaagcgagtgggcgcacgggagagatggtgggtgaggaggcccgtgcggatggccgcaagaaggctgccatctgggttcttggcagcgtagcctgctgttatcagccgaatgattttgatttttgctttgatttgtactgtatcattgtgataatatccccggctggctctttttgagctgttatatggactgcttttgagtctgcgtttctctccacttgccctcctccctgccctcctccccctcccccg

SEQ ID NO: 302 - protein, 868 aa, Homo sapiens
MEEKGSKRGLEAAGKAGLATAGPGLLPRKPPGLAAGPAGTYGKAVSPPPSPRDVAALKAKVIQKLEDVSKPPAYAYPATPSSHPTSPPPDPPTPGITRKEEAPENVVEKKDLELEKEAPSPFQALFSDIPPRYPFQALPPHYGRPYPFLLQPTAAADADGLAPDVPLPADGPERLALSPEDKPIRLSPSKITEPLREGPEEEPLAEREVKAEVEDMDEGPTELPPLESPLPLPAAEAMATPSPAGGCGGGLLEAQALSATGQSCAEPSECPDFVEGPEPRVDSPGRTEPCTAALDLGVQLTPETLVEAKEEPVEVPVAVPVVEAVPEEGLAQVAPSESQPTLEMSDCDVPAGEGQCPSLEPQEAVPVLGSTCFLEEASSDQFLPSLEDPLAGMNAAAAELPQARPLPSPGAAGAQALEKLEAAESLVLEQSFLHGITLLSEIAELELERRSQEMGGAERALVARPSLESLLAAGSHMLREVLDGPVVDPLKNLRLPRELKPNKKYSWMRKKEERMYAMKSSLEDMDALELDFRMRLAEVQRQYKEKQRELVKLQRRRDSEDRREEPHRSLARRGPGRPRKRTHAPSALSPPRKRGKSGHSSGKLSSKSLLTSDDYELGAGIRKRHKGSEEEHDALIGMGKRRNQTWDEHEASSDFISQLKIKKKKMASDQEQLASKLDKALSLTKQDKLKSPFKFSDSAGGKSKTSGGCGRYLTPYDSLLGKNRKAKGLGLSLKSSREGKHKRAAKTRKMEVGFKRQPKSAHSPFASEVSSYSYNTDSEEDEEFLKDEWPAQGPSSSKLTPSLLCSMVAKNSKAAGGPKLTKRGLAAPRTLKPKPATSRKQPFCLLLREAEARSSFSDSSEESFDQGY

SEQ ID NO: 303 - DNA, 271502 bp, Mus musculus
  misc_feature (1)...(271502): n = A, C, G or T/U
cggcgccttctccttgcttcttttttggggtcgtggccttgctcctgccctgcaagagaagcgtccagggctttcacgcgcaagtgtgcgcgtgggtcctgacgtgctcgtaggtccacgctccagactctgcggggacagaagcaggagccatgggcgggaccgctagcacccgccgggtcaccttcgaggcggacgagaacgagaacatcaccgtggtgaagggcatccgggtgagtgccgtgggcgggcggagggcagcctttgacctcggatcccaacgctgaaatgtgcctgggacagctgcacctgctttctccgctctcggcccgccctgctgtcccgctagaagtctgggtctctgggaagaagctcgtagtttcaagactccgaacctccattcagagaaagttcttggttgtgtgccaggagccatgcactgtgccggggtggtggtgccgggtcaccacggtcgtccttgctcactagttgcaggactttattaaaactcttgcttcactgtgctggtccgtgtgcctcctgtacaggacccaagcccttcttttccacgcacagttctctctcagagtgaattggtgttttaaggattactcttctttgcctctgttattccctgcccctcttctggtattaccattcaagtcattcctgaccctgctgctaatttctggcttctggctctttcccttccacctgataatttcgttttcccaggcgcctcccctgtggtttgttggcccaagttatgaacctgacccagttggactatacaggcctataactgccagcctgctaggggcggaggtcggtttgcaggccttcaaggttgtagaactgagacaacttctaagggatcgttatagagacttattaaatgccctctgcatgtacttgatacatgaactgaaaacttgaatttcctctagggcgttagtatacacactaacaactttaatattctcctttgcctcgactttggagcttcatgctttgggaagtacacttacttgtatctagtaaatagagcactatgacttcagaaggttttagagtactttatattttctgtctactgcttttacacaactactcttaattaactatgtaagagttacaaggaaataaaaacttaaaaacatttcaactgcttgaaaactttttcctttgaaatttgttactttgaaaagaacttattaaagttttattgattagaaaccccagactgttgaactgagtttttgagtctgtgaccagcaattctcactctactagtgatagagccctttgcctgctgtggtttagttggtagtttttgtagtaagataagaattactgcatacttgagttttgtacagaggtggagggaaaaaaaaaaaccaaaaaagaaaggaaaagaaagtcgataaaaggcttagaatgttgaaaacttaaaaaaaaaaaaaaaaaaaggaaagtaaatttcagatgaaaaaactgtttagaacaatgcattaagtctttctcctcatgtttcatcacagacaggccagtgacacaaactgtatgagtttgggcacagcatagagatttagatacaatatcagatagggtagagtgataggcagggcaacagggatatgtattccattcaagtgataagattgttttaaagagcttctgtaaactttaaaaacaaaacaaaacaagaaaaacccaactatgtctttcagccatacaacttgacataaatttcctttttcagatacattttatttctgttgttacagtcctggcccaggcaggcttattttgatttgtacgcagctcttcttcaaacacccttggcaaggttctcctctgcttctggtcttttcaaggattgcctgtaatcttctccagcgttctctccttcagttttcttgttcttcagactggtagagctgcgtacatctctcggatctctattgttttctagctcacaagtctcgtgggcttcttgacacggtcagattgttatttttttattttttattttttgtttttgtttttgtttttgaacaaaatatagcttttttgcagcttttctcaaaactggtatgttgttgaattgggaggacttggagccattttgggttccttgaggtcatggacaggagaaagccaacttggaattaagctgacatttttaattagcctgtggctctggacaagtcgcttctctgatgcacacccttattcctaaagtggaatgttatcactttctttggttaggattagaggataaggtatgtaaacacctgttgattatcatcattattattaattattatttgaggtgctgggaattaaacttaggccctcccatgtgctagacaagcactgtaccactgatctatatatttccaagctgctttgtagatttataaataagcggtcatcattatggtagggttcctttcacatttaaaattacaaagttctttgaaagagcattggaatcaaacaaatctgggttcagatctttgtaggatttagtatagcttatggcatggacaagttatctttgattgcatttccctctctggagtttcactgtaactgcatattaatgtgtgtgtctcctgtgtgtgtgtgtgtgtgtgtgtgtgtgtgtgtgtgtgtgtgtgtgtgtgtacacatagtccgctaaagcttcaacccaaaataactaaacaggagagcatgttatactccagtgagagacccgcacagggtagactgagcgctgagatcatccattccgtctgagccttgtaaacgtctcatagctgcccttgatgcttttcttggctttgcttttaggcacgacagcagtattcttagcgtgaaagcaaggctttgtcttcaggcagttgctaaaacatggacaggtgaggcccaaacttcagttttggattttatggcttaatgaaacttggctgaagaagcgttttccaattttgatcaattttataatgtttagggttccgtttcattgacgaggatagtaatttcatcttcagttatcctaataagaatgaatagcatttagtgagcaacagaaaactcactaagtacgctgagtttattgatagatcatgagtatccatattttccttgctgaggtgcttatggcttgtactcaaagggcctacaacttgaaacagtgtcaagtttcaagtttcttcttgttggcaggcactacttttttatggtattatatatgctctttttcccttattctgagctgttgctagtgtttttttttttttttgccctctgtaaaacagcttgtattcttaatacctgatttcaattttgcatatggaactactcatatgaactgaatgaagaattgccctcttgccttgcactctctctaagtctcaaataaattttctagtgatagaaaaacacatacttttattgcctcacattacatgggcttaataggatttttgtgtccacctgctgtgcctgcttagaaagtgtgctcagaacccggcctttcataactttatctaaaacatcagagctgtgagtgaactctttcagagcaaatgtcaacttcaatgagtatcattttcaaagttatacttatcactgtttctggcataacgaatctctgcagctggccttgaagctgcaagctgacattcacaggagtcactcagagcaccatgcacaccttcgtgaaacacaccatgtgctttggcagatgatggtagtcgagagccccaaattgaagagatttcttaatgtgggatgctgtagagtgttcttcagtgttagtgagggttatgcatttatttggttagtcatagggactgagtgatttagttagctgatagagaattggtcccttacttacagctgtagggtctgtgaatgtcttgggccatcttaagctttctaggattcagaatacagtagcaagctacatgtgaactgaaaaggagatgttttacagaaatgagtctttgtgttttccctgccatcccatttcacctcttttgtttatgggagtcacaccttaaaaaagtagcagggagctagtgctcacagaaaatgacctgttcctttgtgagggaaaaccaagagagaaaattgcatcggtattctttaaatcaatttgataagaaacatctaaaggcatctaaagaactgttaggggctgaagttgtaaactgttcggtgtcatgtgactcccacatttaccacctcaaagataacttgagctttcctctcagagggcagaagactttatctttgttcctcttactcagcctcctgtatctgaagaaataccgagttctggatcagtgggtggtatgtttgtgtaaattttggataagaccaagcatagtgggtgggaagagttaagtgggtgactagctgatatatatataatgctctttggaggccacagtgtgagtcaaccactggccaagctctgcctgcttaactgtctttgaatagggtaggtagacagagtgagccagctaattctgtcaaaaggcctgcttgtctgatcgccccgtattgtaattgtggttctttagatacataggccactgtgaattttataaggtatggactctgccttcaacaatacagtgagcacacagttttgtgtacatcgaattaatccatggactctaaagtccagaggcctatgggtatagcttgtggcatcaataaatgtgtagagggctgttacttcacatttagtattgtctagatagagattccaaagacacctggaaggtaagtatatcagatgggataaggcttttctaacggcagagcccttttttaggacaactatgtttcctggagagtttcctcttattgaggctgcttgtccagctcttactgaagcttatgttgtgcttttgattcctacctctatccaactttgggttggtttccatcacagagaagaagagctcagctgtttacagctacaggttgtgtgtatcaccttggtcagcatctttcagtcttgtctgctgccttacaagtgagtgcctcttcccagaggagatcaggtgagacctgagtttacagataagactgcagagaatggctgctgtgtttgtataacctgggacagctgacagtgctcgagttgaggaggattgtagccgcaggctaccagtgcaccttcaaggcccaggcccaggaattctgctgtagaagaagaaatgaagcgtgaccctgaatcagccaacggtgcaacatgcaggattatcagctctgtactatgcttatcatggattctttggataacatatggtacatttatgtgcttggctatgtgtaaccataacctaccctgagaaatgtgtggctggcgttaggatagcgttaaggagcaaatatggaggcatcagagaaaccacaaacccaacaaaaaggtaacaaatactgctgggttgaaagtcatattctacttctctgtcccaaaaagcccagggaaagaaaacccaatcccttgcactagtgactctcaacccatgggtcgatgaccctttcccaaggttcgtctaagtagatatttcattatgattcataatactatcaaaattacaattatgaagtagctacaaacgtaattttatggttgggggtcaccacaacatgaggaactgtattaaggggtagcagtattaggaaggttgagaaccattgtcttacacacccctactaggacccaaacagacgctggtaagagcttccgacgacatcctcagcccctgtggagaaggagctccgtggtaagtttaggcccaggtgataagagtgaactagaagaaacaagtctgtggctgtagctatgagtaactgccaggtagtttatggtatactatagtcctcatatcccacagtggccaaaactttgacctcccagacaggggaagtgaggtggctgtcttaactgagccagctgtttctgtttgaagggcaatgctttgaggctgctttagggatcgaaaggacttttgtagttgctatagaaaatagtcagtatacattttgaaggggaagtagatggtgtaattaaatgcaaaaatcagtgtttatagctaacacttgagttttggcttatgttgctgaccagtgtagttttaattttgcaattctttgatcttgggttgaaatttagaaatgtaaattaaaatgtaaaagttactgcatgtgtaaattaaataaactgatgaactttacataatggcttatggtaatgataatatgtaatattaccattttttttttttagttggtgaggatcaaacctagggctttatgtctgctaggcaagtgttctactattgagctctggtcccaacagtacagagttatgtagaatatattgtaacattaatatattgttatgaaatatatgctacatatgaattaaatgtattatgtatcggttaatgtaatatatatcatttaaactagccctgagcttcagaaatgaagacccatttcctcccatgagagggaacagtgtgctctcaatgtatctaggaagactgatgggttctgatgcttccagagctgtgactagaggttggggcagccagtgctgggctttgcacccctgtgactggatgttactcagagtcactcgggagtggggagcattggagtcaatgttaacaaagccttttcagccttgtagatgaatttcagaaaacatgaagccatacttggggcacatgcttctctttccagtacatgggaagtgaaggcaggagggtcaggagttgagggtcattctcagctacatagtgagctgaggctagccctcaaaaaagaaagcaaaacaagacaagcaaagcaggcaaacaaagcagtaacaacaaaaaaacccaaccccttcccccatatgtgtgtgtgtgtgtacacacatatgtagctggctctgctggggatgtagctctgaggtaggcttggaggctcatgttcaacccctagaatcacaaaacaaaataaagcaacaagaaaaaatgtagctggctctggtttcaggagatgaagcctgttgctattcccttttctcatttgcctggtggtctgagagaggagatggcctttgtctccagggagcacagttattgagagccatcctcccttccttatctcacttctactgtatttgggccctgagacagaagtaccggttaaggtatagacagctcatacaagtgtcccaggagtcatgaggcagcacttggtgtttggaatatttgttgagtgaatgacccagtgatctacaggagctcagcgccatgagaggtagctagggcgggggttctctgttagtggggcatttgtaatgggtgtagtggggacaaggaaccatagttctgctaggcaggtatggttggatggaatgaagaattaatttggtgagtgattgcttttggatgatcaaaccaggggtcttgaggcaaggtaacagtagcagaaataacactatagctacctgtgcgtgtgacgtgtaaagggagagactagacgttaagcttggggaattagcaaatgagacgtgagacgagggaggaagtcgtggctaagagaataagaagtgttaaaggcaggccctttatgtttcggggtcccggattgaaacagtggcattaactaggaaaaaggaaagcggaggaagacagtgtgacaagcacaagttctgtttcgtatacactgggtattaggcgtttctgtctgccccagggtagctgtctagtgagtagttaaacatgttttttcctggctttcaggatgctgggctttagaattcttgaatttatccacaacagttaagaagggcttggcgggctgtggtagcaaaagtctgctatcctgcactagggaaaccgaggcaggaaatgaaatgcagagttaatttggtgagtgattgcttttggatgtttaaatcagaagtcatttgctaggaataccatgagcacatggatgataagagagtgagggcaaagaacctagtcggagacctgaagccccaaggcccagcagcagaggcagagaaagccctgcgaggaggggaggagaaataagacttgctagagtcctctgaaatgtgtgcagtgagcggtcagaaaggcactcgattcgggaagagggcagtaatgacggggtggggttaagtgtgaaagggaagccatataggtaaggtgctttgcaaatatatatttgtttttataaatacaaatgtacaggattaccactggtgccttttaacagtgcttatgtggttatactgaaagtagccgaggaagtgaggttagaagagcctcagtatgcaggagcattaccctgttacctgaccccagagccccaggtcctcagtgcctactttcacttccttgtcttatcagatgttgagtgcgatgttgaagagggatatctgatagtgaccttgaaacttgcacttgttgagttggaacagctttgctgctgtgagactctgtcatctggggcctggtatttgtctggcagtacttttttctcacttacatattagagataatataaatatttactatacaggcttgctaaggactgggtgagtgaagcaggaggatggtgatgtatgtaataagcacaaagcccatttagcagttttgaatcctaaataccttgtagacatttttttggtggggggagaggggtcaagtctttctatacagcccagactggccttgaactgttcctctgttatctgcctctgtagtgttggatttcaggcatgtgttaccatgcaaggccctaagtatcttttgaatgtgttacctattgtattaccaaaataatacccctcccaacaacttcattctagaataatttacatgtctggaaagtagactgttcaatagttcttagaataagcactatgctatattgtaactttttaaggacattttcctaatctgagtaagatcttgagttcttttcagtttatccttaacctctgcccttggtaactctgttttactgatgttttatttatagaattgccttttctgggggtttcatgtaaatagactaaacatagccaaatgtggtaacctatatctgtaatcccagcatttgggaggtaggtgcaggaggcttgaggctaacctgggctacatagacacttttctcaaaaggaagtagttttgtaatatgtggtcattggtgtttagttttatgttttttttttctttttgggtttatacatatcatattgtagctcttactgaaacgtcattcctctttattactgaaatgtattctattctgtgaatacataatgctttgttgatccattcaccagtaaatagccatttgtttgtttccactcctgctattgtgaataatgcctgtatgcacattttgtgcaaggctttgtgtggacatatgcttaatagcttcttaattggtcctttagtctccttcaggggtccttcttctgttcttatcctgcttcaatctgttgtctacactgtagccagagtaatctctgaaatgaaaatctgattatgttattaccctgctgaaaaccctcagtgcccctgaaacttagtttatactaagctcaaacttcatttcccaagagttttaagatagaaaatatccacctttttctatatcctctctttcactatgcttgatcactcagtcactcagtcactcactcagtcactcagtcactcactcagtcactcactcactcactcactcactgattaatgtatagtggtcattcattgcctaatcattgtacttttcattcttattgaatctggggatatagtgataggacatcaaaacctttgctcttttgtcatctttttctgtagtgggaaaggaacacagtagtgtcagacattggtaaaaactatcacgaaaatacaaaagcataatgagtagtgaccatggacctgtgactcaaatctgcaggctggagtgttccccagagcctccggcctgttgccagctgacaacttgatttctctacttggccgcgtctagtggtggcagccatatttctatacctaatgtgattctttgccccattgctttcttttcctgagactctttgcgtctctacccaagccccataccctcaggctggctggatgcctcaccctttttgtgtctccaaacttccattataggctggcagtactcttcatggcatacttaaacgacttggctctttattccacttctctcttagcagcttgatggttttgaattctccaagtctagtctatttttggcacagagttagtgcctaataaaaactgttgaaagcaattgtgcattcttagccttgaacacttgaacaggagggagggagggaggaagcagaggaggtgacagagagagagagagagagagagagagagagagagggagagagagagagaagggaggaacaagctgaggtctgttaacacatacatacacacacatacatacatacatacatacatacatatgtatttactaaatatttactgaatgaatactgaaggagttctgctgcttgatttttctctgagatgataatttagtgcacagcagaaactaagaaacatttgcaataagcacttagtagtacagtatagtactaaataaaggagtagtgctgtgggcgtggcctgtttttgcttgtgtgagtctagttgagcaggccattcgctctgcagaatggtgcagatggggattgcttggatgcagtgcactgtcctgtctctgtctcaccacttccattctcatgtccccttttcagctttcagaaaatgtgatcgaccggatgaaggagtcctctccatctggctctaagtctcagcgatattccagcgtttatggtgcttcaggtatggtggcattcttattttagggcttttcattaaaaaaacctaagtagagaagttgactcaggaagtcaagcacagttgctctttgccttttggtatttggatgttcagctttttttttttttttttttgttggtttttccagacagggtgtttctctgtagccctggctgtcctggaactcactttgtagaccaggctggcctcgaactcagaaattcccctgcctctgcctcccaagtgctgggattaaaggtgtgcgctaccactgcccggcggatgttcagcttttaggctgaatgttaaaaatcattattagggtttcctttaaaatgcttagttctgctttcaaacttgtgaacttttgtttttctcatccagctcctaacctttttgctgacctgtgtgctcatccaacaagtatttacaggcacctggctgtgtcggtgtccggtacttccctttcttctcacctgtagacagacccagctcgtgtttgctgggctacatccgtagtgctttctcactgttcctggtactgcctgagtaatgaccgccatgctgctgattgtgaaatgacaagaacaatgtgggagtgattacttttggatgaagaattcttggaggtgctcatttggctacaggttataaaagtgagaaagatgagctgttgtgcacatgccacgtgggaggagggcaggtgtgagtctcaaactgaccattgagttggcaacataattcgagcttctgataccgagcataatcagtaacaacagcttagtaggagtgctgaaccatcttcatggttaattgccaaggtgaaaggcaagcacatatccaacttaagcctatttattcttctccagacctgcggttttgccccatctttttcaggaaagagcagatcgtcagcccctaaatgcagctgcatgtttctttttcttttttcctttcttgttacattcagccactatccgatcttgtcagcaatctgtctaaaatgcgttcgaacacatcctttctggcccatctctactgctgcagtccagataactgtcatcttttatgatctctgcacatagcccatgctgtgctgttcacatagctgctttcatggtttcatgagaaatgggaaccagctcacgccatgactcaggtgcatctctgtggggggtgatgtggtgtgacctgtgatgcactgtgaccggcttctgccttcctttcagaattgtgtcctcacttacctctcgcccgcctgctctgcttgcttactcacgctggaaactcatggcctctgtccttatctgttcacggggaagttcccagctcctagggtaatacctgcttctcagtgcatgctgagtatcacctgttgaattcaattaggaaaaagtttattgcatattttgaaagtaaccacttttgatcattttagggtctaattttataaatctaggcaacagttaccaaatgcctgcattacaaataatgaagctttttgagttgtttcaaagagcttagatttcgtgcatatataactaaatgcctaataatactgtaaggaaggtagaactagacctcaaagaaacaacaaaccctagaagatgttgaaattaatgttaaatattttggtttaggagtaaattttgatttacgcatatttctgaatttgtaacttgttttaaaattggattggttctgctttcttcaggcaaacactgatgaagtgacaggtaagaaatgatacttaatagccaaggagctaaagggatctgcaaccctataggtggaacaacattatgagctaaccagtaccccggagctcttgactctagctgcatatatatcaaaagatggcctaatcggccatcactggaaagagaggcccattggacttgcaaactttatatgccccagtacaggggaataccagggccaaaaagggggagtgggtgggcaggggagtgggggtgggtggatatgggggacttttggtatagcattggaaatgtaaatgagttaaatacctaataaaaaatggaaaaaaaaaaaaaaaaaaaaaaaaaagaaatgatacctaagagtggtgctaagtcctttatcttttacctgaccttattcctaaaaacctccaagaaaggagctttattctttatgcagaaggaagccgaggcacagtgtggtcagtcatttgacccacagtcacacagccgccgctgagcagcagagctgagagttgagttcacccatgtgactccagagtgcaccaatctattttatgggtttgcacgacctcctgcttcttttgtagaagagatgtgagcgaaacttggaggaaggcaggggctgccttagctgctcttttgggctcaggagagaaccctcggtttctgagtgtttcttcaagctcccgtactgagtctcattctgtaatgagctgaaggagagaaaatggtttccttttgcaattggctttaaaaaaagaaattaattaattggtatgtgtctgtgtgtgtgtgcgtgtgtgtgtgtgtgtgtgtgtgtgtgtgtgtgtgtgtgtgtgagagagagagagagagagtgtgtgtgtgtgcgtgtgtgagtgagagagagagtgtatgtgtgagagagagtgtgtgtgtgtgtgtgtgtgtgtgtgtgtgtgtgtgtgtgtgtgtgtgtgtgtgtgtacactgtgtgtcatagcgcgatggtcagaggataacatggggtcgattcttttctacctcctttacttgattctgtggttctggtgattgggctcgggttgtcaggcttgcagggcctttacctgctgagccgtcttgcccctgcaatcggtttcttatactgacacttaactgagacagttaaggcgggcctgctgacttctgtgagtgcccatggcatctctgacccaagagccaggcatggatggtatgatgagtttggctttcttgaggaatctgtccccattccaggtttgacatgacagtggactgtggctcctgctcagctgtgaccatcctgggtactgaggtcattaaggactaccttgtgatcagactagacttgtttgcactaaagagtagccactagttacctatgaccattaaaaattacataaaaacggatgaaaaggagatacatggaaatgtgtttctcaggtacactcagttcttacaattcataattcagatgtgtttggaaataatttttcaagtctacaaaagaatattgatgaaaatgttactagctttttctacatttttcagtatcaagtaaattatatattaaatgtgacctgaatttttaatatttattaaaatgctttctctctcccaggattttttcatactagctctaggctattcatatgtgtgaatctagggcagtgtatttgatggactgagagctgtaggatttctgagtataaaagctaagatttgtcaaatatgcatatatgtaaatataaatatatttgtgtacatatatgtatatatagttggagattataatttatatgcaacaaaagtagtcttttttaaggctgaaacttctcgtctcttctcttctcttctcttctcttctcttctcttctcttctcttctcttctcttctttttttcctcttttttttgagaaaccttgaaccagatcagtgactcgttgcaataagtatttgcatgtaaagctgtttgggcaaaataatatagtgtgtgacacacagcagattgctacgccactgtaataaatgaatgtgctccaaaggacttaactgtgtccttgctgcctggagttctgtgctgcaaatcacaactgtgttgacttgcttttataccagctaattcttttcttagctcggtgccattgtgcgcagttacttacctttttagtatcatcttgcatcttttgattttaaaaatcattgtttattttcggcttttcttcccttcatcttgatctttgagttttgctggcttgtggtgaggtcagacctctcatgtttgatcctatccactcctaagcaactgtttccagatcaatatgagaaaatcagacaggaaatggtattaggaggctgtttattggtttcttaagtcactggcaacctgatgaaaatgataaatccaggaagaataaaagacaaatgagctcattcttattattatcttcaccgtgcaagtttctctgtaaatttcttgtcatcgtgaaaaataggaaagatttcccgattcgtgttaagcgtgttgctgagatcactaagtatttggcagccttaacaaactgcaggaaaccaatctgagcaggaaatagcacagcccaaactaagcagccaatttagggaaacagattcatctatatgttgtatgcgttttttttcccagaatatggctcctttagttattttaaacagctctttaaggctcatttagacacaacactgtagggaaagttcaaagtcaaccagttttgcttactgctttggagttttcacatttgagtgaaggtgcagtgttgtaggtctccatcattcatgtgtgaaaccttgtgtatgccagtatcatggataatttgcccaaaggttctaaagcatcaagtctaatctctgatgagcacaccctgcacctaaaagatctgtaggcagtacacacgagcgacgaaacctcagagctcgctccttctgtgaacacgtgttggtatggcagagatcttgggccttcaaagaccaatttggtcaaatcatagttaacatgatgcaggatttctgaggaagtaaacaatatgcaaatgagatgagagtgtgcacccaaggctggagggcgtataggaaagaaagaagcagggcagaagtgtgacttgccatgaaggcatgtggacttgaggcagacctccaggaaaagggatctgagggctcgtaatatggcaggtaccccctgtagagtcagtgatagagcagattgattctgatgaggtttggggcctaaccagtagggataggctggagaagataaggagtttcatttcgtccagtgtggtcctggcaactactgaagagttccatctaattctaaggtacaagattaggacatctcattagttgcttccttcttcatgaacttccagatgttaataataaagcttttttatttattaaatggttcttatggttaaaattaaagtgattcttttcattgatatttttatatttaacaaagaaatcagggtggcaagaatatgtatattctaccattgtgtaaaataagatcattttcctgttaagtgaaaaaaaaaaggctttttttttggtccttatttggcactgtaaggaagaagaaaaagaatagaaatgtcctcaactgtgtgaagccgtgagggctttaactgtgtggcactacgggttttaacagatgagttttgagcaggtgaagtaagacgagtttataatggagtggtttgaatgaacatggtccccataggctcatgtgtttgagtgcttagtccttagttgtggaacagtttagaaagattaggaggtgtggctttgtaggcggagctgtgtcactggggatgggcattgaggtttcaaaaaaccaagcccagccaagtctcgctcattcactgcctgctacttgtgggtagatatgagctctcagctgctgccccagctccatgcttgcgtgcgtgctgcagtgctgcttggttgtgtgctaaccctctgaaactgtaagcaaaccccactgaaatgctttcttatgcaagttgcctcagttgtggcgttttttttcccagcagtagatcagtgacagagacaagtggtttcttggcaggataaggaaagggtgggttggaaaccacatgggaaagggtctgttttatgctctttgtagatgtagtatagtaaatcctggggccttgggacctggtgacctgataacaaagctgtatggctgggtcatgatgatccttgcttcagtccttatctcctcatctggcccattcaccttggtgttgtctgattcattactcttggctttgcattttcttctaagaaaccagcaaaagcttaaaaccaatttatctgaacatacaagtaagatgtaagccttttaatgtagcagccaatccctggctaggacatttatatattcaggacagtctgaagacagtgcaagagggttcccacacacgatagctagagtgccatagggaagggaatcacagagcaaagcttagtactttctggaatgtttctgagtcatactttgcagttgttccctgcctggtgatttcctgttagtgtattaactgttggctctgctgcttcttagtaaattttaagtggtctctacctagagaccagctctgtgtaatttaccatgtataagtgcctataggtggcatggggaccagtggcttcctgagaagcagcagcagcatggggtgcctggatgtgaagattgagcgggagtaatggcaggagccacactcctgtatctggagttctgtcagctacttgctcattcaaggactataggaaaaagaagctattttaagagaacaccctatttttgttacagtagattttggatactaagtctacagtgattataagaatgggttgtgttttctcagaactgtttgtggataaatcatagaaattattagaggcaaaaactgtaaagtaggaatttgtaattctgtgtcgagatttataaaatgcaagacattgtctgtataaactattcttttggagtatggagaataaagaccaatatatagaaatgctatctgacaaattttatatgccagttgtaaaataaatgcctaattaacaatcttacagtatttcttggaatttgacagattttatagggcatcattgggaaggcccagatctcttagaataaatgcccagtggagtttcaaatgtacattttcctaatgtatgtggaaatattcaaaataaatccattcactttccagctgtcagccaaataataggttattgttgttggtgatgtttttcttttaaaaaacattttaaaaacaaggtgatatgtgacccagaatcttccttctccctgttccctttcctgtctccctgacagtccagctgtcgctgaagtgctctgtattaggccatgtccctgctgcttgggtgcaacagtaactgtttataagttttcttttaaacctgttctatccctagggctactcgacactttggtgacagctgtcacagtactggaggatcttgcaaggccttgggagcatacttgagacaatttcctggttcccttgagtgagtggatagttgattatgtgctctaattagctggcagccaatggttggagcctgaaattacttggttgcaggtaacattgataacactttggttactgtaaaggtggaaggtgaaggagcatgttggcctctgtgtgtgtgtgtgtgtgtgtgtgtgtgtgtgtgtgtggggtactgaagtacatggtctcttgaagccagactgcactcagggtggtggtggcacttcccagctttatcacactggcagtagtgctgctcttgctctaggcctgctccgctgtcattgccatcttgaggacaccttgactttctcctcttgagtttggttagaagctccatagctttcttctatgttgtctgctttctaatgtcaggttctatggtttcttccatcatggtgtcgctgctttagtctggccagtcatttacccctgctttgctcaaaccatcttgtgcttgtggtccctgccttcagccttgcatttccctccctgttctcagcgtagccctagaaatctttcatttcgatgaaaccaataatgccattctttggttgaagatgtgggaggctcctcttccctcttaggaggaagtctaaatctacaaccatcatggtcctgtaacaccctgtggcctcggttagttttttctgtcatctcctagaccctcctctgtcatgcctaacttcttttcatgtagccagaattgaagctctgagtgtccttgaacttgtccctttgagggtgtggactgtgctgttctgttctgtctccgcactactcccccaactgtgaagcccactgcaccccactccaccccaccccactttactttttacccaagtttatcaggaggagtcctacataccgttttagatttcttcccagaaccaccctgtgagtgatcccaggctggtaaccaccctggtagaccccaggctgtggacccacagcctctgttgtacttctcatgtatgcagcatctcatgtgcagttccctagttgtactttgattagtctctttcagagaatcattgttttctcctctgttctatcaggacctccttgagggcacttgcttctgggcttccatggcttcagtgttgacagtctgtttgctgagcagggtagcagttgcagagctgttgtttgctgtaggtaaacactgacctattgatcctgcacttaggctaaaaggcatagaagaaagaaagtctctgagagtctgcaaggttcctcagaagccactgactcgtcttcccagactagaccgcccaaactgatgatttttaaaacacctccttttggctcataaatttgatttatccttgtcagatatatttcattgtaatgtaggtatatatgtgcttgtctcttttacccactgtgtggttaaaagcctttgagagcagagactatttattcactgctcaacttctgttctcgcagctacaggactgcactgccagctgttcagtagcagtttatagagtaaatgggctgaaacaagccagaaaagtgaagcctgatgtgtaggtcgatgtgctagtgagagtcaaggaggagaggggcctttcctttgggttgggtctggtgggaatggatgtgaggatcttgcccatgcttgggatgatactcacattcttcagtttcaggtctcagctgtgcaaggactccctgttgaaagaggtgcttagaataccatcttaagaaagtgggcttggggcagtggcaagaatggaggctgctgtggggagtctgctcccactcctagttattgatttggcttgcaaaggaaataatcataagcccagacttgccagagtatgaaaggggctggagcagggtgttgggttttgggtcgttgtgctcccagctcctcctgtactctactttttttccttcatagctgctttgctgctgggattttggtttaggttagtgtcttcattaggatttccactgctgtgaagagagaccatgacctcagcaactcctataaaggaaaacatttaaatggggctggcttacagtctgagaggttcagtctattattatgatggtggaaaatgtagagatgtgcaggcagacatggtgctggagaaggagctaaaagttctacatcttgatctgaaggttgcaggagactgtgagccatactagatgcagcttgatcataggagatctcaaagcctgcccctacagtgacacacttcctccaacaaggctgaacctctgactagtgccactccctatgtgacaagcattcaactacatgagtctatgggactgtatctgtttaagccaccatagttagcttagtgtgtctgggcctagaggtcagtaaccgtggctgttttctcaggaccaggtcctcatgttttcttggggctttggaacccttggaaattaagtttgcttataccataccttcttgtagggctttacctcggtttatacttcttttcctggaaggatagattatctgccccctctctcgaaacccctaggatagctctctgaggccttgggcttctggtgtcctgacataggtggaaggaaggtctactgctttttgccagcttaggccaatgtgttggagctagggagactagcttccctgtgtagtcgaacaaatcaatatctaaatgctaaataaagaaatcacccaagagctagagagatgactcaggggttgggagcattggcttcttttccagaggtcctgagttcagttcccagcaaccacatggtagctcataaccatctgtaatgagatctgatgccctcttctggagtgtcagctacagcatactcatatgcattaaacaaacaaacaaacaaacaaacaaacaaatgtgtttaaaaaaggaaagaaaaagcaacaaacaaacaaaaaaggaacagagaaaaaaattgaaaatattaaaagaaagaaagaaagaaagaacccaaaactcttatatgctggactgttccagattggttttgctcagcattttcttttagtaggtacatttaatttatcagatgtaattagtcttgctgttgacataatggctatgtaatgactttaaaaaataagataaaatattgattgctgtaggctgttgtttttcaggatagaccagaggaatgatacagaaatcaattactgtgttcaggatcattttgatttaaatcaaaagtattaaagcagaatttgatttcagtaactcctaaaacattttcattgttttgtcatatcagctaggttatagatgctgaatcttgtctgatgattcacaccaatttgcttttttttttctgagataggttacaatgtagcccttggtagcctcaaaatttgttatgtatagctggtcctgaactctgcctcaatccttctgcctcaatctcccaagtattaggattataggcatacatagccaggtctagctttaaataaattatttaacaaaatagcgttgttttagtggactgttctcaccagcactcagcatattccctgtggaacttggctaggctcggtgcgtactcttgaagccattgtgatggcagtgccatccatggcagccaagcagcagcagcagcagcagcagcagcagcagcagcagcagcagcagcagctttcatgtaattatgtggaacagcatggacataccaagtactgcttgctttacggaacatgctcacttctggaaatcccatgggattgaagccatgagctgcatttgtgatatcttttaaagattttgctgaaaatgttactttaatattctatcttggaaactttttagcgtgattattataagagtatgggaagtcctcttttcatgattattctttgacctttggcatactttattagttttttaataaaaaaagaaaaacagtatataattaaaaatacttttatgaagcctgataagcatatacataataaattactttctctaattattttttcctgtgctattaaacttggtatctttactgacatagcctttgtttaataactgtatctttttgcaaaaaatggcaaagaaaaacttttaaaaatggacttttaaaaactgctcagtttaattgctcattaaggtttataggactttgaattgaaagtttttgagaacatactatgttttgattgaaaactgtcctattctttctagtcaggtgacattgaactgtcagagacctcccgggcactcagacctttagcatcttttctgatgtccttccaggttaactagtctcaggtgcagaggcccagagaggggatcatcacctggattgctggttgccatgaaatgtttttgtgtctcaaaaacaggaccattgaggaaaggagcccaaacctttcaatggaaaacaaaaggcagtagatgaatcgcctctgaagagaggagtgtggtatgtgttgagtgttcagagagcctctgccacttaatagtcttaatagttgtgtgatcttgggcaggttgtctcattttcctccagggtaaaatggagagactaatgccattttcacatggttgtcatagagactaaatgggataatgtgcagttgttgaaatatagcaggagatcaatagaaggctctttccccctttgttacacagcagccaaggctgcaacttcactgccaccccttaccagctctaggttgacccttgtcaaagtgaatagcctctcctgcctacccctttgcctttcactgggttttcttaccatgttctagcaaatgcttttgtactggcagtatcaggtattgtggtaaatgctggcttttagagatgatcagagtggagcactgcagtgcgagtcagaccggaaaacaggaccagtcaaggacgaacacttcctggagaaggcagagtataaactccctgaaagaggtggctatgttgactttgaatagctaaggatgatcaggagtttgcagtcagacatgttgattttggtggtagaggatcgaggtgagccagagggatatttcctgggtgcagaaatagtaggaaatgtggttggaactaagggcttggggatttctctgatttgtaactatttgtgttgtttttgtttttgttttgaaatgcagatgcttaatgggagtggcaggcacaagtagtgccttgtgccttcattatgcagtaaagctaaggagtgtggattcgctcccatgggaaatgctgccatcctcacatctttagattcagggacggagggagggaggagggagggcaagcgtacgcgtgcaacacagacacatagacacatacataaacacacatacacagagagagagagagacagagagatggagggagacagagagagagagagagagagagagacagacagagagagacagacagacagagagacagagggagacagagaggcggagaagaacatgaccacacttcgaaggttgttttattggaatgtcttttgattgtaattgtcacctaaatttatggtgtcttatgtctttgttgggaattctatggctatgacaaaagagcatgaccaaaagcaacttggggaggagatttcacagtgtagtccatcatccagggaagtcagggcaggaactcaggaggcaggagctgacgcagagaccattgaggatgcagcttactggcttgtgctccttggcttgctagcctgctttctaatacccgcaatgagacctatctaaggggaacacaccagtaatagaatgtgccctcccatatcaatcattaatcaaaatatcccacaggccactctggtggggactttttcttagttgaggtttgtttctgtttcacaaatgatttttgcttgtcttaagctgatataaaaactagccaacacaagtattttgcatgatctttttttttggggaagtcttttctactaatatatattcttgctgcatatgaaggtcctagagggcagagtacattcttgacctcttggttttctgtgatgacttgtacatctgcttcacttgtagatcgtgttcagaaaccacgtcagtgggaagaatgaatggaatgcctcattaacagctccagcttcttcaaactggatgccaattgttattattgtggtgctattattttacagggttggaggctgaacccaagatcttatgcatgctagacaagaaatctaagtctattattattagaaagaattaggttagacttcatagaatgagctttggagtataaccaaccccctgagatcctgatgtctgttgagtccttgcagtgacttactctgtcatagtgaccactctgtcatagctgaagtatttttttagtgctagccaggtggcattgttgggtatttttgatcagtgtatttttattttttaagtgttgttgtggataatgcatgtgttatcttacagagacgcgctgttggcagtagacgtnnnnnnnnnnnnnnnnnnnnctgttggcagtagacgtctctttttctgtcaccttcagaaataaggcagcaggtatccttttttaggtagttgattgagtcttctcattttcaggcactttacttttaaagtatttcattctgcagcatttatgaagccatgattaataaaacatgtgtcctcaggtaaactgtttaatgtggttttcctttttcttcaacgttgtagggactggtagtttctgttttgatggaacagcaggagcacctatactggtttgctcactcgtgaaaaatttagcctttttgaaaaatgaacatagatcatagccaaaagatattcatcttgcaatctatccacaagaaattgtgaatgaattcatcatcaaataacttaaataaagcagttctttcctgttcctttatcacaagagtgatccttcaggacatttgccattattatatgtacatttttctttctcatatgattgccaactctcttgaaaagtaggaggctttagattaatgtcttggggcggctgatgtctatttaaccctgatttagcagtagtgaagtgggtgtttctcactgtagatctgattgtcatgggtttctccagagactgtaatggccagtctattatatttggattctctcagtttatgctgtaagtagatgagttttgctgtatgtttagcctgggctggagtcaatgagagttcttacagggttaacagaagcacgggctgtggtattcggtgggacgttctcagttgtctcagccccttgacccacctgtgtgcgagacccatactcctaagactttctcagaggtacctgttaaggcattgctcacctagcactttgcttgggaggaaggagcatgaagaggtgtagataacgaggctctgaggtgtctgagcctggatctttagttctgcccctcattatgtatgtcatatccaaaagagacaggtcactgctctttctagcctaatcattattggataaagggactcaggatgcatttccccaaagaacaaaagctgaaataatgttagagtaattctctagggttatagtgcatttgtagggtaacttgacaactcaaataccattttcttttttaatgatgactgtaacaaatggcacactaaggtgcagtgccttcttattgcttgcagtcagggtgagctcacattttctctatgccttaggaaaagacttgaaatgactattttggattacaacatttgggttcagacatgtgtacatgcaacaaatatatgtacagatttgttactaaagaaatgacctgcttatcacagaggacttaaagtcagtatctcagcagttgagcacttgctgtggtacagacagtttgttctgggctggtaggtgaactgggaagtgaggtgttgaactgattgcatttcattaacttagacattttggttttctttgttatttatgtttttatttttttctgtttaggagtattaacatagtagtacatttcacctcattaaacagataggagggaggactttgtacatatgtagggactatttttacagtgttaggccactttccaaggaaaggccagagtctgtgcgttgagtggcaagtagagattaggccatgcgttgctgtgggagtttgcacattgtgttcagtcttgagtctctgtgggcttcttttttctgtaaagtagagcagtggcgccgagccctctaaagcctggaacgatgggcacgcttctcgcctgcctttgatgcgtgagctgtgcttgttttcccttgagtaagtggtggggtaactgtcggttctgcaatttcttgcatcttgatatgtgtaggtaagaactgtttcattgaatcctgataacacagctatgtttttaaatgaatgagtcgtcagctatgtatgtttactattagtcatctatagtgataatagacactttttaatatatgtctatgaacctttattaaatgaggactttttaaaatttgccctcagtctgaagtacattttatctctgagtagtcatttatatgttttatatatttacacattttacatacatatgtgatatgtatgcccaattttataaataaaaaatttaaatagttaataaaatgatcaaagtacacacatatatttttaaagatcagctatttgaaaaatctgttttttcctcccaatttgaatgttgtgcttagaaaaacttggccagtagaaaaatgctttttggcagcttctaggcataaaagtcactccagtcatgcctgtgcagggtttggtagaacacgtctttaggatctctgagttcaaggccagcctggtctcagagtgagttccagccaagccaaggctacatagaataacactgtttttaaaaactttttttttttaaagtcacttcaaaataaagatacatttatttttcctcttgattcctgggttagaaaatgacatgttagaccatgttatcttgtgtgtgtatgtttatgccacctactggacctggcacattatccgttttataaaaaccagatcaagcgaaatcgaaaactaaatgctaagcatgtcatgtctcattagaaaaagaatagttaaggcgacatacctatgctgtttgattcttgagggtaaacattaaaattcactttgatttaaaattgctaaccctacactttcaattatttgtgtttcttaagactctagtcagttctctgcctcgctcttccctaaaggtaaaatggtgatattggggcttggcactttttcattagaaagcctttatcatctgtactccagctcctctcaggcagttttttttaatgagggtgactggctgtcatggcaatttcccttctctatccctgatgactgctagatagggtagagacagaccctgaagtagaatgccaaagagggccaccatggcctagttgctgtacaacatgtgacctgaaaaagtttgtttattggtgtggtgtccttagttgaatgcccccaccacgacctgtcagttgtcaggtccagcagcataggtatattatgcttgcttctgtccttacctaaaatacacctcaggagacactggaaaggattttcttcccttaatttgggactagttgagctatttcttacattctgtcctgcctgtcctccagatactagtaactcaggtagggttggcgggaggcctgcacattcgttcgcccttgcactcactccccgtgccccgcagcacacaggaagtgtgtggccttgcgctgtttgggttcactggctcacagctgaggacttggaggctttgggttgctgtgacttttcctactcagggaggagggcgaaggttgtgtatatctccatcaattcatcctcctggactccccctgaccgtagccctgtaaaatctcatggtggacatctccccttctacgctaatcacgtccttattggttctctttagaattattaccaacattcaacagtcttgtacttattgcagatagcttgcaaagactaccagtttttcttatattactttgcttcatataaggtgtaagatgaacttgcagtatctgagcccagtatagtttaaaattggcctgtaagttagatagtacttgccttgatttagatagggttgtgagtgtgtcaccaggccctaatgtgttggatggaaaatttgtctctattgtggtgatgtggacgggagactagcatctttaagcctgatgggaagtagttccatccctgggggtgtggccatggaaggaactgaagtaattctcatggggctctgcctgttctgctcttgggtcagtgatggtgagcatgttcccacacaataactctgaagtggcggttctttttcttgagaaacattccaacagataactgactacatttctcaacacttgtagaaatgtttgctttctcacaataatacagtcttcacaaactcttagtaattttatgccatatgcaatttatgtcacattattactgattttaagcttaaaacaaatctgattttagctgggcagttgtgcacacactgttaatcccagcatgcgggagatagagacaggttgatctctgaggtcaagaccaaactagtctacacagcaagttccagagcaggtaaggcgaaatagtgagactagaccctgtctttaagaagataaaataacactgatttttaaatcaatgattctaagactgtaatatacttaccatgtcccagcgtgtatttatgatgagaaacaatgaaaagtgacattatgtttggctggagaccaatagtagtcctttctttggactgcagagggttggctttaggatcccatgggtgcttaagttcatttgtatatcacacacatgtcctccgatatacacttaagtcatctctctatcagtctgtcaatttaggtgtcacaatgagaatggaggacacagtgtgaacagtgacattctgtactgctgacagaaaggacaggcctgtgtatagtcagcaaatgtacagatttttttttcccaaatattttcaatatagagggctaactgttttaaatcacagatgaacttgccttatctgttttggcattaaaaaatagacaaaattttcatgacctaatccttagaattcttacattttgcacctaaggaaattaaccagtttaattttagtccttgatatgagggcagtgttggatattgcaaatatttttccatgtaaggtaacttttactcccagccaggacccaaaatgcaaagctgagcatcatattctccgcaccagtctgtacatgtaccccaagtgctgagaagttctagcaaatgagttcccaccagcagtgtgaacagcatccagatgataattttcagagtcaccccgccccccttataatgcccattagcctgctttgcaacatcagtgtcccatatgcttccagactttaatcagtaatccattatgagcataaattaaactatatgactacaaataaaaaacgttaaactatataaatgcccatcaccacggcaggtaacagcatgtgcaaccagcaatagaagggctgaagccactgtctgatctccaccagcaatcatagaactcaacagacatgcaaagaaaatacttcaataaatgctctgctagctgatttgctagtagaaattaaaatgccctccattagtgattttaacagcatgtgttctctaaaacaatgtcatttaagtcccctgttgggagtaccagcctaaatagaccattattctttcaaacattctctatagaacaaatgctcatttttcagattttataagttccctgataaaagtacaggaaaaaagattaacatatggaaaaagtaatcactaaaaatgaagtcaacataaaagaagtactagaagaaaagaaagttctatgtatttgttgtgactacagtaggatatacataggtacttcacaagaaagaactgtatttagcacacaggtctggatgttgaagggcacaatactgtgcatcaactcagctcataaggacctcatgtcgggaacgcatacaaggcaaaccggtcctatgacaccaggaagccagagccagcttgggaagggtcaggcttgctcctctgtaacagtggatgatgtgtgcatcctgactgttcgcatgctatttcagagttatttgtaatgattgctacctgacagggatgctaagctgctgccctcctgctgatgaggatttgagggttgtctggagctggaggaggcacctggagagagggtgctttcttggctttaagcctgttgaagtctgttccatgcaacaggagataactcagcagtggtgtttgtggtacttatagaggaacccgggacaggattatagatatggtttgacttaccctcggaagatttttgtattagaatcttggtctctatagtatggtggttttgaggggtggtggaacttttaataggtggagtcagaggtccttaggccattgggaaactgccctgggaagagcttaaatacatgttatgggatctcagagtatctgtttccagttgtgaggtgtgacctcttcccagttattagcctgccattgtgataccatctaccttttaggcccccgcaagggtctcttcgggcatccccagttttggatttttttcagcttccaaaactgaactaaccaaacctcttttctttgcaaagtttgcctgcctgaggtgtttcattataagcaatgaaaaatggactaatatagatagtttgagagaaccttgaaaataatatgacagggtgattaagagaagcatttttaagattataaaaatataactattgctcatttaaaatatgtattccaactaagcttgctattaagagaaatgtttaagtgggttatagttctccatttacatcttttataaaattggacatgctatattggaaaaaaagggcccctggatataatttgcatttcttaagaatgtggtaaatctgtcattgcacgcatgctttgaataattattttcttacagaactttatgttaaactctgaaaacattactgcccctgtcccctctagtgtattcatattttacctgccattattcccagcagactgccttagacccaagctgctgtttatttttcagttgatagttggaattcccttggggactgttatcatatcatggaagcattgaattagtgcgggtatttgttttgggctttggtgatcctctgagtttagcagcagaccctagacatcagaaatgagttactgatgggcacagcctgcctaggatagttccaaatcacactcaaatttgtgtgtgtgacaggtgggtggagaaaggaaagagtaaagtgtgtcacagacctaagatttcacattctgctgaatgaagttacaataaagcaaaacttgtgaataaagaagattttcactggcctcttgctgctgtatgagaagagagaagtaaaaaacaaaaaatatcagagtactgactcagctactcaagttggcagcaactttgctggtaactgagacattttcttaactgcccgcaaactttggagcggtagtgaactgatagtctgggagagcacttaacagaaactacacgatgggtgtagtctcgaagaatccctggagtaggaaaggctactgagtcagagtgatgtgtaatatgtaaattcccaagtgaactttgagggttatcggtataagatcttggataattggcggctagtgttgattgtcaccactgacagaggttgacctctgggcatgcctgtgagggatgatcttgattaggttaattggtgtgggaagatccatcctgactgggtgagatccttctctgaggagggatcctggactgtgtaaaaggacaaaatgctgaattccagtagcattctgattgctgactggctgtgatgaggccaacttcctcagctcctgctgctgtgacttcaccgctatgatagcttgtaaccagaggaaaccctttctcccttcagttggttttgttggggtgttctattacaggaacaggaaaagaaacaaagatggagaatgtattttatagagttaaaatgtaatgtgatcaggtgttgatatcagtcaggtgatacatttctcgacaatcctattgcatggtgactgtacttgtttctctggtaagtaaacagtcacaggcaggctagtatggcatatgtcactggtcctcgagcccgtgctctgtggtagtggcataagcaaagctctgtggtttcagaattacattagctgaacagggcagtctgattcctgaccttcattctagaaatagtaaaatggctttcacatgtgttgaataacaaggcgccttaccaattttccagttttcttttacacatgctgggtagagctagtaataaaggagagaaattgctgaggccggaataggcttctgctcttgggtctcttccagctgaagtgcaccgggtgtgtctaaaaactcgtttagctgtttctcttccctagtcacatgtatttgagactctttccagtcgtctaggtcactcggaggagtaggacttagaattttccctatcgtagcaggatgtatgagggagaatacactctggagaccagagtgacagtgggcaaaaactaattaggtactttgtttcataccaacattttgtgtacgtgattccttactgcagcttagtctccttgtgccttattatcccgcatgcctcgggtctgtttccctcactgcatggtccagagtagagtccagctatggctaggcctgggctgtcttggagctgtgggtacaatatcattctgtttcctggagtgtggtcagcaggttgtcgccaagtgcaggtgaagaggctgtcgtcaatagtttatgtgttggaaatgttgacaacactgagaaacgctcgttttaatgtagagttaggtgggatattttggttacagagtcttcatttttcccatttaaatttctgtttcgattttcgtttctcctgctgtatcattatggcatttccagtttatatccaaagtcggataacagtatctggtggaggagcctctgctgttgtaagcgatgagtagtttagtttgatttttctttaaatttaagtaaatcagatgaagattaaaaccaagataaagctattatctcttattgtattttgtcatttgtcattgtctcagaatttttgtggaaatcgatgatttgtttttgagatatcgttcccacaaataggcattcagaatcttttcattttagccagttgattacagtgtgtgcctggactaagctacatgaaatttggcatggtaaataatagctttcactagagacactctaggctgtgaacccctgtgaggagttgtcagagtccattttcaggaagtaaagctaaattttgatgctaccaagtgtgaatctaatcagtacataaagtccatgaaatgtttgattttgctcgtggccacaaaaattctaaggatgaatataatgtagtttaaatttatagtaaaattttatttctatattagttttaagcatatatctatgtagaataaagaacaagtctgtatgtttgtttcacagccaaagcagactttttcttgggagataagatctcagtatttatccctgactcacagtgtagtccaggctatcctggaagtcacagagctctgtctgcctctgcctcctaaatactctagttaaaggtgtgtgccatcatacctggtcaaaatgggcagcttatagaaggtttagaaaaccccagtgtgaagacttttgtgttagcattctttcctgtacaaaaagagggccatagagctttgaactgttacactgtgggatacttgttgtgagatactgaagatacagtctggttttcttttgttcctttatctgactgccttagcctcagctgactgcttaagtcagtggctgagaactttccccagctctccttggtaacatgcatcattcatcatacagtgaagattggtattatcaatcgaaatctctaagtagaagacaaaaataaaatgctacttgaaaatctagagtgaaaagagaccatcttttgcttttcgagagccttctattttctgcctatatttagtatagccactgaatatcccctttcaatccttgactctcatcattttcaattatagaggaactcttcaccaaatagccatttatgtgtgcttctagacagcagttgagagagactgtatgttgtgtgctgtcaacttgtactccccagaaatcttaggaagaaaaaccaaccaagctaaatgaagctaaaccaaaccaaaccaagccaaaccatttggtagtcttgttttcttggattctgtgatagtcacttttaggcacttaagtatatcagctatctttgtgagtataaatgtggtttgaatttctctcagttaaattgatagaatttgtatatttgatgctcatgatcgaatcaataaagacttcttaaagctcatcttcactttaaattttttaatgttttaaatttataaacttaatctaaaaattgtagataaataaaaatgttacacatgtaaattttttaagacataagatcttattgatagattgtttaggctggtctccagttttagctcaagtgatattcttgtttcagcctttggcataaacctaaaaaggtgtttttataattttgcctattttaaaaatatttatttatttatttattatgtgtatgtgagcaagcctgtatgagtgtatgtgtactgtgttcatgttggagctcatggatggcggccaaaaccaggtgccagatcccttggaactggagttaccacatgagtgctaggaactgaacctgactcctctgtaagaacagtaaatactcttaaatgctgagccatctctccattttcatttgtcaacttattaatgcgttgtttaaatataacatgaactgtcatgaaaatacaaatgtgtttttggatcaagtatataggaagaaaggaagatgatttcttttttttttcctcaacacatggataaaccctagcatatgtatgcttttgtgatggtttcttcgtgcgtctgtaagtggtagacacatacagaaaaaaaaaaaaagaagactaagcattatgttcagcccactgtcttgaccacctcaatgaattgcaaacagtgtcttctctatataaacatgtttcttaatattagcatagtgttttattctgtagttgtactgttttaactgaccatgtctctgtgctggtgctcagttggctcagtgagttttcattgtttgtgtgtaaagtatatatagcctttctttgttgtgtagatcttggtctttgccatcagccttcatgttccctagagcgatatctaataggcactaggttggccatgaaaatgaaatattagaaaatggttgatcaacatcaattttaatttaccctttcatctccttatctttcatcatcatctatgactttagcattgttcaaaggcaatgaaagaggttgacgttaattcttattactgtcaagtcaaattcattttcaataaataagtgagcattggccattagaaactaaaatactaatgtaattggacctggtgcctaaatccccatccaagacacatcataaattcttttaaaatattttctatgggtttaaaaaattgccattcatagcatgttagcattctgaaaaatgcatggtttaaaacagcctcctgtgaaatatagtactggcttcatgtaataacatacaaagtcaggcaggacgtttaaagtcaaatgccagaggttcttcaggcgaagagttttgttgttagtgtgatgatgtttgttgttggcctttgaatacatgctgcactcctcttcaaaagaaatcttagtggtaacttacagataaattaagtcataagcatagcaccaggaggaaccattgttctgtaagccgttccttccattggaatgcatctggtgtacttcttgtgacgtccatgtttttgtacccatttaagctggtgtcagcgttgatgtgaatctgtgctttatttcacacagccccggcagccccagcactggtgtgaatggagagggttttacttatttacactcttacaatttcacagccatgtttcagctgcacacgagtgtaagtctgagtatcttatctatttttaacagacttttatatgtaatgcattattagattaacttcttcctgttaatttttctataagctatgaaactgatataaaatatgttaagattatctagaagtgttaaaacacgcagtttacagtttgtcacaaaattggagcaaattgtttacttatttgaactggattggggaggggtcatgagatgagacctgggaaaacttaataaggaaccctccttagtggaaatctcaaatgacttagtaaattattttatgaaattatcatgtatgatagaaattattatttgtagagaatcagttaatattctaattattagtgtagttcccatagggacttgacctgataacactctcaaagactagatccgattgccaaagttacttgagaagaattctaaatgctttctttatatatctcctaatgtgtgaatgatactcattcttgccatctttatgccatctattataggtagttttgtattatatgctaccaggaaggctaaccatttttggtgtttagagaaataatttcaaaagaaatctctgaattattagcagttattttaggtgagtaatgatactttctcatttttccttgactattaaatagcctggctccattgaaggctttggtgtggactctgatattatcatctgtgatgcatttagtttgagttggccaatgtttatttgatgtggctagttgtggaaagtgtgtggctgggaagaaataaatctgactcttctggaaggcagtgagcggtctgagaatgcctggtactgaaagcactgcagctcctggcgctcctgtcgctaccagggcctgtctttaggctgtaatttgtccctatcctttccatttccattgaattactaatggtactgttgcccttgtggtactgataccacagcttgtggtatcaggaaagaaacaaacgacaagttgatttgttagtagtagttgtactgtaagagaattcagaataatcagtgagtggaattgggcaaatttgtttcttttttaagtgtggagatagaggaagctgaaagaatattatgttgggagtggacatcttagtatcctctcccattttatctttccatattttgaaattttaagttatatgtatgtttttttttaacctgtgtatatttgtctgtataccatgtgcatacttggtgcccttggaggccatcgaggtatggaagctgcagaaattggagttagaggtggctgtgaactactctggctcacacctgctttctctgcaagagcaaacgtgctcctctctatccactgagccagctttccacctttacctagatttttattagaatacttgttggctactagtgccgtgcaacccatgcgaattcctgtgttttattggtgatgacggtgggtattttagttgagagcagtggttcttggtggcagggcactgcggtgcgtgcggtgcggtgtgagttgtgacacggggtggtgctcagtggcagtacttgggagcagttcttaaaggactgtgtgctctcagcttctgactgtctcatcagaagttcatgccgttcaaagcctctttactcaagctagagcctagttgtctaatatgtaaacaaagtatttttatatggttttaaagtagtttgcattttccagaaatacagcttgcacgtagctctagctattgcttttgccactgtgcttatttaacatatcaactcagagtcaaaagatttccttacgtcttttggagtatctgtagctgaatgtttacatggtgagatctcattgttttatttcttctttctttctttctttctttctttctttctttctttctttctttctttcttaaatctttatttattttttaattggatatttatttcatttacatttccagtgctatcccaaaagtcccccacacgctcccccacccttatttcttctttcttttttgctttatttttgttccttttttttttttaattacacttttggacattatatcgcttaacgttttgcattggattcttacctattttcttcaggattatagtcataatacacactgttttggcctaggaaatggaacaggaagttgagatgagggcagtggtagcacttaactttgaattcataaggctctggttcaatcctggctcaaaacaaaagaaaacaaaacaaaagacaagactggactgagcagggctgacattttttcattgctttcataacatcccctttttcttttttctttttctttttggagagtcagtgtttcatggagcgtggactgacctcaagcttgctatataacagagaatgaccttttacttgggaccctccatctcccactgagtgccaggatttaatgcatcatcttaagcttgattttatgtggtgctgggaacccgagactcctatgtgctcggtagctgttctaccaactgagccacatccttgctccttttttgtttatttaatatagtccttgcggttctacaggattgcctcgcctaaaccttgcacaacatctgaagttacacaaaagaaatgtctgttaacagcaggaagaaattccacatctttcctccatctgatatcgatattaaggagatttgtgggtcattatgaatctcaccataataaatggtttttcttttgctgtgatcttttcagcctacgtttactgtggataacttattttactttttaggaaaaggccaactacattcttacctttaaatgaaagaccatgctttggtcttgaaatccctctgtagtctcatgttttaaggacagatcagctgtgatctgctgagccagagctttcacgatgcttcacagagagatattgttgtttttttaaagattataactgcttatgaatacattgcaatggtgttttctgaatgttaaatggagatttactttagatgaaggaaaacacaacagaggcgtagttattataattcaccttgagaggctgatgtaatgatcagaatctgaattaactcaaaaatagagatggcttaatgaaacatatactaatatgccaccttgacatttcaatatagttgaactgtcacaaataaagtaacaattatgtgggagtgtaaaatgtaaatttctttaaaaaccaaagactttccaggagacactgtttttgttgtcttgaagtggtccagcaccaagagccaggactcttgtcttcttccttgcaggagggatggtagttaagtcatgaattaagatgagattagttgattttctccatggtataaagtgttggaagacaaattttatttatagacttttggggcttttgctttgcttgagttttgattgcctacaaacataaatgtaaacggtcccttagaaaagagtgttggacagaacttaaagagttaagtagtaatttagtggaattcggaatttagcaaatgtgtaatagataatgaggattgagtgcacacattactggcaaacataactagttcataacagtaggtcgaggattgatttatgatgttaagtattggatggggcttgatgctctatttaccagtttattcaagtaagggcgttgttttgattaaattttgttttagtgtgtgatgatgggcttgtctattctgtttcactgctatcaaatagtctgtaagaaacagtgctatgaagcctgcaccaggatagtcattatgaaaacggactatagtgtataaatgctgattggcctgtgttattgtacatcaagctgcttaagtctataagtacacatattactcctctaaatttattttgagaaataatagctagcattcaagagtatcttatagctgagtaatatgttatgtctgcctttcaaagatgcacagatttctactatttgcaaaattttcttttatttatattttcctaccctttcttgtttcctttctaaagttgttgcccagaagcctataatagttgcctgtataactttcctcccaccggttcctaatgcacacatgacccgctttccacacgctccttagaatgagaggtgatttgcaaaccacactgtcaggtcttcctcaaatgcccaaggtagccattaattcactgagcctggccttggcctcccagtcttcctctgcatcgcactccaggtggctgctgccagtcgatgggaatcacacaggatgcaggctgtttattatttcagcatgcactatcgtggttcttgccctttccgtcccattctttgtctctagcaatgtctttcattcccctgtcaatgaattttaagtctgctccttagtcttttacccttctcttacacgtttgcccccatcctgggagaatttcagatctgcaataaccattttcagacctgcattttcacccaagtctcaaataaaatcagagtttcaggtccagatacctaattgcctacagctccgtgtagtgcttgttccattacttttggttgaatgtgtctgaaactgagctcattatctttgtttctccaaggatctctcctctttacttaattgaccatcatgggtattaattcctcggctgtctgtgcctctgccatctttctctttcatctcaccatctcaagcgatgtttttcgtggagaaaggtcttgtatcttagacccacccccaccctctctgctattttccactgccggtggttctccaccttcattcgcaccccaggtccaggggagctcttgttcgtgcacatagttgggtctcatcccgtgaggctttgcttctgtaggttctaatagtccccaggtggtgctgctgtgtggggccccacagtgagaaccactcagtgtcctacacttcctcttcctttgtcagataaaaatgcctgctcgcactttgttctttccttctgttattcccaggccttacatctgaagcccggccgctgagccttcctttcccaggtttcccgcctagtggccgaagctcccacagatctggttttgcttcttccaaacaggttttgctttccttctccttttggtattcatttaggtcttgctcaggtctcacctcctcagtgagtgttccttgggatgtttcctttccagcgaagcccagcaacacagccttaccctatcagtcatcatctccttaatgggaaggggaagtttatggctcatctcttaagcctgagcatgggattgagctgaagtggatgttctgtgtagggaatttctttccctagtttagatgtgcctagtggaccttgatttggggaggggagtgagatcaactactgttaactccaccagtgaacagaaaacagggcacaaacattgaaacagaaaggttttggccagtacagtaacacttactgaatacctgtcctcctttgtgagtcgcacagtgttggtggtttgggagagttctgggtttttccataagggtgggtccaggaacagaaacatactatggatggttggcatgctgggatttgtctggaagtattttgagagagagagagagccatagtcttctccacacagggcctgtgtaccttgcttttcattgagatggatgttcaattccacaaaccagtctggagttgtgtgcctgcaatttgtctcctgtttttttttttttttttttgcctcatcctaaatcttatatatattttgctggtttagtacctgagagagaatttctgtgaatgaatgacatgtcactttaagcagaacaactggcagcatgttgttgcctgtgatagaccactttgttcctttatgttcatttcagtgagctttgtagagcacatggaggctcaagctggaattcagtctatctgtcttctgcttaccatggttacagaggagaaagatatggaaacttgatggtgtgggtccttattttacaggtaccacagctgtggcctgagcaaagtcaaagctagggaaagctatgaccagactttgatctctagcttgctcttgctctgaagaagtaaactggacattatttgaattaaatggaaacagggtttgtgtggattttatactccatttggggttggggagctaatgctgtttaatttatatgtgtatccccagtgaacaaaatgtatccatttttgaaacaaacaaaaattaagctatgcatcaaaaaacaatatccaggggtaattattattttttaatttaaattacagatcttattttcctagaggctttgtgagatcttgcaactattattcaggatattaagacatgaaatactagatgtatctgcttctcaatactggttttacaaatagtctgcttatgaatgtgaaaactgtaagctatgaattacaaacttatctattgctgttcagtttctgcagcccagttttgatgtgtgtttccacaaagactggagcgtggatccggtttgtatgcttatcatggagcaaacaatgaaatgggatgatttgcatattatgccattcagactagaagtttacaaaggtgaattcaatcctgttgaaggaacaacactctgaaatagattattaacttggcgcctaaatgtttaggttgccaaactctttgtaacactgtgtcttctgatacaatatttttgattatgaatgtgcagttagaaacttcattctgtcttcattaactttaatgtgttagtaggcatagttgccctgttgaccatgtagacaggttgcatatttttgaagcaattttaagatatatttcctgtaacaggacattcattgtgatgctaattgttgccagaccatatgatttttggatgtgtatttttgtgtgtttaaataagtttgttccaggtagagtgtgtgacagatgacaacctgttacatatttattcacccctgagatctgtcgtagtcatcaagcctgcgcctgctaggggctgcggcataggacaggtttatgctgcagcacagccggggctgcttagctgtgatattctgtgttgtatttcattgactgcatggatgcttccattagtgcttttaaaaataagttctcttcatattaatgaagttattgccatcttacgattaatgagtgtttctgtagagttggaaatgtaatttgagtctatcttttgctgcaggctgtagctcaagtgtctaaatccagagaaggcagaatgctctaaagccagcttgtgttaaacagtaacacattttctccacattagtacactttcatagtttctctcagagtttagcacagaaaataatagattttttaaatgactggacatgatgtttaatctgtaaactaaagccccaaagggagattaaggggggatcccaaaggaactggtgttagcaagttttagttttattaagtgattcatttgagattaaaaattattgtttcccccttactccctcaatcctcaccccctccccctgcaaaaaaaaaaaaaaaaaaaaatcaagccaggcagtggggtcacattcctttaatctcagtacttgggagacaaagacaggcagatctctatgagttctatgagtttgagaccaacctggtctacaaaacaaattccaggacagccagagctatacagagaaaccctgtctcactcccccaacccccaagagaagtactataactgatgtgcagggattaggcaaagaaaccataaaggagggtgtactggctggttttgtgtgtcaacttgacacagctggagttatcacagagaaaggagctttaggtgaggaaatgcctccatgagatccagctgtaaggcattttctcaattagtgatcaaggggaaaggccccttgtgggtgggaccatctctgggctggtagtcttggggtctataagaaagcaggctgagcaaggcaggggaagcaagccagtaaagaacatccctccatggtctctgtatcagctcctgcttcctgacctgcttgagttccagtcctgacttcctttggtgataaacagcagtgtggaagtataagctgaataaaccctttcctccccaacttgcttcgtcatttttgtgcaagaatagaaaccccgactaagacagcaggaaaagttgcataggaaggtggtttgtcccttcagatctgagagtatcctgtaattctggaattgtgtcttctcatagatgatgagtgtgtaaggccttccatgtttctgttcctagctctgggatttgttgtaagggtgtcctcattgctgccccctgatgtcatcagtgcttctgtaacagagtcagccaggagccaccgaggggacccaaaaccttgggaatgaaaaattcagttctccaggaagcatactgagcttttcagaagaagccagtgacagtgggcctttagtcgatgatggccctgacttagggaggataagtctggagctgggtcagcttctccagcagctggaggagataacaaagccagaactgagctgctttctaaaactcttcaaggtctcaccaaatataatgaaactaacttagcaaccaatcaaaactgtactgatgtcactgctttgccccgaccaatcatattagaggttacctagcccttctggaaaatttctctagccctgcttaaagggtgtttctgagccccttgagttattgccattttgatgaatggttgacctctgcatgttggtaattgctgcagaataaatggtctttgcctttgcatattatttgagtctgcagtcttccctcagcgattcttggaccctaacgtcagatggtatagaagagctgaagtgaatgtgtgctctacctctctgaggggtgtgaccatggtactcacagtttcaaagactactcagaattgaggatgataaggttagccatcttggagcttctttcttggtcttaaatacacatttatagtttagatatttagatgaggagagaattacaggatttccagaaaaccaagtgaacaaataaaaatttgttaggattcatgagttgtttgtaatcaagaattactttcaggtaagaagtttgaggtcatacttgatacaatcaagcagcagcaattcttaagtttttttttttttacattttatgccgtgtcttattttctataactatttgacagaatatgttagtgttcattaaaacgtattcagtatcgagaacttccagtgatttttgagactttttcaaggtacatgtatttgaagcaaacatctttaagccataccattctaaagggaacgtgcgtgtgcatgtgaaagacacagggcccgtgacactcactgaccttgaaacagcatgtgcagatttctgtggcaagtctccagttctcagacttctcatctcccaaaccttaccagttcctaaaggtctgcttgggaacgcctagcaccaatgggcaaagctgcccttcctcagcttttcagaaaagctggtcctgaaaccctcacctttttgtttaataacagttgtagttgagaaaatgttcagatctggagagttggagaagtttccagaaagaccattttaagtactgggctctgagtgccctatctttttctcctgggcacttggatctgacttaccagaagaaatacattgttgctttctgtattctattgatttaaaaacaaataacatgaagcttaggtttgctcaggagccattaccacactgctcattttctgcctgggctttgatctgctactgtagattctaaattctctatactaggtcatgagttatcttttgtcgttttaaaatctggatgctagcttaggtaattacttttcctgttgtgaccttgagaccaaaagttatgaattttccctcccatttcttggaaatagctcaggcattctatagccgtgttttgttccttttacctaccagaagggcagttacccagcccatcacttgggcttctagagcttgcttgaaggtagttacccagcccatcacttgggcttgccttctagaacttgcttgaagggcagttacccagcccatcacttctagagcttgcttgccctttttcttttttcttttccctgctggtactgtttacatttcccccaccccttgtggcctgcctattttatgccacctttaatccatttgctcttgcttttagccttaccacaggccttgggggctgactacgatagcagagagttttgggaaagaaatagccaccctccagtctgcatttcctcccctctccacagcactgtgcctgcaggcttacctgcatggccatgttgtcatccacccaactggtcgccatttggtagtaacaccatttcctctttgtcccaggtgatcacctcactgctcgattaggcctttccctggtaggaagctccagtgtcacagacaggaaatgagctcccgggatgcgtctttgcactaggtgaaaggagccagatgcagaaagacatgctgcttcctttaagacccccttaccgtggaacctgagatgttgggcccacagatgcagagagagcacgtctgtggcatgaggagcagggagatgttggatgtaggttgctcactttcagctctggacagacagaatatgcagcatagtgactttattttacatattttattttgtactagagatttgataagacccaacaatacgctcacgataaactgtggtggctaaagcagtaatttgattattgtagtcattatataatttgtatgatattagataatcacattgagtatgtacttttattttttcctattagaccctaataacttggaaaaaaaccctaataaaccaaaaagtcatgagccttttctcaggtacatggaaaactgatctgcgcgactcatatttaggcttaacctactgaggtctaccagaggcctggttttatttgcccagttgagtgttggtagagaatcctagagagtcttacctgagaaaaagtgttctactgggatttgaactcaggtgcggctgcatctctagattgacaacgtgttgctcaccctggtctgctagacttcaggataggctttgatcaggtagtactaattatgtgtgtttctggtggagttatgtccaacctgagagggttgtctcacattgagagcttttctgagaagttggccatgttgataccctgtatggtgcatagtttagaactgcaggtctggcaggttcatccacaaggcttttaattggatgaggaagtcaaaagtgagagattcattatttgcttatccaaagtctagcttatagaaaaacagacttaatcgggctctctttttgagctattgctgtttgcagtttctctgttgttactttattatttaaaaaccttaagaaaaacacaaccttaagatttacctggatggaacagtcattgtaacagttttctggtttgtgtgtgacctttgaccttttcaaaatcaccccaaaagatacagaaacagcacaagcagccttgggaaagacccctagagagcaccctcacaaggaggctgctgcatgggcactcgcttgttccgcaggagggttagccagggcgatgtgttccctgcccatcttgtctgtgttttatattacttactggggttatttatcatttaaagtgagcagctcagttgttcttagtttgtttatagaattgtatgcaaccaccaagtattataatttagaacaatttcagtcttacaaagtaaggcagcaggattgtgagtttgatggccaacatagaaatgatctgtttttaaaaacccaaaaggaactagtatacactaccctacctcaaatacagaaacaaaccaaaccaaccagccaaccaacagacggacaaaagacaccaaaaggtgtgtgtgtacacaccttcatacatatcaccatcaccaagagcaatggaagacaacctgctgcctttctcatgccctactttctccatccaggcaacctccactgagcatactagcatccctgggcatactaaagtgcgaagcatacagcctatgacagtatatatataaccttttgtctccgagttccttcccatacatctttgttgtagcatgtaccaggacttcatttctttatacaattacatgaatggatgcgccatactttggttacctgtttattagctgatatgcatttagatcgtctcccctttgggctattataaataattacgttacacattttcataaacaagtttttgtatgagtaaatactttcagttctcttgagcatatgtagtacctgagagctcaactcttggatcacatttaggattttgggaaactgccaacttgtttatcctgtcagaggtgtcatttatattccctagtgatgcaatttatgtccccaccagtaatgtatgagagttggctttctctctttaccacttcccactctttgcctttttgcttgtgttattatgtatcaagtggtgtttcattgtgggtttggtttgcatattcccagtgactgatgtcgaacagtttctgtatgctttctccttttgcttattttcttttaaacaatgcctatttatattctttattggtttttattggtgttatattttctcatttggctatgagctatttatatattatagtttttagctacaagtctccttgtaagctctgattggcaaaactccaaccctccctcattctgtgagtcctctttttaccccttaatgatgatctttgatgctgtcattgcttccatacagtctataactgagggaaaacaaccttcaaaccttttatgtaccaccacggatggttattgcttagagtcagtgccatattttaaaaaggtttttgtttcatattgtaagtaagtttttgcatgtgtccgagacaaggtgcatctctcttatgtctgggtcaccaaataatgtatacagattgtctgatcttccatctaagaagtggaactattaggaataacattaagtcctctgttttcttaaatccttccaatggttttggtgctttctgctaataattttagttagtagttttctaatgaggaagagatggtttttccttatttctgatgggaagctcttaaagtaatctgtaaaacttgtccattatttactgttatagctgctagaatctttacaagacatattgtatacaatcttttaattggaaaggccagatgttgccaatgaagtctctaggtacttaggagactccagctgtgtgctcagtactgttccgtgtttttctccagttgttggcacttgaatttgaatgacacatatctcagaaaatatggtctttaaatacccattaatcataaatacccttttcataaattgtggaaaaataaatacaaatacaaatattccatgctctgtaataaatatttgtgttatttaattattgaattgagaagcttttagcatcactttcatccctaaagtacttgaaagtctgacctccttttatagatattgtcagactttaatgttaggacatcattttaaagaccttcacttaatgtcttagaccccacttggacagtaagcagttccttgagtttattataaattttggcaggtgtggaaaattctaagtcaccaggagaatcttgattcagttactctccaagggcactaattggccctttctacagtgctcagggaattccaaggagacactgaccgcctggcatagttttgcccattgagatgcagcttagctgtctcttcttgtttttgttttgcaagacacttgttttaacttcttctacttttgtgttaattgtagtttctgatgaagatttgaaaagaagagtagctgaggagctggcattggagcaagccaaaaaggagtcagaacaccagagacggtgagccccatgggacctgagaagacttgcctggagttgtgatatgtagcatgcttaaggaagacttatttattttattttatgtggatgagtgccgtgcttgcgtgtatgtctgtgaactttctgtgttcctggtacctgtagaggtcacaacagggcattggattctttggaactgaaagtagagacagtttgagtcaccatgtgggtcctctgcaagaacagcaaatgctcttttaactggtgatttaaaacaaaacaaaaaaccaacaaaaccaataataacaaaattacttttctttgtgtggcagaactctagatatgctgaacataggttcttgactcctttggtttgagattgtggttggtagagccctaaattgttcatgtctttaaagaattattgttgtgtgagctttccttttccaacatatggaaattagtagtttctgaggattctctaggagcatctaaatctctaaacaaatatgttaagattgaaaattcaattgcccattactctgtattgaaatggacactattataggtagtggtgaatatcatatgccatacataaggcttgaattaacaaatagcactagttagtagtagaccaacttaaataattaagatgtcatagaaatttgcatagttaaaaatgaaagtcctttataattctgtcttgcagaaataaccactttttcatattttgttctagactttttcatatgcagctactcccattttgttattgccattattaacactataagagaataataggcaaaagaatgctcactggagtaattgagttaaagcctggaagcagctcagtgtcgtctggggagtgaaatgtgaaccacatacaggccttcagtgggcagcagacgtcagtagatccttgtgtgcgctttcaatcatgtgcaagagtcagactgccgggagcttgggggggagcagtgtgtaaaacaccacagagaacacatgtacacacatttattttgagaaggtgttaaattttaaagatctgaagtgtgtacatagaaatgtgtgaatacattttaacccaagataaagagtcaactgcttcgccgcctccttgtgcagattctgaaagcctcacagagcatagaacactgtgtcatgtggtcgtgtggaatctttccactgccagcagtgggtccatgctcagacagagcaggagcttagagcctacttgtcattcatttgacaagtgagtagaaggaagctttgggttgggttggtgtcctccctggccttcagcataggatttgaatttttttgtccttcatcccccagctgatgattttgaatttagtctatccatacaacatacagaaaaagaatataagctattgattatgtccaccatttttaaggaactagataaagcgttatcacttaaaaaattgagatataattaacacttccagaagactgtgtgtgtctttatagtgacttcctatgaaacactttataattatttaattactttaggttgatggagtgtatataattagtgaagtttaaatattaaaaaaaatccacatcagtttcatgaagaaaagaagcatgttatgatagcattttttttatatcttgaaattatattttctttaattaaattttatgttcacacggatttggggggtggtccaattcgtgtttactttgcgaactgtatttcaggagttctttattaccacatggtgcaggctttttctttgagtaattcaccatgctagtatgtgcctttcctttcatgatttgactcccatgtgctctgctctggccgtgaaagggaaagggccgaggagatgaacaaacaggaatgtgagggcccctccatgcctcaggtgggatggagttggcacctagctgtaacctggacaaatgactcttgataaggggttcattttctgtcaccgttttagagagcagagggtagagcagctattatgttattatttttttctttaaaaatgttttgtttgaagctttctttataacaaccctccagctgtcaaatcttggcgaaaagtgtgtgttctatatgatacttgactgaatcaatagctttccccaccttcttccttttttgttcttcatcagcgaagaaactttagcacaagcattaagaaagctttccgttcagtcttctaaaagcggcatcttcgagtagcagtgcatttaggcattggtgtgtctgttgcctaagtttgagtgaaggcttattgtaagcttttcttcagagtggttctccatactcctacattgtcacctgcacaagtcctgatggcctaggtttttctttttcctcaaatgcacacagaattgtctaccagttctcaagtgtatgagatccaaacaaagatacacagacaagtaaatttcaaatacatatgtttgaggacattgaaattaatttccaaaaagtgatatatttctttgtagaattattataactccacatactagttcttaattgatgcagagtattgaatgttctaatgacatgtgcactgtgtaatgttcagccatgttgcgccctgctctcttctcaagtgtccctatttctgtgtggtgaaaatggtcaactctttaagtgcaatcttttccttgagcaaattttaaagctcattcaaaaccagagacaatccaggaatacgcacttgtatctgtgctctgccaggtctgagtggtgaggagaagcaagaaatagtcaacaggctggtgaactgtgcagcagagctgtcttctgtcaggacagcttaactcatcaccttatttcagggagatttctttggaccaaaagatcaaatcttaactgtggttaacttgggaagcctgatagttcaaaaaggaagacagaaaaaccactagctagggaaaattggaactggctaagactgcaggagaaaggaagccatttctcagcaggagacacagatgagggctccttaaagggaagtgggtggtagaatctacctgagttgaagatgccgttgatttcaagatgttctactgagaaaagaaaatggctgcagattatgatccaatgtttcatctctttgattttcttattaaaatacctcattaagactaattttgaaaaaaaaattcttcctgtaagcaaaataaactggttaaggtggtggttcttaactggggggcattttggtctccaggggacatttgacaatgtttagagacatttttggctgtcacacctgtcaaatcatatctagtagatggtacccaagatgctgctaaagatcatgtaattcttaagatgggctctttgctaccttttgtccccgacaaaaagcatttcatggctaaaatgccagttgtgccaacagtgaggtcccaggattcaagcctctttcaggcctttgcacactgggcttcactccttccattcatttgctcagtcctgatgtcctggttttcccatgtagtatcatattcagcatcctcaaaaccgtggcaacatagcattccttaagggattgctccactgccacttctgggagttttccaagctgctgacaccacttctgcaaattttgatgctctgtgcaggcgatgacacccgaggcaggactgcctctctgcagtcaggaggtacattaggcatgtgagagtgtggaaaaatatgtgttggtaaaatcagcccatctgcaggccagactatgagatccatcagattgcatggcaccttggcaggcttgccctgccttcctcccagagcagatgccctttctctgctgttctgactagtcatggcacacacatttagacaaagtcatgtaagctgaagagatttctagccactcagaatttacccccacttcttttaggttctgttcctttgtgctggctttccccatgagacatttcttgttagtaccatagtgacagcagagctgagtacaagttttgcagcaacctgtgttatattctaattaaaaccaaaaccaaacaaccacatctgaacatggactttccattcactgtactgtggatctgtgggcactggggtagttttctgatcatgcttctaaattacagatgatgagcctccatgcttaaattcttttgtctaatttgcatgagctcattaaaacatctaatagatgcaacagtcatttggtctgctgctgagggtccacaggagccagcctgtttttcctgggacagtctgttgtgtatgtaggctgaggttggccatactgctttggcagctaccgcacaccaatgtcacaagggcacaacacacaaggacaggctacagtttgaacacaatcttctaagatgtggtttacttcccctcgtcctgcctccaaaagccaatctctgacagcaagaaaaatgtgactactcctgacctttgacccttggcattcaaatttcacctctttacctataaaggcaagtgaaagtgttttgctttaataacctttcttcaagaaatcaggaaggaaaaaggagtcggcatccagttgtgaagctagctgtctgtcaactgagagactccctgcctgctatttttaaatggctatcagttgagatttgtcctcagttttagtaatttggaaaattatattagatccattggagcttaatttagttaaataaattaatcataaattttatcagttgtctccttgaaagcataacatagttcacttacttttcccattgatagtggtatggaagccagaattgggacatgagacattcttgtatcttttagttcattgtgatagtgaaactcatggtaatgttacgttctgtctaaacccattctgtttaatatgttctgactttattatcagatacatccagcctttggaggaaaaaggtgaaagacaggggagggaagagttggctagacaaacagatttgtgagttatggccatgtttaagctatgtaagtagtcatgtactaaagttctatctctaaaatcagaaaatactcacagatagttttcaatggaatgaatcaccaggcctggaaaatactgactagaactgtctttctggaagagacagggcttgaatatagtttgtcccccaaagttcctgtgttggagacttggcttctgatgttgtaaggtgggaggtgacagaagctttgagagggacctagaaaaatatatgtgcataggctgtggacagcagggaggtactgcccctcacatcctgagaataactaaggtggtctcatgggacccatggtggcttgcagcagtgagctgctgtgaaatccaaccaggccaggctgctctctgtgacctcactgtttcatgtatgttctttctgagatggtgtcagcagtagctttagtgcaatgaagttaagttgggtgctgtggccttgaatctccagaactattagccaacataacatcttttctttttattgattgattgattgattgattggtcttttcgagacagggcatttattgattgattgattgattgattgattggttttttcgagacagggtttctctgtatagccctggctgtcctggaactcattttgtagaccaggccggcctcgaactcagaaatctgcctgcctctgccttctgattaaaggattaaaggcgtgcgccaccatgcccggcaaagcatcttttcttaataaagtgggcttgctgcagattatttttttaatatttgtgaaaagttactaatattaatgcatgtggctgagtattgcatagttatatcttatattaaataaaagaaaaattaaattgtatctttataattttatattacccaatgactacaaatttttattttaatttagtgtaatattcatactctttctgtcatatgcaagttataagattataaaaactacgacttcaacgtatatgcagtttatagatatgtagtaagtcaaagacaataagaagctctgagggctattaatgttgaggactagtacttacaagacctatctatcataaaaagagtttggctataaacttaagcaatctgtagcaagtagtttttcatgtcagtcacgctggcatggacaaagaaacagttgttactattcagaggctcagggaagacctgggtcagtgtagcagctgtgtactgtatcccctgtgtctggccactttgagcatgtggctgatttgttagacatggagccctctttgtgcacaatgccagaccctcctgggcatagaggctgctcctgtagatcactgctctgcttagtctcattgttacctggttcttttttccctgcattgctgtacttttatcctgacacatttccactctgcttcaaggtaggtactgctttccaagtgccggggacggtcctgtcccagtgtcaggtagtctgctaggactcccacagattgctcatgttctagctgttgggatcttggccagttgccgctgccatcttttctcctcagcgacacttgtttttaacagacagttgcctttccacagttacagttgggtagatagtccactcttgagccttgtgcatagctcttccttctttccagactcagtttctcttctgttgctgctctgctgctcaggaaccctactctgagtcccatttcagaagctgtttcataaggcaagaatctcgaagccagaaaaccaaagccaatcaagcatgccatcacaatctgtaacttttttacttgtaattgcagccgtgatgttcagccacgtattattcagatgtttctcttgacagtaattacagcattttctctcatgtagcatagtgcttgaagtaatttttgctgaaactggtttctcagtgggaatgtctgggaaatcatctgtgttctgttgtcgttcatgttgaagcgtctccattatctggaacagcccagcttttctttctttggtgggagagggagtagtaaggtactctacttcttactctgttaatggttatccaaagcatcgttatccagagccgggtgagaactggacttcagacagtgtactcagttcactgctgaggtgatggtcgcccattggttcttgtcagcatttaaaaacatactcagaggaaatccagtgtgcaggcgatgcaggcgatgcaggcgatgcaggcgatgcaggcgatgcaggcgatgatgcaggcgatgcaggcgatgcaggcgatgcaggcgatgatgcaggcgatgcaggcgatgcaggcgatgatgcaggcgatgcaggcgatgcaggcgatgcaggcgacgcaggcgatgcaggcgatgcaggccggctggagctagtggggtgactttgtctactcagctcttcgtaggacagaatgaggctccttcatctttgcaggcttggtgttttgttcaggaaacacatttacaatacgaagaacaaatatgttcctatccaaagagctttcgctcatccctcgttagttttagaaggtggttgagctgtgaccagtttctttaagtctagaagtccgtctttgcaggcagtagtccacataagctgggcctagccctgctgattgatctcagttctgggccatctgctgggcctgctggtgatactgggttagaagtgtcaaaaagcttgacatctttgactgttttactctggagggatggtctgagtgggccactgcttccacctttcctctcctgatcttttggggtttttttttttttttttgtgagctgagctctgaatggaaaaggagttcaggtgacttagctgtaagtcacatgccaatttcatctaaccttaggcttacatttctaaacactggcttttatcccccagttgaagtagtgtctgtttccctcatctcagccctgtctagactgtaagtcactattctatgctgggttgtgtcgattcctttagtaagggtggcaatttgaatttcttgttagttctttaacttaatattgtgactgctttctaaatagcctagtggagaatatgctgaaggagccagtcccctgctttgtgagcttgagagaccaggacgtacttccggtcagtgaggtgctcacatacacccggtagtgttctgtgtgtggagcaactcaggtgcctgtgtgtgtggaggggaggggccacttctcctcaggaggcggggctgtgtgatgcttatttccaccagcagtagccaatctcatgagagcagaaatctcctcttgcatttatttctcctctatattcattcttagactttggggagaacaccccctcccacaaaaaaaaaaaaaaaaaaaaaaaaaagccccaggaattaaggaaaaggcccaatggcttgctgctttgtgttggttgatgcttgctgtgtggactcagacttatggtgctcgcctctactgtgtgcttgctcttcatgtcaaggctgtcacagccagttcacaaacttagtttgttaatcacttagaaagttagctgctgggccagtttgcctttgaaatgagaatattgaatccctccatcgaagtatgtgtagcttccacgagagcaatttattagttattcactatttacagttgcttccttctacaggaactatctagagcctccaggcttcagctatttcatttggagaggttttcaatttgcctcattaaaatggttttagtgtgattttagtgtcaagtatcaagtagaaaaatgaaagttggccatgtaaatatttcaactaacaatttaaaatcaggttccaacatgaattctcaaatcatatcgtttagcgttcccattgcctatctcccatttgtgaaagctgattctatcaaaacaaaagtctcttaaaaaccaagaatttacatttcatcgtctccctggtggggttgatggattaaaaccaaaccacatcaaaacaataccaaaaaaaaaaaaatcactgaaaccaccaatttaatgtgagaaatgtctactaattaaaaaaccattatctaactgagtttctgtgactcttttattatttctacagaaccaaattgctttgactaagaaaggtcatttctcaaagtactgaaaacatagataatattggtttgtagaaaaattaccaaagaaatatgcctcatcttcactgccttgttcttctcccataaaaccactcataagtcttatcccaggggtgatgtagtcttgtgtttaaaggtaacaagtgtgactttatatagctagctatttttcctattcagtctctagagatctcaagtagactttaatttggataataaaaactgtttaagaataggttcccatacaggcatggcagttgatacctgcctgtagtcttagtactagaggcatgaggactacaaattcaaggctagatcgtacccagtgagattgcatttctgaacagacaggcaagcaagacactcacttgtgtggattagtactcatagtttgagacactgcttatccaaacattttgtatgcacctgttgatggctttgtccttgtattcctgtaggctgcttctgacttgctggtctcctcactttgcggatgaaatggctaaagcatagagtccacttgctcaatagtccaagttgccagaaggggtaagagttgggctgtagcccacccttcctcccctgggctgcattgtaggtgctgggttgacttctggtcccacagcagagcttcctttgatgtttctgtttgcatgttccacctgtgggctaccttcgaggatgttttatactgcactgtgcaggatttagcatggtcagttctgctgattatgaagctcaagaactaagagtttagttctaaaagatttgtaaagaggaggactttttcagtgtttttgttttttaattcacatgactatattttgaaatgaaactgtcaaaatactgtcatagtgggtaaagattaatatttctgtagattttcttggaaattgtgcatttctttataaatatatctgtcaactgtgcaaatctgtttttatagaattaaagaagcccttatccaagtgagtcttggaaaggtctttcttctagctgatgaaaatatgaataatgttagtttaacaaaattatttaactaattattcttgattcctttttcctgctttatgtccttgcatcttctttctgattaacggagcccggaactgttgtgccttccggtacatgacagtctatctaccactcaccattttcatcctgcctggttcttactgtgtggggatctcctctctttcctcatgggactttgaagttgctacagcctaccatagagcggtagagggtagccatgttgcttttacacacacaactgcttttcatcaagacctgtcctcacgagggcagctagcgttagtgctcgggtggagaagtgctgcttcattgccatttcttactttcatggtcactttagggagccgatgggcctggcttctcctctttcctcccttctccagtcctcccctcccactccttccctttcttctctctctttctctgcaaagtagtttttaaaatgtagttttaatcttgtttgtgtctttgattaaaacatttctaatggcttttaattagcatctgcctcaagtccgagccctttcctttggtgttttggcttagcctgactttatccagtgcttctctgccctctccttgaacactctagtcacatctgatgctgggcttgtgtgtgcccacagctcagtgctcagagtacttaggtcccatgttttgcatggtgggttccctcttactctcagctgcatagagaggcttgagtcatcgctgtctgaagtactccgtctcagcagcttgtcttgctgccctcctccttaggctccctcatttttgctttatgtttctttgcattactgtgtctgtttattgtgtatgtgggcaaaactcatcatctgtcatttggtagatatccaaaaatatttgccagattataatgatacttgctatggctaactttgctgcttcttctaagctggctggcctgtaagctctgggctcacagactgtgcatggctcttaggtaggtactgggaatctgaagtcaggccttcatacttgacagcaatggcaagtacttcatgtacagaacattttccagcttgttttgttttgttcttctagaaaacactttgtaaaagtgaaaacctaacagaatgagagtatcttcccccttccccctttttgacttaaatttggcctcaagcctatttaaactctgtaactctgtaaaacatacagtgtattatgtgcaagactgtatcgaagcatgcattctgcaaggttgtgaaccatctcaagttgggacagtgtcaggaactgtcttttttagctgggcacatagttgtagtttctccctgtgggccagctctccctctgcactgtggctttccaggtcgagaggaacttgagtttgtattgcagatctctgcatttttggctgctttgctgaaagtttttgctgcaacttggaagatggtgtctttcttcatcaccctgctctcctcaacctctctggcttctggaatctgtcgctccaaggctccagggaaggctgtacctacccaccatggccctgtggtacataatagctgtgctgtgtatgctccatgccctttagtatgtccccagctctgtgccattaagtcccctggtcatgtctgtgggagggagctgattttgttttctttttcttttcatttcccagtagcttgtcacaggagtgactcacacccagcaaactcagccttagatagctttctgcagacaggaacaacaaattcaccagtcagggaacaaagtgaaagaaaaatgaagaacaatattagaaaagaaccctttgggaagctgaacaaaaaatgttatattaaaatcaatactggggcctgaccttttgtggtactgtatattttaaagcctcctattgattctcttttaataacatgtttattctactttactgacacaagcctagagagactataaacggggaagatcatattctttattatggtggccatttaaatttctctctggcattatttgattgttccatggaattacgtgcatatatttaacatattctgatttttgaaagactcagaggctgtgaagcacttttccttttgttaaaagtaccctcatcactgcagtgacagatgtgtatagaaccctccgtaccaactaggaatattcttttagcttttgcgtgcgtttaaaagactgaaacaactcattttgcttgaattgaacccctatctcccaaatctattgattcgcacccccccccccacctcaggccccgtacatttggtgacagttgtatgcatagagacagttgtcattttgttttgttttgtttgtttgtttgttttttctctgtgtgccctgggtgtcttgggacttaatctatgaaccaggttggccttgaactcatagagatcagcctatgtttacctcgagtgctaggattaaatgggtgtgccaccaccacctggcaagacagctgccacttactgtatggctggtggcaaaatgtcaaaggatgtgaaatctccttagagatttgtgttttcttttgatccttcacacattgttttcatggtatggagtgctccacccaggcaggcggctctccgggaggttatctaggcttctagtttgtgatcttccttctattttttcctattaggaaaacaaacaatctaaacaacaggtattaattttcttccctctttggaatgattgcttttccacatacagattctgagtcccacccagcacagcagcaaggactcactcctggagaggttctctggccaatggcacattaaaggggattgacttagcctgtggaacatcatgttaataggcttagagaaaaggaggatgtttggatctgactcctagatttaatgcaacagccctgtttgtggcatctctgatacaggctgagaaaccagatagcagttccaggaaggcagtaacggagcagaggccttttggaaagtacaagtaaatgggtcaagaagctaaagctaactcaaaaggttagcgttcatgaattataacacggggtcctgaagaggttcagccatgtagcaaggaacccccaggagatccagagagcagcagatctccctatgccctccagctcctttcaggaggaccctagctagcatcagtagcagcctttgtgttcctgtaacctttcttcccactgcacagccttaggcattgcttccttagtccaaccctgctttgctagggtaacaagaagtaagaatcctaaaggttaaagctcaaacaaaaccaagagttccaactgttcaccatccagcttagtggtcagattatctgacccctgggttgtgatgtgaactcaggtgaacaccaagaataagaagacagtatctacagaccctggaggagttggtggctcttctgcagtctgcttttacatgttcccttgtctagatctgccatgaaatcttgactgtggctctgtctgctcagttgttctatctccctagcacccagtaatatctataaataatactgaaagttatagagcacatcatggggatgagttcttttatctaattgcaaaaatagtgcacaccatataaaatatctgagaatcctagctaaagaaaacacaaatctcttataataccactgtttacacaaacttctataaacatttggcatacaggcctctgtgtacagtggaaaagtcactgacgttgtaaatcatcactttatgaggtgatcttaagatagatcattaacgtgttgtcagtacacaacttggtgacagttcacttttagatgttcaggcttctaagtaagtggctcacagtgtttcactatcttaatatatgtgccatatattaccattaaatttgtacatacatccaaggagacctgtgtctagctggcaagagaagtaagtaggtaataataggtgtgacaccatatatggctggtaaggttccatttgtgtcagagtgagcttggtattttaaatgtcacctcaatagatctggcctgatgtaaggtagttaactgatcaacaccatgcataccctgtctgcagatttgtgattcttcattatgaacaagtaccagagaagaaataagtcagtctgagaagttgtgagttctatgtagctgacatggaggttactgtggaatgttttatttgaccatcttttgagggataacatgtttgtcttttgcttattatagaaattaaagcaaacagtattgagtatttgaaaatgacgtgaatggcatgtaaaatgagtgtctgtcttacatagagctgaggacatgtgaaaatacttgcagcaagtgtgaaaacagtttggatcctctgtacccatggtaactctggacaggaagagcagtgaacctgtaagtccattgcttatgaagctcagatgggggttcccctagagcaaactggctgggcaactagcctatggtgagctctaagctcaattgaatgaccctgcatcaataaataaggtgtagactgatcaaggaaaacatctgatttcaaatttggttccaatgtgcatgtatacacatgaacacttacagataccttcatgtatgtgcaattgtgtaagatacaagtctcagaaatgtatacccatacatagttgagtgcccccttaacctatgtataccattcagatattcatgagaagaaaaaaattacatagtttagacttttgtctgttttttgtttcttgatttcctacattgacttgatttttaagtttttttttttttttttttttttttttgtaaatagcatagttcttttaaacagtgtctgttgtattatctggtaaataaaataaatatttctgctgggcgttgtggtgcacacctttaatcccagcactcaggaggcagaggcaggaggatttctgagttcgaggccagcctggtctacaaagtgagttccaggactgccttcagctcttaggttgtgttccttttgctttatcacccccttgtagcaaggattctaggctcctgtcatgaccccggtcgtggactgtggctcattccaaactgatagctactgcacacacaagtcctgttccttgtccatggtcatctgaagtgagggtgagcctggagaggctgcattcctcacccttccactgcagggatgcccagtgctgcagacacagaaatgtgtcagagacttttcccttttccttttaatagtaacaacaacaacaacaacaacaacaacaacaacaatccccaaagcaaatccaacccagacctgggaatcagaagaaacatgggttctaggcttgtcttctctacttaataactgagcattgatggaccagttcttaagcttaatgttctcatatttaaaaatggaatcagatattagggcactacttttttcttatcaagtattgtattcaaatttcatcagacatacatttaaataaaccatttttagtatcagagaataatgattactcttaccatagctagttctaccaaaactgttacaaacactcattatgaagtgtgaagtttgatatccatgttaaaactcaccctttgcagtttgccccatcatggagaacagagttcatgttcgttcatgttatacttagccaagataaaaagcctttatttgaaagttttcttccttgcggtgttaggtctgtccttcctccctctctccagcaagccctgctgagtgcacaagaaccacagcttacttgtttgggtatctgaactcctgtcttcatactatgcagcaaggcacttccactgggacatctcttcagcccaggttacattgctcttaagttttcttttggcccaggtgtagaatcatattgctctttccagtcacctgtccttttcaaatgccactgttttatgtcttgttccttacttaaaaactactcagtttttgaaattataataacatcacttgccctttctcctttttccctccaaaccttcccgtttagcctgcctcgctctttcaaattcatagcttctgttttcattaattgtagttatatgcatacgtgtacatgtttaaggaatctttcaggattcttagagtggaccttctaatagtccccatgatgataccatcagttttataaaaggttcaggttaaattgacttataaaaatcatgccatatgttcctgttcagtgtagggtaactctgctcagcctgtgtttatctcagcgggtatatttgtagtagtaaaataggtgagctagagagctgacagtcaaaggtagcagatgactctaagagcattagctaaagcattaaacctcagcagggtgaggacacaaggctatgtaaatttgaacctgacaactataaattagggtacagaaaacaataaaacctgtctttacagacttacggtgccttttcactgtcaaacagaagggacagtggcaggattagcttcagctttcacattttgaattttacgtgtctcacagggaaagcctcagttgggatacttgctattcctaactgcttttaaaatctaggcatttgtcttatgttctcatggggatgacccaaactcagagaggttaatttgccatgggaagaccatttttaaagcaaataggtctctagctattttaagagtatgtttgccaactgtgcactttgttagcccagtgaacatgcgtcgtaagggaatttttaagaatagtaggaatccatttggtattggataaccagttggtgtgcttttccctggggaagactatttctcccagtctcagcatttctgagttgcttgtggttctttggtagggctgaggtctcagcatgtgtattgctgtccctactcgtcttatgtttaggcagtcctgttggggagacgttatgagtatagctcttgacattcatagattaatgaaaaacagaaagaggccttgagtttgaaagagtacaaggaggtatatgtatgggagggtttggagggcagaaagggaagagggaaatagtatagttataatctcaaaaaaaaaaaaacaaaataaataattaaaaaagattagtgggagtattttttaaaactaattagtttatttttttatttacatcctgactacagtttcccctccctcctttcctgcagtccttcccctaatgggagtcttttgcaaattggcctgcacagtgtcagaaacatttagcttactctgggtaaatcataatgatatatttaacttacatacatacccgtatatcttaactttcttgttgcatttagttttaggtgagatattcaggttgacctcattggtctcgctctaccccatttccttgccaaaatactgcacctcctggcagctcacaggcctgcctccttttcagtagcatgggcatttcatttcatcctggagactcatgagtgtacccttgctcatctttattcttgctcagcccctacttagaggagtggagaggtaatgtcactgcagcactggctgctgaagggaatgtacatgaggaggctacaggaggcagccattgctgtgtgacagtaaagggttctgtagcttgaaaggaaaaagaattggtaaacgtgtctatgtaaattacgcccccattctgggttaattctattaagtcaagtagagatgagttagacgttgagcagagttgaagcagcatgttgggatgttttaagggagtgggttttggtggtgtctagctttcttccatttgtctgtctatggagaacactctttgctcattgtatgctctacaaatgagattagttttggcactgggaaagccaaattatcatggatttctacaattacaatcttatcagattcaccaaaattggggaaaggaagctcggagccaaagccagggtcttagtgttggagagatctgctttgtgtgctagctcagtgtgtcagtcctgtaaatcttgagtgggtgactcactgctgccttggtttcctcaggggaagagcttgttttcacaggcagagtgctgatggttaccgagtcttttctttctgaatgaagaacatttggatatgactgtccagtgtttctggggctggggctccagctttgcacgggttactaattgtgagatcatgtagcagattccttgccgcgtgagggagtgagcaggatagtaatgctcagctagaggttctcttcaaggttgtattaaaggtcggctgtgccggctttccctgatcgttcattcggagaaccgtctcctagctgtacagcttgtgtatttactctgcgtctgccctcagttcctcagggctgtggaggtttctgtggatggaatgcctgttctgcaagctcagtgacgctagttgatttcctttgtccttagctgcacccatttctaattctaaaagtaccaataggagaagtaagatgtggctctttttttttttccttagcatcatttataactcattaaaacttaacttagcctttcgttggacagttattcctatttatccaaaaaactttaaatttggtgttggtgctaaattgttgattatcgtgcatttccattcttggctttgcttgctcggaaaatgattttcagcaggttgtctagcctctgcaggtctcaggatctgtgctgctgcagtgtgctgctgtatggagaggcactgccagtgtgtctggcagtttactatatggttttctaaaggagatagaggtgggtagcagaacttgcccactctgctggtgtaggtcctgagatgaagacagtactgcagagaacacaaataattaagcttgaggatgaaatcctagcacttaagaggtagaggcagaggattagtaagtagctcaggattttcctctactacatagtgagctggaggctagtttgagcttcatgagtccctgcctgcatcgtcactaccattttttatgtgcataaggtaaataggatgcaagggttgagtccatcaaagagcaagctaaatagggggctctacagagatttctggtgaacaaaatgctgtctgaagctacatatttattatttttctgtttttattgttttgagaatttcgtatctgagtaccgtacttacattatttctccccctttaatatctccagtgtcttcttcatggcccattttcctttagttctctctctctctctctctctctctctctctctctctctctctctctctctctgtctgtctctctctctctgtctgtgtctgtctgtctgtctgtctgtctgtctctctgtgtgtaggagcttgttactgggaagactgattttccttctctcagcagtcattgcctgtaagtctttctctgggggtgggggtggggtgggggtggggtgggagtcggggtgcgtggagccttgtgagctttcctgcatcatattgtcctgtcaactggtgtgctcattgttcaggccttttctaggcagccatattgttggggtttcacaggggcagcttccttttctcatgtagaagatacgatcttgctgcagatgctctggtcctatggtttttaaaatctttccttctccttttcctcctgagccttaggtgtaggggttgttttgtagatgtatcagttgggactggacttcgcatgatctgtttactctacagtttgaccaagttggctttctgtaatggtctgtgtctgctgccaaaagaatcttttctcataaggcgtgagagctgcactgccttgtgggtagagtgctgttagaccgtaggctgctttggtaatgtggccatggtccgttctcctctacgttctatgacttcaccaactgtagggggttgggggctgttcccttggtagcttgcgtaacacctttcagtattatgaacgttagtcctcagggagaaggcttccaggtcatgtccatctctgttcctccgcggcctgtgcttgggatgtaagatgtcttcagcaacagggatttacctttagattctgggaggcagccgagggtagcagcagtagcctgtcttgttttgggagtctcttgactgtcctgatcaataccttgaatggaggttctcatgcctgggggttattggatagtctattgcacttcagagtcattaccacctcaatctcaagcagaatagcgctctctctctctctctctctctctctctctctccctccctccctccnnnnnnnnnnnnnnnnnnnnccccctccctccttcttatctccccccctccaccatgtaattttttttttgttagaacaccatgactccctgtggctttttcaaacacctcagtgtcatctgtcttccctcctttcctttctctcccctccccagttaaagccccttccagtgttctattctcccttctttgcagtagtgtctggccattttcctccctagagacactttaaccccttcttggggtcccattttcctttcctgtttctgtggtgattcctggttctaaactcacttctgaagatcccaagctaggaaccacagctacaagaggacacatggcatttgtcttcccgataaatgctggtacgtggcggtacctcacccagcacagtattttctagttccatccatgtacctgtaatttcatgatttaatttttctaaacttttaataaagatcttataataagcaactgtaatgaatgtggtaaaaactgatgagtgcttcatgaagtgtaaggaagaaaaatttctaacatatacccaggactatgattgacgttcagtcttgccatgtgctggcagtgcctcacgattttactaagacttgcttgaaagcagtattctaacttaaggtgtctgtaagtatagctcaatgagtttcagttatggcataaaaatattttaaaatctgtaatagtttattacattgatcatatgttgaaatgacaatatattttctaaattaggctaaaggatacattagaaatgaattccaatagattctttttatttttctaatcttcttttagatgtggaaaattgcatgtgtagtttgcattttattcctattaatactacccttatatgttgaacttaaaatgcaagttaatttcataaaaataataccacagaaacaaaatagcttttgtgtagtacctctttctatttcctagtgataactgtagttagttttctgtgtcttccagccattttccaaatattttgttcttctgcagtacatggtaaagaatcatcctaaagggtgctagatttgagagagatttcaggggctggggattgcttagtggataaacattaatcatgtaagtgtggggactagagtttgattcccagaacccacacaaagcctggggaccttttggccccttctgtaaccctaggcctcaggaagagatgatgggggtaggggagtggggattgggggctcaagggggggggaagtgctggccatatagactagccacaaagatgaggtctgagttcattgagagaccctgctgcaggaaataaaatggagagggatcaaggaagacactcactatgaaccttggattgacacatgcttacatccccatgtgcaccatacacatgtgtgcacacaatatacagagaaaaaaagattttgcctattttgcctatataaatacttatgcctattttgtctgttgttcatgctagcacagtccatttactaaatctgtgtatttacagaggcaccgccgacccagtgtctagcctggtgcatgggaggcattgattagttcccctgggcttgtacactcattccttcagtgataacagtgccatacgcggagtgtggtgctaagtaacatctcatacatgatcaagagtttggtcaaaaaaaagtttaagtttttgcaacataatgtttgaagtaccttttttttgtctgtattttgaccagttattcatataattgcagatctggttaaagtgagatagattgaatttaactaacagtattgttgcggttatgatataaaggaaggaatggtagcgtaatcgtggcaaagtcagtttcttttagtagaatggtctgtgctctgtcctaagtgtgggaacactgagtagcagagcggcagctcccacggcttgcctttttctgattctagagttaggttgtaaactatctggagagcgcttaacttgaacatttgtctttgatttcctccattatcataaaatgaagtgacacaatgtaggcgttgtctttgcccacatgctctgtgtcgtgcctcatagctgtcaccgtgatggtgaaggctttttgcagcacccttgtggaaccttgtaggtgctcagtaaatggtatattgacacttcttcatttctattacgttgcggcttgttaactgttactactttcaccttcaagtgtgaaagctgttggctcatgaggctgtattgctagatccagataggatatgcgttattgttattgacatagctcttgtaaagtagaaatggggataagtattgcatttatcttccaggtcccgttttacttttaaattcagaattatctctgcagtctgtttaggaatatttaaaaagtccccttcatagctctgttgttttaagtattacttcactgattgcagtacaccctgttcttgttcttaagcttactttaaaaatatactgttgtttgcagatgagtgttgttgctagtgagtacagatcacccattcgttggtttagactggcgtattgaagcagttttgtttgagcgggactttagagtaagtgcttgtcttcgtagaagatgtggagacaagtcatttggtctgaacttggtactttattacactttcacacactttaaaaaaagaagaagaagaaaatggacatgttgccacaactgaaagatctttttttccagaatgtattttactgtagcctacccaggactgtttnnnnnnnnnnnnnnnnnnnntttaatggtaatatatggcacatatattaagatagtgaaacactgtgagccacttacttagaagcctgaacatctaaaagtgaactgtcaccaagttgtgtactgacaacacgttaatgatctatcttaagatcacctcataaagtgatgatttacaacgtcagtgacttttccactgtacacagaggcctgtatgccaaatgtttatagaccccccccccccccccggcacagatatgtgaactcctagtaatttaaaaattctgataaatgacacttaatggcacgatcctgtgaatattgataagtactagaaattcagttggtaaagcttcaattccactcctgagaccctgtttctgagtttaggttaaaggtttgcctgacttctgtagtctttttctcatgtctcctgataactacggtgatttcaaactacatttttcttctgcatcaaatccaggcagcactctacatcattaaatattaaaccttatattcaagaacattattcactcattaatattgcattgcagcctaaactgcattgttcaaaacattttaggatgttgtgcaagtctgtcaaaatatattaacaaacttagtcatgttgaactgaacaaaatatgacaaagtgtttgcatcacagacgtgtcgtaggtttttatacgacccaagcattttgtgttgaggtacttggaaattactgtaaagataaagtggattgcagcagaagccagatggaatgaatattcatctttcgtgtagcatctgctatacatcttaatgaaatgtatacttatttttaatttttcttccttgataattatttatttagcagattattttaactgggacatacatatgagttggtgccattttagcttggtgtaaggtgagagtctcacactcagggaacacttttgtaatctccagagtgttcatcagctgcatggaaccgaaatggggcaggcctcctttgaaggtgaaatagccaggggacttctgatattcggcaaagcaaggaagtggctgagtttaagccttagtctttgtgacaaaatttgttctggattgctgtgaacacatctggtttcttgctcttctttatactgctagttgtggtgagaagccataagatcctccttctgaagggaatggtgggaccatctttgtatctaaaatcactccctttcccattgttactgaaggaagttagggctcttcctattgctttacagagaattccggggctggaaaggggagactatttataactgatgaggggaggggttttcatagatgtgctttggcggtactaagcttagacgttttatctgaaatgtgattctattgattatattattcttcagtgattattaccatttaatgggggaggtcattatgagaatggggttgcttgtgaaatatccaacatttattttttgatgaaatgtcggttatgtggatcagaattaaaacaggcagccaatgggctcatcttgaacacctacagctgtcatctcaagaagggtggaaatggatattgtgaagtaaataatgaaggtggcatagtggattcctgctgggccagagctaaattattcattttgttagtttagctaacatgattcgtgctgcgtgggatttgagtactatgtcaatgactaatactgcataattaaaaaggctcagctcctcgggcctggaatgtagtggaaatttagaaatgattgttaacatcacagaaacacactttggtttgtataagtagatggtgtttacttagtcattctgaagtttttcagatgtaagtgtgtgtgacacataggcagtgtgtccccacgatattgttagtgcagctatctccagtcccgtccagtcccgtggttggtcacactccactgtgatttcttcctgaaaggctgcggcgtagcaaacggtccatttcagaggcctggtgagcacagtctccctcgtgacagcatcaccattccttttcttccctaggagctgtgttgctgaagggaaagggcatttggaaaactaattactcagtgtgggggaccacatatgcattaatcttttcaaaggcaacttcagcatttatttattatattctcaattttggtcatttttggggctaaacacagatataaactgcttttagtttttgtgtaatggttcacactatatcttatagacacagtaatttgactataccttttgttttatgcattttttttcttagtgggatttttacatacagggttgtattatggaatggctcttttttttttttttaagatttatttattattatatctaagtacactgtagctgtcttcagatgcaccagaagagggcattagatctcattacggatggttgtgagccaccatgtggttgctgggatttgaactcaggaccttcggaagagcagtcggtgctcttaaccactgagccatctctccagcccaggaatggctcttttttaacagccatctcagcctcaagcatctatgaatgaaaaagggaggcgaacacattatttgtcacctgttgccatgtgatgtcaatcactgtgcttgcctctgcagttgcatgaggatagagttaaagttcagaccacaggacaatgcactgagaaaatgcatgcagatggaaggctttagttatggccatgaacagctagctgaagctaaacttggactcagaactgaacatgctcttagagtgtcctattggagcattgggtttcatacagttaagatcacaacacagtgaccgccatttgttttgagtcataaatcttcagtttgagttctgcctcttatttgcctgtgtaattctgagccatttgtttaactttccatctttgttttctttgggtctgaattgggagtacagctcccctgagggatttttatgagaaataaatgaaattgtgtgtgtaaacgtgttaaaatatgtgggtggcattagagggttctttgtaagtagcagctattatattagtagacagtgttatacatgtaaaaatgtacataatatgtatgacttacaagtttaaaaaatctcccgtgctacagagaacacagtgaacagagtagggggtgaaaggaccacagaggtctggcgtcttttgttagagtgcatttaaatcatgttttgtgagaagctcagagcaaagcctgaatgttaagcctgcctcctgtaggttgattccctgtctgcgtgctgtaatctacacattagactttaaaaacaaaacaaaacttgatttgtactataattcaggcaacttctttttttataaagtctttgatgtgaattctgtataataatttttaattcttgaagtacatttatagttgaacttttgagtcagagatagaaatatcaagtgaggatatagtataattcctgtatctgacaatactgtgttgtaaactaggatttgttaagaggttaaactatatgttaattttacacgcagcaacattggtattaataataataatggaggagttagagagatggctcagtgatcagaaggtatgctgctcctgcagaagacccactcttggttcccagcacttaggtcagttggatcacaaatgcctgtaactccagctgcaggggatctgacccctccacaggcacctgccctcaaatgcacatacccacagataggcgcatgcacacaattaaaactaaataaatctaagataattagggttggaacgctttggaaaatgacagtgatgctaatggccgtgatggtagcgtggcttcatgggtgtttacttatttccaaattcatagaaatgtgtatattaagtaatgtgcagctcttttatgtcgatcacatattaagtgtcgtggagaaagagaaatcctggtgagggaatgcactggagttatcctcaagagggtgtcagcaattccacttctttctttttatctgcatactttcaccatctcttttcatgtttaaggtgaaaattaaaataaaatccagtatatgacttggtgtggcattcagatcaattcatttttattagaatttgctttatttttttttaaacatggtttcagagggactactagaaataaagtatctgccaaggaacaacttgttggctgatggatagtgtcagggaagcctgaaaattgactgctgtgaagcagtagtgggtgccggagttgtcgctgtgcttcctctgcgtgccaaggtgacttttactagatgggacagttggcttagggccggataggcctcgtcagcacttctcacgtttcctgagggtgcggagttaagcatttgaggccatctttcttcagaggagactgatgtggattagaggcgcgtgtttaactagtgaatcatgggattgcactgtgcccgacgatacaaatttgattcttaagaggctgcttatcctttgttgaaggggattcaggattagtttcgcagtgtgtgttcctctggagagggattgtcctgtttccttacacagcttcattagacctgcagctttccgttgatggtttgaaagccatataggtctttcctttcctcacttggttgtcctgcatccttatgatgtaccccgctgctgctctgtccctgtggaacattgcctttgtttgattgtggtctacagtttgttctttgtgtacacagtgacttcacagtgcctgtaatacatggggcctgtgctagagcacaagtttctttttagaaaagtgtagccaatcaagaaaagatgatatacaaacactattttcataagcattagttttcaatttagtccacccccattgccagatcaacccatccagtctttattgtggttttattttgtttgattcagggtttcattatgtagttcaggctatctatactcaagttccctgtcctcttgcttctgcctctgccttccacttttggaatcacgggcttgggccaccacatctgccacctgcactctagcttttaatttattaactttattctaaagttctttaagtcactcttaaaatgtaacgctatgattaagacctttaaaagtggaagggtccgtggtccattggaggtttgtcaccagtgttgctcattgttgaactgttttcttttccccctttcatttcctgtctcatttccaataacaatttcttcaaaaagcctgagagtggggtgagccagtggatttttttttttttttttttggtgtagcataagaatacacagaggtggactcagttttaaggatgctcctaagagtatgtttggggtccatctctgtcaactatttaggtgggtgtggtgtggggagatggaatgtggagactttctcagttacaggtctgttggctgatcacacactgctggccacccaaggacatgtttcttggctcttcaggtattttcagtgagggtggtacagaggtgggtctcggcccagatgaagtagcagatggaaagaaggagaagcctctttgtcacagacagaaggggacagccctcctcagcgggagcagcttcttgcaggaggtctccacagtagctcacaggccaccatctgtacattggtacttgttgccacttgatcatgagatgccaccagcttaagatgtatcttgatttcttatgtgcatattgtgtgtgataagatagcctaagttccagaagaagacaaaggaagagttggaagagaggtgataattaaatgacagctttctctgaagccaagggcagactggagcctgtaaattgaaaggcttcttatttttctaggctggattgatgagaaaagatgcacacgtagtcatagattgtgacaatttttaaaatacagagaaaaaaattctgaggataagaagaaaattgtagaagttttaagatggaaagaatagataatttgtaaagaaaacaggatctgggtactaggctttgcctctgcagaccggaagctggatgatgtcccagcagaaggaccgaaatcctggggttctctgagagtttccctgtgaggaattagggaatgtagtaatacaaacagctggtccgtagaatctatggagacaaagcatactgattatttttacagagaaatttgatgtaacgattattcatgagacattaatagtcaaaacaaaagaaacaaaatttaccagtcctaaggcagttctgtttaccagaatcaaagtgagccacctacctacctatatagctaacttcctagtaactgtctaaattataaatacatctctaggaatgtttctattttttagtgtatctcaaatatgcaatcaatatagcattcatggcagaggcatgttacatccttttctttcatgtcaagtctttggaatctggtgtatgagctatagtcactgcttaatttgaactattctggactcactggccttgccagaggacacatatgtgtcatgcaagacacagagcatgaagaggtccccacctcagcctagggagcaatggaaggaggtggagcctctgaagtgggggtaccttctggtcggtggtcgtgtctgaggtggtagaagggagggtactagtgatttgaggagggtaccagtgggtgggactagtgacactggagtggcacccaaggagcttggtcctgcaaggttgaataaactaacctctgcatccagctggattggagcaaagccaccaggcaggtattccttcagccttgcagttgccctctggcgctccctaatggaaactctaccagcaccaaccagcaaatcactaacagtttagaaagacccagtgtgaagcagggtatagatgacagctagtaagctgagagtcactgctaagcaaccaacagcacagttcatcttggaagaatagtaagaaaagaatgaaagctgagacccctaccgagaggaagagaagcaccttggttcttgaccgttgaagacaaacctttgaggacctatagtggagaagtgcatttgaaaccactcaactcttaacagaaggattggtaggaaaggaaaatatctggtttgctgtcacctgttttgccagtctagtacctgcatttgtaaactgtagtgaaaacactactggtgttgagagtggaggccattgaggaccagagcagaacagcaaaggggcttgttgctgtccggtggatggcagcctgatggaactaggaaccaggagacagaaaaggagacagcaaacaacagagtagaagaaaacaggttgtttcagttatcatgttagagattgtggctgagcatttcccatgtagagatcaaggctgctatgctacatcatgttgacccctgtgtgtggcatgcacagacagacagacagaagcacgtgtgctcacaaacacacgctagctatgtgttatttatactgaatgcagttaagacccagtaatttgttccaatcttaataaaggttaaaaattaatgggttagcaaagctacaaacaaggaaacaggagaaaggtaaaatcaaaggtttttagagcaaaacaaaagaagcagccgagtgacctcaggagcagtttataaacaacaatcattagcctttttgtgtccctcatgttaactcagtctgcgaaccacaaaattagaaatccaaagagcagttgattgaaaaaggagggaaaggggttgtacagctgttctttccctacagcacagcttgctctgtgctggctagaggagtgcgcaatgctttggtcttcaacgtctcccacagagaagggtgggcttcgactgtatgagtttgcagcccacccattccacctgccagctctttatcagagaggcttctgctttggagggtgagaggttgtgttttagttcaggctggaggtctttcaaatagaaacaaagggagtattcactgtgataccaagacttagtgtggcagctttcacatcgtacttaccctggcaaaatgtgtgttttgtgaagaaagaaagagaagtacaaacaatgaaaaaggcagagtgtgtgtttcatatacgtagtgtagttagcatctctgagagcttagtgggctctttatcagaagctactagtgttggtcaggatgctacatagtcatttgcccattgtttacactgctcatctgtgttgcagctgtactggagggcttgatgtttgtctagtgaggactgtgataggaaagtgatattcccagagatgattgtatttgccccagttctctttctccagcatcagcacatacccagtgaggaagctgcagtaggcaagatgcaagggagcagcatccatgcagtaagcaagctgcttaatagagctgatttataggagcaggttgtatgtttcttctcacatcttctataacactagactttagaagtcatgattctgggcagtttaatgctgtctttatctgctctgcaattatccatctgtattttgactattacgacaatcagtgtatactttaagctaaagtcatgatcatgactgaagatgcctgtaaataaatattcatttcaagctagaaaaagaagtggctctgggtcattctagtacagcagtttccagaggaccctttcatacaattcctcatgtgtggtgaccccaaccataaaattgttttgttgctacttcataattataattttctgttatgaattataatgtaaatatctggcatgtaggatatcttttgatagtgaaccccaaaggggtcacgacccactcattgagaaccactgctctagtagaagacaaaagggctttcggttgtgatggaccttcgtcttgtataagagcttggctgtgaatggtgagcaaagatgggtgcagtggctgggtcctgtgtttggtgacaataccttgtgccctaagagcagaatactttctaaatataaatgcaaatattgtgcttctcagcagagtagatatttgaatttaagacgctcccaggagctgcagagcaggtggctctttcttcccaaatgaaaactgaaatagggagttcaggtaacataatgcatcctgttttatgggaggcagccatctggaagggaggcatggtaagtgctcagagggtggccacagagaacttcagttacaggtgtcagcgtctagttgggggcagagtttcctgtgtttttgtttttgcatcattttggagctaagctggcaaatgtccagctttgtgcaagttaaaataaaataacttaaaaaaaaaagaatattcttgtgaaaagtaaggtgcactagtcagccctccattgtactctaggagcctgaggccacagctggtaagactcagaactttggaggagccagcccatgactggttagccatgttgctttggggagacagcacagcatgatgggattgtgaccaaaaagagctcttcactaatcatggaccaggaaggcagagagagggaagaagcggcatgtcctagtccccatttgaggacatgttccacagtgttctccaggactgtccctaggttctgcctcttagagtttctgtcaactgggaacagtgtgtggagacttaagcttttactctaagggcctttggagacgtgtaagatccaactttaacagaaagaaacttggattgtcaagtcacagtgctgtttgaaataatacatcgagacagaggaccagatagatgtcttcatcttcttggtttctctagaaccaggtctcagtgctgctagatctatcagttggtttttaagactgtctctctgactctgtttttctctgtctctctgtctctctatctctgtttctttcacacttactcactcactctcactgtaagttttggtttgatacagtttcttctttcattggaaatatgacagtctgctcagggttgtcatgaaagttggaaggctcacccctacaagtgtgatctgtacccgacacatgctaagcaggataaaatgccacttctgtctgtcacacatacagatattatatatgaacttagcagagctatattaatgtgcattcatctacatgtatgtgttttgggatattaatccatacacatttccttccaggatttgaaatggtttgagttgaatgctaagcttgtataattttttatttgtaaagtcttataaatggaaaactatacgcctgttctgtcattatttttaatagtctaataattagttcattgaactacctagctcagcttttctgtctaaaagtggatggtaaacagaattttcagtgctagttcagcatgttctaacaaaatatgatacattaaaatgaaatttatccttactattaaaagtgacctgtgggttgccgccatgcgtttctttctgtgcttcagtcttttggagtcagccacattgcagtgttttgtagatcttgtctgtgtgtaatggtcggagttcaattttagataagtcattcagtcagtttatctctaacaattaacattttcccacttattctcacccattatctgaggctcttatctactttctccagaagtagaatggctttatatattaaattataaagtaatttgctaagctggagttgtatagaattacttagtgtctacctgtatacaacaagtttgactatttgggaatgaccaaatgagcaagattcagtggtatcaagagtcagaccacattggacaaccagtgacatatatttgatgttggaaaaacatataagagcgtgtcttaaagtaactctgaaccacgggggaggtgctacaatacaaataatttcagttgggagctggtgtgcacctcctctccccctagcctaggacctcagcttggtaggcaaacacccttgattctctggggtctgttccaaccttgtctacttctcgttttgagcaaggtctctctaaattcaaagcctgactttgaacttttattctgtgacccaggcaaggccttgagctttatactcttgagcccctacacctcagtggctggggttacaggtgcatacccaggctccaggagggagagagctttccagggggtttaagaaacatggctttgtaaatcgggccattgtgtttcttttcctctggtgtattccttgagtttttcttttgttcaaagtggagggaataatgcttttcttcatggagtgtgatggaatttgatatataaaaaatgcttagctaaagttatttttaaaatcccctttccacttccttaaaacctttaacttcttgagaaggcaataaagctgggtgattttaccctagtatcatgttatagagaactggatttttataccagatatgtgagttgaatgtaatgagtaattttttttttttgattttacttaaaacggacattcaataatattcattataagagacttgactggtgtttagaaactcattttgctggtctatcttaagtctctcacctgattgagaatatgcaaagaaaagaactaagttgctggggctggaggtgtagggcagcaccaactggtatttgtttcattaagctcaggcaagctatccaattacttaatgcaaataggaaaagtttacactaaactcctacttctttgctgaaaactctagagaattcaaatgaggagagatatgtatttaaaagaaggaaatttaaatgaaacttaaatcaggggcttaatgtagaataatattagaccaggagatctgaagtaataagtgagaaatgccagtaaataaaagggggctgtatttgctcagatgcttgttctgtttagttttgttttgagataattcttaaatcatcagagacccaagttataaagaaagcctcatttttatcccaccaacgggcgagtaatgtgcctccttgccttgccttgccttgccttgccttgccttgccttgccttgccttgccttgccttgccttgccttgccttgccttgccaacgtggacttgactcttctgagagtttgtggcacagcagcgcttctctctgaccctacagttccatgtggctttggtgttcccagatatccagttgggttgtcttcctggggacggggtgggcagagaagaggttgtgggacaactgcctttctagtggtcactgaagtgtgtgtgtgtgcgcgcgcccatgtgtgctctgtgtgtgtgtgtattgcagggtggtggagaggcgatagaagacaagggggcagagaagatgctccacagagacgtgggctcacagagaagcaggcgcttctaaacatgttagtagcttttctttgtaaagtgttgtactttgtgacatgatttaaatgagtgagtgaaagagggcttttatctgaggaaggaaagggtgtcaatgaaaggttttggtggaaggtttgagaaagggcccacagaaattaaactcttccaatatggtgccatcacttctaaaggtataccatttatctgaaattccgccttttaaaataatttgaaatggccggacagtggtggtacactcctttaatcccagcactttggaggcagaggcaggtggatttttgagttcaaagccagcctggtctacaaagtgagttctagaacagccagggttacacagagaaaccctgtcttgaaaaaataaaaacaagcaaacaaacaaacaaaaaaatgaaataaaacagtctttgcagaggtgattttaaatgtgtgtgacattctgaaggctgtcaccgaagtgcaattgaaggaaattctttctgagtgtttctcagccccttgatgttcctatgcctcagtcacgttacttccctcacccatgtggcactatagcaaccttatttaaaaaaaatacctcaaacaaaaaattatcatttatcattaagctacataaaggcagagaccgtggttcctacttcattctcagagtttggagcactctctctcactcaatgattatcgaatgaattagtgaatataacatttactttttaccttatgttatatactagaactcagaatcctagaagaaattatccactaaatggaaatgataatattataacatttagagcaaataccttcctttcatttatcccctttaagataaatggagaataatatattaagacatggtgtttgcaagcatttacctgtatgggattcccttttactttaaagccaagaaaatggatctttgttagatgaccctacccaaacattcgtagaccatgagggtctgggtcccactgccagctgccctaagtgtacaaagaaggctttcctaagcactcggtgcacaacacaggcatttccccatgcagttctcattgtaagaagaagcaaacgtaagacatgtattaggatagaaaagtgattattcttgtagctagtttgaaccagtctgtcttgaatctctaagattcaaagagctataagttgatgttcccagatgttgacccccttctcctgtaggccatttagtgtagcctggatatgccaggcatgcactgagtacagtgtgttggtgagaccttttagggtgcagcttgttttctcagctgcttcttttatctccaagtcttttgttttctgtagcatttggttcatttttatctgtggtaggatttgccagccattcattcatttcacatacatttaacaaatgtttgagcatctactctggaccaggcagctgtaagatatgatagccacagaaatagacagaccaagcccttcctgtttttgagcttacaggaaagttagaatgaatcctttgaaaaagcaggactccccagccacaaaccctttgatctacaatctatcctgcctgcaagatgtgctggggccatgaaggtacagaacttgtgggagtggccagtgagtgaatgactggtctaagttgagatacattccacaaaaggaaagccaatgcccaacactgtctttatgaccgagaaaaggagtctcagagacctgtgttacgaaaaagaaatcaataaagtgattcctagtgatattccactatactcagatcagtgcctacctagcccagtcttcatcagagaggctttctctggcagccaatgggagcgacagcaaaacattagttgggaaggccaaattggagatctccatcaggtctcttcttttgaagcttgggaaaccccaaggaagaaggggtggaagaattgtagaagccagagagattgaggactccaggagaacacaacccacagaatcaactaagcagggtgcacagggcctcacagagcctgcatgggcctatgctaaattatctgctaataggctatggctagttagcttggtcttcatttgggactcgtaacagtgggagccagggtatccctgactctcttgccttctcttgggaaccttttccatcactgactgggcttccttgcctggcccttatgtgagggtttgtgcgtggtcttaacgtaacttgtgctgtgctttgttgatattcctaggaagtctacttgtttctttagggaaacaagtggaactgagggtttggggagagagggggtaactaggagaagtgtagggaggggaactgtggtcaggatattgtatgagagaataaaaacaccaacagcaaacacaaaaaaagaggacaccttagtcagcaggtaggtaagcttttgattctagaagttgttgatgagaatctaaagaatcaagccaaatttcctctaggaaggaaaggaaggaaggaaggaaggaaggaaggaaggaaggaaggaaggaaggaaggaaggaaggaaggaaggaaggaagaaacaaacaggcaaacaaaggtagggttgtgacagcatcagaggccaagccctccgcgtgcacgtgggccttcttcctgtcagaacactctgcttccatgtgttcggagccccacattactattactactttgagttactgacatttgtcacactgtgctaagtgctttgtttatgttcagggtaggagctaacaccagtccatgtagcagagcttagggcagtgagctgctggtgcaccggacggtaggtgctgtgccttgacttgactccaagacctcacacagtgcttgtttgtcttcatacacaacaaggtgataggccttattttcttaaatattgaatacttttatatgctaatatgtttgtttttttgttttcatttccagtagtttttgttcctctgggttaaacagttatatcttcatttgtaattaaacttgtgctgtatatgaataaatccaactagaagaaatattctttattaaaattggctacaccaaacagaatgataaaatgtagttgtatagattcacaatctatgttcatgaataatgtcaattttgaatataaagcacatggatgtatctgtgcacatgtgaaatgtctagttcacttcttggcatgtagcaggtgatccctaagtgataaataatgctgttttttcttttagttgtcaccaaacatgttaaacaggaccgctccatttggtgttacttccctttgacatgtctccaggatgtatttgtgtatcgagctgtggctttccagctgcaggatgcatcagaatcacctggggcagggaccgcactgaaaggcattttgctagatactgtcctcttggtttgtcgctgtgaggtgctgcctgggaatttgcattccagaaactccttagatgctcctgttgctatttggaccttactctgagcgcctgatctggggaggcagtaaggtctgaaattatatcctctgtgcgagagagtcagcagctgatgccatgcttttgggtttattaaatattttagagacttttgaataaacatacttttatctgtttttttgttttgttttgtttttgttttttgcttcaagaaaaatatgtttaccatcaagggaaaaagcataattctggaatatatattataagataattttgtcagttataacttatttctaagaatgccagggtatcaggatggtgtgatgctttaaaatagcatcacaaattttatgttctacttcttttcaagggtccccttgataggccagcaccaagtaaaatttagcactcatcattcacactcagaacattttactcagaatgacaccagcataacaattttacctccttttaaagcagagctacatctttgggggtatagaagtgttattctttcaaaagagaaaaggcaatcagaaaatctttgtccacgagattaaactgaaatgatctttcattcagtgcttctgagtgccgttctgtgcaaggcattatggcacaatccagtgccagagtcatttatcattatcatatacaatgaggtgttttagtagattgtaacttaatatggagctaattgtgtgacgaggcaatggatcaccttaatgcaattgtaggcttcactaatagaattagtagtgtgcagatcctggcactgccactgttgtcttcttgtttctctagaacacgtctggtatgtaaggcatccatcagagctaaggtaggtgggagcagtcattcagcagcctggagcctgctataacaggctgattttgcatatgttggaggatggaacaatacactgggtggagagacttctttgtgtttctggctagcttctgctttcatataggattaaggaacctggatcccgacaccttgtcctctactgtgtcctctatgtctgactcatgtcagtgaataaatgactcacttttggaggaagatgatgctaagccttcatatgttcctcacaaaggtggcttgatgaactttgtgcatgtgtgtgtgtgtgtatgtgtgtgtgtgtgtgtgtgtttggagaggccagtgatctagcttagcagtagctttcaggagggctttctaccttggtttttgagactgtgcctggaacctaggacttgctagtgggtttggccaaccagccagctagcaggccagggatcatcctgtcttgtttgtgaagtacagtgttacaaatactacactatgtttttttgtgtgggtactggacacagactcagggcctcatgcttgtgaggaaagctctttacttactgagatgccctagcgatgggatttttttaggtgagaagttttcagttttacctgagaactttgttaaatttggacactttgtcagctggatcaataccttcttctcttagaattccaacgttttaaatgtgtggatggaggctgcaggggattactatagtataaagttttgatagattataagccaatatgatttcagattttgaatttatcgtttctgcttttttattcaggtttttctatttaacataaagtgataccaaccagcaaagtattttttttttctatccaggttattaaataacctaaaaataatttgttgttaaagtaatttaaaagaaagtattgttaccttttttgtcttttcagccttaagcaagcaagggacctagaaagagaaagggctgcagccaatgagcagctgaccagagctgtccttcgggaaagaatatccagtgaagaggagcgcatgaaggcgaagcatctggtgaggctggttctggttactaaagacccctcgtcatcctgggcgtccctgaggctgggaagctgctgtctgttccagcttttcgtgttgagaacagtgatggtcccttggccaggttttcttgagttttatctaagtagctgatgaaggttggccatccaggatgtttaaggtcggttactttacaagtgttgaagtgctggaggcacatgtggcacctgggagctgctgcttgtttgttgtgttgtctctgctaccctgggcacaggcctggccctctttctcttcctgctggccccttccagatgcttccctgggaaagccgcagagaggtgagctaagctttcatcagctgctctccagacctgacaaagaaggaacaaggcttggagaagccttgtaaaggacaacgataagttttctcagtaaaaatattttttttaattttaaagattacataaacactttaaaagataattaacaaaaatttaaaactcacccacccatacatttttttcttgacatgatcatggtttacactggagtgtgttagagtttcttatatgtaactttgaatttgaataaatgatgtatgtatgcaaatatattggtagattacagaacactttttctgaaatgtagtttctcatgatgattagtatcctctgtatccttaccatttattaagcagtttccattggcagctaaaacggcatctcttgtggttcaagactctagcggactgctcagtctctaattttcttcctagaaatgcaggtgaaactgttcagggcctttagtccttgctagaacacactaggacaccagtaagatggaacacaaggccttaaatggagggttttgaatttcaaaacttcctacccagtaagtaaccgagaactgctaagcctagatggggaaaagctccacttctcttctctactctagtggctctctgtctgtctgtctctgtctgtctcagcttcagtttccacacacattaataataggacgattgaaagtttgttcttttaatacttacccatgctgatgggtgcagtgtgataggttagcccatgtatgcagtgggtctgatggaattagcagagtgtgtgctgagaggcttagaatcctctcctagttctttgggaactagataataaattgctaacagctttttcctttcttccttttcttttttctcttttcttcttgttcccttttaaaccttttattcccttatttgaaaagggaacctatgaccaggtgacaaaaaggaatgaaaggtgaagtcagtttataaagctttttcttagtgaccagtctgaggtcccaggctacatggggaggaaggtgttgctagagtggacgtgatagaccaggagggaaatgccagtgggcggactgtggtcagcacattgagcattctattgagtggcgctcagggaaggagggtcagaagggaagccagttagtttaaaggagaaacaaaggaatgggcagctcacttttgattctgcctgccgtctgacctgcagcatgtcttgaagtaaagtgtcaggccagttgtctgagtggtcgttgcaatcacagtaaagtctcacaacctggaggctaaagacaggagaggacagggttaaaggtgctcatgttttaggaaggcactgggggcatttctggtgagcattttttctgtcccctctcttgatcctttgcacctgatacctggaacactcttctctcaatgactaaagcctttacccgaatgtgggagtactgccttgtttacttagtttaagaattaatgattccttacatacacatgatgaggcatgagcggtttcacagaaactgtgaaaccttgatcctgtaagccagtggcagctcacacgtgcgacatggttggcatgggatagtatgttcagcctttgatttgtcttaaccacctgcatattgcctgtcttcacgtttacttaactgctcgagtgtaagatactcaagcatatgttctgttcgtagctttcttactgattgtggagttgtgtggcatagatggccaattacagcactcacagctcctctatttcaccactcatcacaatgttggctaaatccagctctcagagcattagggagggagtaggattgatacagtggtgactcggggtcttctcctgttcacagatacttgagtgttgtggtcacagaggcataaccactgctgggtaaatcttgatgcgtttaccacattatcgctgttattgtagaagacttaacatattcactggataaagatcagaaaataaattcagtaatgtgttaaaaattaatacaaaaatcattatccatagataactattaatattttatttgtgtatatctgcatatgagtatatgtatacttatatatttgtctgtttatgtatacatgcatacacttaagttgtgaatatctttatgtgttttggggtaaggttgtgtgtgaagtcagagctcagtcttgagtattgttctttgtgattagctcaggtgttgtttacctttttttgaagcagggtctctcactgggctggaactgtgcagttaagctaggctaactggccagcagccctggagatctccctgtcagcaactctccagagctggggttattagtgtgaaccaccaggcctggctttttcttgtgggttctagggattgaactcagctcttccatgcttgtatggcaagcacttaacggacaaggttatttcctgacctaaagtctattttttaaagaatcgtgtttgtccagatgattatggttgcatggcaggcacctaccaaccagactagttcctgacctcaaagttctgatttgttttaaaaattctttttgctttcgattgagtttgtctataatattagttataatattaatagattgagtttgtctaatatatttatgtgtgaatgttttttcccaacaaatgattttttatagtcttataaaaatttacacatttaaaaaatatttagactgtatggcaaaaattttaatgatgtgcatgtttttgtatgtttagtacttaatggctgagtatatttcaatgagttccccctaattattagaataagatataaaagaaaatatagaaaattagaggaggctaagtattagctaagagtgctggcagaaggcaggaagactgagttcagagccaacttgggtcacatgagaaagttccgtgccgacctaggctgcatagtaatattgactatcaggaataaaagaatgccctaaactactgttggaaagctgtcaccttgtattcgtggaggtgtgacattctccttgcctcgcccatccctgtgttctgtataggccttaagggtccagattttacaccctgccacctttagaaacagagtgccttctgttgtgtgtagccccatgaccccttctcttgaggagcacatcttcagaaccagcctaagagctgattattctgctgtgagtgctagggccctgtctctgtgcgccttcctttcgtctgcgaggccttgaacaaatagccagtattgatttgttttgtggtctctggaactcaagcattacagcttataggaaagtaaacttctgagctttatgtatttgaattaattagaaagtttttgttcagtcaaactgataatgagaatgtgtatcttttctcaaatatttgaggacacggtgttttcagtattgggttttaaagggaatacacacacacacacacacacacacacgcacatgaataaaatgaaaaatctttctggtgagaagattttatgctaaacatggtattcatgttttggatacactgtattcatgaggattagaattaatttacccatgcttttagtgtatctgttttgattgccatctctcgcataggttgaatttatcagtagtgaggttatatcaacatatatcaagaagtcctaggatctagacttatatttttatgtctctctacctgcctgtatatatatatatattgttgctgggaattgaacttatggtgctgctgagcatgccaagcctagttttagactttggagcattttggatctcacattaattttcagatatgctcaccctatattgtgaggtcttgtctctaccttttcccacttattggtgtttagcattggatttatgacttcttgggtataagtgccaggcttcccgctcagttgtttcagcagctggtattgttgaagctctctcaagagcagagtcatggtggttttgttgctgaaatcttgaaatcggttccagtcagaagtttcctatttggaagacatattttagctggggaaacttaagcctgatctagaaaggctataccatttcctctctgtcctgaatgacttggttccagaattttagtcagattgtactcagggggttgggagaggccactcactggtgactgtgcctgtctgaaatgttcacatgggtggtaaatccttcctgggagcaatgaagaaggaagattagtgacagggtagcaccaagccacgcacaaggtcagtgcagctggacattctgctgtctttaagatcctttaagatcctaatcccatatttgctgtatcatagaattctttttgaaatgaaagagtactaggctgattttttactttacaattatatttgatttctttctttctaaaaatgccagttaaaaatagcgattcagtcttttttctggcttattaaattatgctggtttagtgttagtcatttcttattcactactgagatgttcagtatttcctttttaaaaaaaaatctgaactttaaagcaagccttcatttacttgtgttagagcatttatttaagtatcttagatcatctgcccctaaacgtgacgaagctttcttcattttagaacagatgtttttatttcctgtttcctgtatggaaattagcagtgctaagaatgtgtgagaaagagaaaatccttaggaagtcatcatggaagaggcagtgtcctgcttccattattgcttctccttgagcttctctgtgtttctgtagtgtttgcacccatggcctgacacctgggtctgactggcatcttctcacatagtcttctctgagctttgttcgtttcctctctccctgtctctctctgtctctgtctctctctgtctctctctcaataagaacgcacagttcaataaaagactatcaagtctttgtcagtaactctgtatcattagaaattttataaaagggaagaataacataatagctaaccttaagaactgtccagggtcaagtgtatgctgttcagtgaaactttcctcaagagttagggagggtaccagcattagctattgttctgtctgtttttttagagtacttggtctttttctacatttatctccattgcccgtttattcaacttgtcctgtgtataaggttctgctaattgcagatgtgaaaggcaaattaggtctggttatccttcttcagtgtcttcattgtaggagaggccaaaggtcattcttatcttttatttttcttttaaccttgtaattttctggatgtttaaaaatctcacactgtttagaaaaataacacaaaagtgaagtgagtaaatgcacaaaattcctttctgcaaatttacatgacttccaacaaaatgtcacttttcacccccagtttcccttttgtctgaaatgcaccagtgaagcaatcaagaagaattgattaattttgtgctctgtgcttttctaactgtgtgtttttttttttgtgcttcaaactgtgacagttgaaattttatggtaaaagagaaaaagggtttgaatttggggtatggagaagactgactaaattaaaggaagtggatagaaataccactgctgtccagatgtgagtcagggtctgccccaggcatggaacgcagctcaagcagtgacccggaaaccaccaaggttcttgctgtaaagttctaaatcatgacagccatcacttgattagccaggcagatgaagtttagggtagcactgctcatcctgggttctcctagtgaacacttaaagataattaagaaattcctccctaatttttttttttttttttttttttggtgtaatctaggtgtttgatcatctcctggttctccctatggtcatcctctcaccctagttattcagatatgcacagtgtgctagtttgctagaagtgaagttaatgatcttgagctattgaggcctgtttaaatatacagttccgatcttgtgtttgatggtttttgaggctgaagttacagatatttcccccagggttattggtaagaataggatctggaagtccccatcttcctaggccttgctcagttaatagctgactgtgaacttcaaagggcagcctccttgaagaaggtgagcgcagaggcatgctgtgtccttttgcctcctgctcatttggattcagcaggccagcatagtctccaagacagagcatccacattctgttgtctgcttttatgttctttgttggcacgtgtggcccagcttccagtgtgttatggtagcattataatcgttagcttggatgcacacaaccctgtgaagagactgtggatcaaatgttctctggaggggcaggcagccccagatctctttgctgttactgtgtgagacgagatgtagttcagcttgccagcataccctttatgtgaatgaagagccctaaagcgggtaagaccacagatacatgtatgcttaaaccttattcacatgattatatctcttaaatgcattgttgaattctctgcttctccaggtaggcaaaaaacaaacaatcaaaaatcaaaaacaaaccaaaaaccccaaacaaacaaaaacaaaccccaaaaaacaaaaacaaaactcagaaatctacaatcttaatatccttgtggaaatattatattgtgttgattgtgtattgagggtctaaaggtggaacatgacaaaatggcagaggagattacatccctatcagagatgggaaactttccactgaactctatgtagaggtgacttgttcactcagactgccatgatcttgttgacaaagtgattagagaaggcatcaacggcacatgtaatggggctaaagttgctagggccacttcttagaatactgtcatattttcattttaaatgcccttttgaaagttcatcaggtagcttgaaaacattggctgagggcatctcagggcgagtggtatcttaaatgttagccctgccacaaatagcttattgacatcctatcacttgggtcgttgtggatatccaggtgagatatggagagcactgagtaaaaatccataggtaactgtggggcagaggggtgcttatactttcatctcttgataatgacttggcatttattgttaatatatttgcttcatggcccggttggaaatgaactgtcattagtgccttagaattttattgaactgacaccataatcttatttcccttcaagaggccaagaaatattgctcccagtgtttgccttagccagtaacaagtcagaagtttaacataagcataatcaagtctgtcaaatccctacagatcctaagtaagggttttgcacagtgggttgagcacctctgtgcagcagcagcctttccagttttctttcacggcaagtctcacagctctctgaacattactttccacttcccgtgggagggtccatattgttggctgtggtagtccatgtgcagggagagccacttgtgtaagggatgcttgcagacaccctgctctgtctatcctttctgcatcctaaatggagctgagccaagcttcctttgttgttaatgatctgagctatgccctgctgatgtgtgtaggaatgggtattttgtggttatggagagaagaacactgttgcaatatttccttgtaatcctaaagacaagctctgtttgcctccatcgacactcttctctttcctttgctaactaatgacttctcctgaaaatactgaggggcagaattaccaaatgaagtaaggccttcattctctggagagcaggaatctgtttacagacctgcagtatttattacatacctcatttagcccatttatcattttaatagaaaaatgactcattttagatgattctgaaataatttgaggtaagctacatagccctaggcagagtatgatttacggagacagaaccatgctattttccaaaaacaataatggaatggccagtacggataacttatgattacttatgctagacttataagatgtcttcattgtcacagaaatttgttgattaaacatttagagctctctagctagtttccctcattcttttatgacaggtggtttcaccaagtcccataccctgcacaaagaaagatcctttgtttgttccacataccaacttcaagattaacttgcaattagtgttttggtattgtcctggtgacaaaggtcacagtccatgtcatggacgagtttattagagaaggttaaaagacttcaaaaccttgtgcttagcaattaaacatcttctgtttagaatttcttcatcccactgtgtacacttagtttaagtcccattgaatttaagctttaaatacctttcctttggacacatacttgattcactggggcatagctagctgatcttctgagatcctacctgtaaatctagttagtactgtaatgtaaacatggccaaaatcatagccaaaacaatctgagtttgtttttgttacttatcacttaataggaatttgaaatccattgtctcacttggcatattctgtgggggattgtgcattaacctgttgatccagtaagtattcaaagaaatggtgaaccaaaaagttgcacaaaagcagactcttgggttacaactcaggtctcctgagactccaggcttctattttggtcccagtttcaaaattgattaatttcaggtaattattattttaacttcaagtggaattgattctttatattagaaaggaatagaatgactgaggagcaggtaagtggtcaaagcagaattactgcaggcatgaataaaacatgtaaagaaatgcagtgtgttgatgtacatgcagaggaagtactgagatagcactggggctacttggctggagtgcgcatggctttaactccgggccagcttgagtctggtctcatcttggaggactatattcataaccactgtactaactgggatttaggataatctgtgtaacattgaggcattgagctgtacagagtagaaataatgtaaaaactttaaagttacaacttccagttgcaaattttagtattaaaaatagttaaccttatgtgaacctttacaggaagtctttaagtgctctgtttattcttatagtcatttaagaattttcttgactataaatctcttctgctatgcttcaggagaggttgatacatatgcagggggcctgtttttttccagctcccatctctcccaacttcagagtaagtgaataaagagacacactgttgctattgttgttatctatggtgtaaaatctttgtagaagaaagaggtgagtctttttttctggtacgtggtggggtgacagtaggttgatttaggagaataaagtacggctactgtagtagattaattttaaatataattgtatgtgttagcatacattactcataaaataaattctattaattttctgtttttctaaaaactagatttttatgagaaattttagaagaagcaccagagctttgtcttataaactacagctctgaatagcttgaagaatgttcccactgcctgtttggaaatgagttaacttgaaaggtgaaagacacaaaggaagaatgtcattacagaaccattaattattttccaattggccttctcatcccaacaagagtcttaggtcagaaatgaaaagctaaggttatacattgctagataaggtgtgcacggttgtatgtgatgtgtaatgaatgtgtatttctcagtgtggaaaaagtaaatgcagtgtaagaaataagtagggatccaggagacagctgtgcacacacggatctgagttcaagctttttttttttttttttttttttttttgcccatggaaaaagacagacctaattgttgaactctgcatccccaggagagatcttgtctcagtcaacaaggcagatgactcttgacctggtctcaacatcagtgcacacatgtgcgtgtgtgcctctgtgtgtgtgtgtttgtgcacacttgtgcatctcctttagagttttaaaagcatcggcacttccagtacatacataaatgcacatggaatgacacacttaaaattaatttttaaccttttccttgagataatttcttacactaaagctgtgccaatggtacagcaaattcaacttagattaatctgtttgtagtcctttctcattctctttgtatctaattatgaatattagactcacacaaatctgtatttacatactgtgtaatggttgtgacatcatatgttgtgtctaagtgatctacatagaatgactttgcgtgagtttcagagtcatatttttgaaactttatttgttctgtttttacagatttgataaccaagtatggttgttgaaattaaagaaactgaactttaaccctcagtccagtttctggttttctcagttctccccagggttgcagttgctcctcctcacagagggtggtacataactggctcacagactgcagctgctaaggatagccccagatcccactttaagcgttaatttgcaaataagaggaccaagatgaagatcctttgtgccttcattggcaagagttttagaagaaatgatgagcagagagggagatgggaaggtctcatgtcaacacgcaggttcatactttatattgagtgcaagttgaggcaaagtgaatgctttggaaattttctttttgtaaaccaaaaatgctattgcaggcatacaagttatatcattaaatgccattagaaagtgaactccattcttacttttctacagaggttttgagtagtaatttcatccgaaatagcctcctctgtgtccctcccttccaggttctgctccatgtaatttaaggcaaattgcttcctttcctttatgccctttgtttccatctgcttaaaatgaggacagagtctttaatgtacttctttcaagtctgttaccttgatgaataaatacataaatacagaggttctttgagaatgcagagttccacgtatttataaattggcttttcctaaagtaatttcatttcatgaataggctaccagttccaggagtcacgtctattttaattttctttagttattaaaaaagcccatttcaaaataagaaaaataaagttgaaagcctttattttcttggttaaattggatttttgtcattgaaaacttactctgattagttgaaatgctttggtcctaggcacacgtatagatagatgctcttagccactgtgcagacagggtcagacagagctttctgttttggaaagaagtagtctttggctaatgtttgcttgctttgaatgatgtctcaatactttgtttgcaaaatataggtattttaaggaaaaatagatattttaaggtgtgaacagaagttggtctacttataccttaaaatgactaccacatgccctgactttgcagcagtatggggacctaaaagtgattccagccacaatatggggagtctgaaaggcattataccaaatgacataagccagacacagaaagactgactgcaattttgtataggttggttcccaacattgaatgcagaagtggcaatggtcattgccagagtctgggatcaggaagatgtggtgatattgctcacttgcagttattctatgaactagttctgtgtatctgctgtgtaacatagaccatacttattgtaataacatactgcacactgaatctataaggaggtaactgtaatatgacaggtctacaaatgagtgtgattatagtaatcagcttacaatcaatacatatgtcaaactattgtgttgttcacctgaaatatgtaagttttatttgtcaattataccctgataatggtaaaaggaaaataaagaccagggaggagaaaaagaaattgtgacttaaatttctgttatatggtagattaacccttttgctacctctaagctctacagttcatcctttcaaaattttattttctttttcatgcattcagctcattaacaatcatttgttaagctttaattgaccattgtattgtctgtcttacccatttctgacatttctttccttttctagatctcctttgcccattttaaatttgcaacatatggacagtggcatctttagaatgtttcttgtcatttcctgtcatgcatgggtgacagaatatatcggtttttcaagcttataatttttttaacctccttatggaactcaatttattataaagagactggctcagttccaaccttgaaggcatcaaaaagaacaagttctaaataccatcatttagaatgcagcatatttagctattctccatcttgtatgtcttcatttccaggacacagccatattagtacattgggttggcatgtatgctataatgttgcttcccctacctcgcttgtctcttgcgggatggggggtggggggtgggacatatatatagtgagccttgggaacaattgagccctgagggcaacacaacaaaagcagattgtgaagtagtcaggctttgtccttgtgaatgacgtgatacaaatgcatgtgatggattaaaatgtattcaccctgacaggaatcttttattcgaatggaaaaaaaaaacccatcaattccaatctcaacaaaggtggttgctgcaagggagagcgattgccagggtggcacatttctcaggcttggttcttgattctgggctctatgttggttataatcttgtcttggtatgctatgtttccagaatctatcagtttttatgattctttggcattttctcaagatttatgtacgagagggttagctttttttgtctggcaagtagcaaagcctatttgagactctctgatcaataattgtaaaataactagaaattgatccatgccagttgtaaatccgttcatgcatttctattaaagtttgtcaccagaagctgtacaaaagacctcatcattgaagctaggacagaagcaagtactggctgtggtatattaatggaatgctcatccagaggtcacagcagactgagttctcttgtagcatgctggtatagccttagtggggagctagagcttagcttgtgtacaggtagagacatggtgtaatttgacatgcattcatctcctccaagatagatctttactgagcatgactttgtcctcttttccacttaggtctgggttttttttttttttttttttcatagaataaattcagaaaatgcacaggtgctatgctttgtttttgttttttaatttatgtgcgtgccatgtgtgtaggtgctggtagagactcaaagaggtcattaagtcgtctaaaggtcgagttgcaggtgtttgatattcccttgtaagtttttatgtactgggatcatccccacttccttaggaatttggtcggaatatggtaggtccgtaattttttgttttgttagaattgtaggttaatctagttattccctatggtggggccaaggccctgccatcatggcccacctgagtgtagtccacccagctgtttgtattatgtcttgtggtatattgtttacttttctcattggcttggtgaaataccttgacaagagcaacttaaggggaggttgtttgaggtttcagtctgttatggctgggaagtcacagaagcaggaatgtgaggtggctgggtaacacctgtacagctagcttttttagatacagcccaggattcaagcccagggaatagccctcctttagggctattaatatagtattataatacaatataatatatattaatatattaacatgcattaattaaagttaatctaatcctagtaatccctcacagatgtgcttggaggcttgtctcatagcttattccagatactatcaaattgacaatcagtattaactattacaagtggaattaaatagtcacatgcttaatatggaagaggcgttttattcaaagtgtactgagtttaatgttaatatcattttaaaaagaaaaacaaaatatcctaactttctagctatagttatgattggtatttgttcaatctggacaatacagtcttaattaaatcaacacagttaatgaattctgatagtctgtactttgtatatgaaaaactaggacattatttttcccctgccttgtgaatgctgtagaaagctggactgtgacaacagagacgggcatgcataacagtgacagccagatgttgggtgagtgctttgtccacagccgtgtaattatttgtttgggaaggtgaggagagtaaattctttatagccttggctgtgctcactatgtagtccattctgtccctgaactcacagagtttggcgtgcctctgctgcagctatagacgtccattgccactgccactgccactgccatgccactgcccacttagggaaagcttcttttacaacttaaacttgttggtgatttacctgggcaatgacaaaatttgggaacatttgcttctcttgggctctgcccataggcccttgtagaacagggcctttgctggctttttggtagttgtatttgcatttgtatgactttgtgccctccataccagagacaaaagcctgcttgtggtgcactgcacacctccattccagaggaatttgtggactacccagggcaagcagcagtgtgttgtagtctatgcactctggtaagagtcatgccaaagtgggcttcactctactggaaagcaaaggtcagaggagagtaaagcctgctgcgcacaggtttctgctttactcctgccctcagtggccattacttctgctgtcctgctggtttctctggctgggatattgtagatggttgggggtgggaggggtaccttgaacagttttgcttattctcaagggcagcacaggaggggcctgtggtgacattgtattgacattgccacttcttttactctgtcactcccttctcactgtgtttggggacccctaccttgtctctgaaggattcagatctaccactggcagattcataaaattgtagggccaaaataataaagcttaatcctcttcaaacaacagaattgtgtcataggacacgggtgacacagtgttgctttgtccagttcattcagtcagatagcactatgtgcttgttaacccattggctttatgcatcttctgccagatgctgtgtcacgggcagaagagcatagttcttctaaggttttcagtatttatgctgcatagtatcatataccacatatggtcgtctttacctttcctgaacatgatgtgggtacgcatgctccccttctctaactccatccctgcatgccctttgcccagcatgtccccctttgtgtacccattccagctctcaaccctttcattttcatttcatcttttaggttggagcatagcataggtacttctaaagccttcctgatttcctaattcagatcatagccttcagtctattcccagaaaccactgatcataattttctcatagcttaggtgacaatataaggtttccagagtgagagggtaagaggaggctcttaatcattatgagggtacacagagaaacagggatattccagacaagccagaaaatatggctgccttgtctgtgtcctttcctccatgtttgtttgataaatgagtttgttgctggggtggaataaacagtatacgtgtatttcagtactctgtttacaattaggcactctttattgtttactggatagaaattttgttgttcccgtaagggctagaacttgagaatagtctttcctatgacccctgagatagctagcagattaaaaatggtaagtaggagtggggaaatgcaactgagaggcttgttgactggtccctagaccataccttgggataatggtgatttgtattcattctgtgcagctatgagtaagcagatgtcaagactttctctgtgcaatagaacatgaggtccaggagcccttatgaatggtatggaagatggtagaactgtgtttctgaatgcaggaacctcactgtgcatggacacagttccttagaaatagacaggtgacaggcccagaatctgtatgctgtacttggtatcttcacagtcttcatgaagtctgactgcctcttggcaatctattaaatgcataacatttgagaaggttataatcacttaggaaggctgttagaaattatgtagtatggacttcctacagctctttttatggagtgtcaccaaggaattcctgtgatgaagagcccagatgacattaattcttgggcttctatatataaacgaaggacctgccatttaaatagtctgttcactggccagagtaggcagcaaatgggaaaatgaagtgaggtgttgaatgtaataccaagtttatttccacatgcttttaacggctacattgacgtctctattttctagacagctataagagacctctttggagtatctcaaaggtctttataaaagatgcagtatttcactgtcacctcccattctcattttttctttattgccaaggggccaacagctattgagaaggtggacatttaaaatcgttgagtaacgagcccttgattttattgtagtctgtctatattgtgactcctttggcaaactgttagtgcagattttgagccttgggtattgtaatactttatatcaggcacccatgctcagctagcctcatactgcttaagttcattgtatttgctatgaaagtgaacgagtcacttatctacccactcatggccggcatgagtactttcccccttacacttaagtgctaccttcctgggtggattgtttagtgttgaatcctgtgctgtgcttcccttccttcatggattgcactaaaatccgtagccaacttgtacttggtttgtgctctcctgcaactatggatgcagataccaaagggagagctgtatgatttgggggtgattcaagttttatctagtcatttgagtcccttgtcagtaattgggattgtagctcagtcgtccaacgtgaaagagacccctgggtttaatacatactggcaaaaagaacaagacaagaccagacttaactaaaacaagacagactgtcatctgttgcagcctaaagttgtagctcagttgtagagtgtgtgccttgtgagcccagtgtgcccagggctcagtatgtgcgaagtaaagataaatccctttatgagctgttagaaagtacacatgcactagtgtagactagaggtggagctgggcacgcagggctttcctggtcctcctgtaaacagctgggtgaggagggcgagagagaagaggctacccgtcctccttccctctgatgcttcctcatgcggcctggcattcaggacagttgtggtgttaggagagcaagagtgtttgtttggactaaggcctgggttttgagtcagctccatgtacaatgtgtattaaacgtgttatacagcagccattgcccatcatatcctcactccctttccttgtcgctttcccttaggggcacataattttttactcgatattatgttaaagactggccataggtgtcatacctgcttatggctgcttcagttcaggagttgctaatatttagatagttgttgtacttacctttaatacacacacacacacacacacacacacacacacacacacacacacacagtgtttgtttccaggattagcaatcatccgtgaagtcagaactcgttttgcatacagttaacatgttacaatggaggcccaccaaggaagcatttggggctttctccttagtctttagagtggtttgattctaatcacgttaaaataatatttcactacttctgattttcctaattatcatgcagataaacagtagggatcatgacattagaataagtgagcagcttatgatttttgcctcagaaaaagaaactcttgctgttttcctccccccttgagctacacagcagtaacaaatgagcaagtccagagtactttatgatagatagttaatggtgctgcgcctccgccatcaggcttgttcccacagcatctgtcacagttcagagtcattagcatacctttaatggtttcttttcaaaataatttctactagggcatttagaatgcatcaaggaaaaatattgagttgtagagatgaggaattttaaatgtagacaaatggatttcattcccctttgtaattttgataaaacccaaaccgcatagcaacacaccacaaagtataatgcatttcacaacatttaacgtactacctaggaattacttttttaagcattctaaataaaacactttttaaaataaagaggtttaatttacaaattaaaaaaacaaattgctgggttttgttaagggattaatcccatgataagccttattctgcccagtgtttttgtacagcatctcacactcttgtcttgtagtcagccaggaaatgataggattcttataagatgaaaactggtttttacacacatacacacacacacacacacacacacacacacacacacacacacacttcccataactaaatggatgaataccagtaatgtggaaaaaaaaagagagaagataaaagaaaagaaaaaggtgtgtcactttaaatatccagttagttgtgggaagtaaatctgctatgaacaaattaagctctgtcttttccctagactgtccagtgaaaggaagggtttgttttcttttaaaaattaaatcacattaactgtgatgattttaaataaaaaattattttaaagagcatttaaatacagaaactcgcatgtacttctagaatacatgtgtgtatgtgtgtgtgtgtgtgtgtatatatatatatatatatatttccttctgtgtaatggctctttagctgttccatgctacccttacatggtttttataataatactgatagaacacttctcatccaatgctcttttcacccctatagagacgttttattttccaatatttttattagtggttgggaagcaagtaatatgtttttttttaaacttctcgtttaattagagccaaggtctgaatttggtttttattattttcttgaaacattgacattgcatgaagtcatttgttcattttgtatatgttattttttaaaagactattaaaaattgatagtttcaggagttggaaatgctttccagatttcatgcatttttgctttctggaactgtcactgttctgttactttggcaaagcagggtagggtcataggaagaactcatgacacaaacatgtatagtgtccaatctgttcagagtccagggaagcatagtgtcttgttcttgtctcaggtgacaggaagggccaggacatgggtggagcttgacatggccctgcttcagaggccgctcattactctgtgtccctttctatgcacacccagcatcaaggcaacccagaaaggccctttctctgggaatataatgagctctgctaaaaaccagagacttgtttattgataaaagcaggagcagtgttaaagggagttcgcatacacctaaattccaaatagtcttcaaaaccattacttgagcattctgatgagaaaccagttctaagaagtatttagatattttatatttcttgacaacttctatgtggttatatatcatgttgactttgattacatgtatgatgtggaaacaccaagaactattatttttttcgtgatgttggtgctaaaaagttgtcagtacaatctagaatccttaaataaatttagaaaaggggtgacagaccagatgaaattccaattacagtacttgatttcagcatttcccttccatttgaatctttaagggagaagtgaaaaacaacattatccttgagaagttctcagcctttaagcagccgtttttaattacagaaaatgccttcaaaatatgatttgcatcctaaggttttggttgtgagaatgtccattgttagtggcataatgagagaacaacatcttaaatggaacacaaacaaaacaaaacaagctcactctttctatgttttgttgaaagacttgaccgtaactgaccattacttgacaaacactggcaaattttccatagcaatattgtattggcctatggatttgggttttactattagtcacataaacacaggacacctggatcaggcctgaaaaactatgaccacagttgagtgaggactgttttagaatgaatccagattgcaaagcgtgcttttttttttgtgaagtcacctccgtgggaagtgactgtatttatttttctaagacctgccttttctcaaagttaagcttctcccttgtcttttctgcccctgccccctttcttaaagaattgccttcaaaaagactgctgctttgaatgtcttcccgggtcatacattttcatcagctcagtctagatttgattttttggaacagccagaagtcatctggagtcgaggctgtgggtgataagactgtaataacattttctgtaagacagaaggcacgagtagagagcagtgcgatcagttttcaggagacttgtggatggatgactgagaagaaagttcctgaataggaaacctcagtttgatatatgtgtttacttcaagcattcctaccatttgatcatggcatctgggctttgtatatcgttagcgagttttttatgtttgtgctggttctttgtcttagtagctgtgccttgcaaccgattgtctgtgggattgttacggttcctttatttcatgatgataatctttttggaggttctagtgatatctgtgtatcacatttgaaaagtagcaattaaagtgacacaacacaggagaaaatgaagtctcacttaatgttcaattataaaaattagttactctgaaagtttttcttttgtagtttaacatttgaaaattggcagtcagattctaatccttattttaaatatatttacatagctctgtattaccaaatagcatctgccatttagcatctagcatttttcatgctcatatatatatacatatatatatgcattcaaaagtatagcctttcaaaagtaaactctgatagtttgcagaactggaatcttcccatattgttcatataatattggctgtttaattacagaccattttaaatttgaagaaattctgagttcctagcatatgtatttctcttggctgtgtgctaccttagtggatttggtgttattttgtgtgttttctcttttcttttctattttttttaggctaaaatttggaaactttcattttacatgccttttagttatcacaatttttatttttattcttgtgatttcatgtgtaacatattaacagaagtggtgatgtttattgagtttactctggaggaagggaggaaggagagaagaatggagggaacaaacaaaaagtagcacaaatccagagcacatggatctagaggtacagaagccagagcacgtggatatggaagtacagaagcatctagctgctcagaagcattccactgtttctgcttatttgtgcttcctggtttatttcattctgttttaaaaaaaatcaatgaattaataaaatgatactttcaatatcacatctaataaattcaaggcattgatagtaataattagccatgtctttgggctgttttattagaatatgctattatctgcttgtttcttgaaaagcatatctacacaaaaataacagtcactggaaactagttgttgtgtttataaaaagataaaggggggttatgttttatggaggtatggtgaggtgtgggggaaggagggggagggtgcctccacaggcccgtgctgaggcatcccttctccctgagggaccagccatattaaggtggagagggaagttaagagggtagtagaggcagaggcagaggcagagggaggtaggggccagccctgagcccttggtggtggtggtggtggtggtggtggtggtggtggtggtggtggtggtggtaagaatggggatagagagagagagggaaagcaagagcaagagaaaacaagagagcaagagaggagcaagagagcgaggagggggcaagcagctccttttacagtggggtcagtcctacctggctgttgccagatgattgtggggtggagcttagacagaatgctaaataacactaatgtttcagcagattaactcctgtcatgagcatgagaaattttgtccctaactagcaaaaaaagaattcccattcacatacacctttgtagtagaagagacaactgaaaaagctcatttgctcattgtttcaggatagaataaatgtcacaaaaaaaggaagatcaaaagtaaagaaaacattaagtagttataaaatctacatatattttttataaaatctaaatgtgtcttctcattataagtcttacctaaacacattattggttactcatttcttcatctacccagtgattgggataaaatactgccaagagagttttgttcaagaatagagtcaggtttgtgtatcaagagtcctgtcaccatggagatcagtttgatacatcaacttctactctgcccttgcattgaataaaataggcacatcagagtaatcattgggcaggaattttctcacactaacacccagtgtttgttgtttccagttaacttcagctccatgtgagaagcaagccacttccaaccagattaggcttttattcagagaggtcacaggactagcttgaagggtgtaccagcctgactagtcaaaaaccagttcatcttatttaattagtgtttgttgagagcctcttacgtgccagcatgttggtacatagtattcctcaattcaggtgtgttacaaagatgttgaaataatcataaatttctctattgcctttgaaaattataatggctagctaaagatttctgatatattgaatcattccctaatggttagctgagtgtatcttatcaaggctaagtatagtaatcatcagatatttttgtcgtatttgatgtaataataatgtgtctggtctttatccagcttataattattaaatggatgtttgaaagtgtgtgcatacagatggttctgtttatcatttttagtaaaaatgtttatctgacctatgtaaatctgcactctgaggattatcccttatagaatttttagtgttcacagcataattgctaactggtatttatgtagattatttgaataatctcatgggacatgggaaaaagcacactatgccagtgttgtggggttttctcccatctccagtgttgcttcagaaagtattatgtgcactttgtgtgtctggctctaggagccggtcttggagctgagtttgaatatttacctgagtgacttttcttttcttttttttttttctaagataaattttgttttgcttgctgtctgtcctctctctcttctcctctcacccctccctctctcctttctaaaacctctgtgccttaagtcagtgctgtacagtgactccttgctcctcagagcactgctggccttctggattgctcatgaattttcctgtaattctcctttaattctcccttttggtctctcccattgttctatttcctgtttatcatgtttaaagaagttggagtcatttgatcatagcaaaattattttaattttagtagatagcagtagttcattttgggtaataggcgtgtttgtgtgtttgtgtgtttgtgtttgtgtgtgagacagagagagagtgagacacagagagagaaagagacagagagacagacaaacagaggagagaggggggaattaagtcagttgtgtggaattcacttatcacacctccaattttcataataaacttgtcgaaaagtatttttaaagaatattttacatttttgcagttacatagtcgttttcgtgttaggcagtgtgagctgaaactgaactttttgagacagtttaaagaggctgtgatgatctgtacctcagagcagtgcattgcagtgcattgcttgttttgctctagagatgctaacaggtgccaggagctgagaagaagcctcacaggagaagcttggcaaggtggcagtgcaggagaagaggggaccagctggcaaaactacaaaccaagagaattctgcttcggtacctggctttaaaatcagtgcggtttttaaaatgtggttacaaggaatgggagtaaaggagccttacagtaaaaaaaattgtgaaaaataattgacatttacattagatacaattgacattaattagatacaattaaatgtttattgtagaaaatttagtaatggatttgaaaaacctcatgtataaatcctgtaagttgtagtaagtgtggtttatgttttctatgtatgatttgttttcaatgtgtatatttatgttcatgtaatatatgtatgtatatatgcacatatgtgttttatatgtgtgtatttttagtaattagatggattggatggaagaggtataaataatttgggctcattttctaattccaaggtattctaaagtcttttattgtagtagtacattgtgaatttcacttcctattatttattctcctgtgacatttttaatgtgtgtatgttggatatttggatgtttgactacttctttctcttttggggtgttctgacaatttctatttttttcaaatttattaaaatgccaaagaaaataatgcctttgaccagtaaaattattaggtgaaagaatatatttgatacaatcattcttcatacaggcaaatatataaatgcatattttcatatatgtctaaagaaacatttctgtcagtttataatcctgttagcagtgtgagagtatgtccgattccttaccctcctttcaggattgggtattataactctgtttcatttgtggttgatatgagagacaagcatcacatactgataacttgaattgcttattaatttttctttctatctatctctcatctattatgtatttaacggttggttggttgcttgctttttatgaaacatggtttctctgtgtagcagctgtggctgtcctgcagctttctttgtagccaggcaggccttgaactcacagaggactgcttgtttctgcctcccaagtgctggcattaaaggtgtgcatcaccatgccccactccactttgtcgttttaaaatattttttatttgcctcctactcttcgtatttgtgagtttgacttgatatatgtcacatgggctacatctttgctttattgtttttatatttttggtagggtttgtttataattaaggtttatttgatactgttttatttcagattaaattttagtttttattttatttcatgtatatggattgtttgtctgcatgtgtattgcaccacatttgtacagtgtccatggaagtcaagaagagggttttagatcttccaaactggagttgtagatgattgttaagctccatttgaatgctggaaatgggacctgggttttcaggagaggggccagagctattaactacctgtggagccctctctagccccatattttttttccttcctgtgtttattttagcatatggtgtctcactaggtgtttgtacaaagttttgccagcatcagttttttaaataagtaatttatccattcttcttatatttgtcttgatcattttacttaatgtagaattaaggtagtttctgatcttaaaattctgttgaattggcacagttgccagtgctttgaccactgttatttattgtagactcacaggattagaaatatttgtcaaggcaattctccagacagaattgccgtgctagtatgatctatctattccaaatgaacactgctctctgttccttgatcattttagtactcaaggcacttggttttcttcttaggtttcaagaacctttcggcaatgtctggagtgtatacacaagttgaagttttttatcttctagtatttagatatactggtggttattcttcataggttctgttcatagtaatcccctcttcctttttttcttggggtgggcattgtttggtggagtccctttctcttggtttatagttcactcctttattattgtgaatggttgggtgtcttgtaacaggcagagtactgcacctcatccgatgtctccttgtagaccatacatagcatggagctatggtctgtatacctgtaaagttcatttagccagctgttctattcccgtggtttgctgttgagaggaattgtgtggcagcatcttctctccctgtttggcactcctgtgcagctcctccttgcccctcctggtctaggtctcattgtaccttttgcagttatttagtgtttgtgtggagatatcttgttttaatatagtaagaggggaagctgtctgaaaattctcctaccgtagaaagccacaggattcaataatgtaaaattacagtggtttctttaaagtcttcagagaattgcaattattaacatcgcgagtaattttctttcttccttaacttacagttgttagagaacaatttagaaaattgatgcttctgtcaaaagtcaggataggtaggatacatgctccatctggatatgacaacattaagaatcccacaacttttactaactgtgaaaaaaggaatctattttatactccattagactgttgcatatcataaataatttatagcactcctggttcctgtctgtatcaagtgtatcaaggatgataaactagttgatgtagacctttttttttttttttttttaaatatatgcagtagcattccactttctgttccctttctattccttcttcattagagaaatatattaggcctggcaatttctagtcaatgactataggactggagtcctcctaggaacagcaagaccagaatgtcttgtttcttaatttaactactaactagattcctggagaacagttcagcctttgtgtgctcactttccttgtcaaataaacttagatacttcaaggagttgctctgagaagtcacaagaggtctgtcaatatcctgtctcctccttccctggtggtggtggtgtgggtcaaactgagaccttcacacatgccagggaagtgtcctatcattaagacacccctcagcccctgaaatcctgcactaaattattactgctgtgaggtccctcagctccactgcagtagttcgaggactgagtcagtctccgaggtcttgttcacaatctcctgtcctgtccatggcatcccctgactaggctgcttcccttatcgaacatctaagcaacccagacttccctcgaacgattggaaaagcagcggagcaggtggcatgtaagcagcaagcagttctgtgcttctagttcttgctgtcgctagcagtgtaaggagcctattattaccagcaagtgggaggtcttattgctgtggttgggtttcagagacagacacagtttgtcaagaagaggatgaagctgataaagtttgtgacgagagagccggttctcaagttacgtgtgtgtgcagcagaacagacgctcgcaggtccaagcctggagtggcggttcctctgagtggttgatagttttagtggggatattttgaagaggtcaggaaagccttgtttgaactgaagtgtggttatgctgatcagctgggagtctccatcagcttgaagatggcttgagaatccagcacaggtgtgaatgctgaggccgtaactgtagctctaagaagtctaagaaacaagtgccttggtctatgtgcagtcttcaaggatgacataattctaagaaatgctcttgtgtgtcgttaccttagctaattcttagctaagataaagtagcatatgaaaggacagaactcaggagctatggccactatatcctctttgttatatttaacacacagaacctaacacttaagagctagaactgtagcagtgaataaaaacatatatgtgcatgccctgagcaaagcacagaagtgcctgctttgaagtcttttgacagggcattggccattaggaaggtggtttctttgcctatagtagaactagaatcttgaatgcagggtcctgccctgggtctaaaacttctcttattttcaattcttttgaaaatacaaactgacagggtggttggaacaatatttcttctggtctgcttctgaataaaaatgaaatctgttcaacaaagcacttgctttttactttatgccctcatgctaagtcctgttgataacctgtagattatatatgtaaaatatttatatatacacagtgtttatatacatgcatgtatacacacacacacacacacacacacacatatatatatatatatatatatatatatatatatatatatatatatgtattcgtgtagtctgaggtagatgctgtcacatggagaaaatgacccagaagggagagacaaatgaaaaacacagaaagtggtacaggcttctagtgatggccttggtttctctgaaaaacagagcccaaacagtctgcgctccagcactcagcttgttctctgaggaaggacttcccttacagatggctacagatttaatcagggacttagggtgcatgaagggagggcctcagttgtatagaaaatgtacttacctgaagcactccctttccaagggatgccagataattgagttatacctaaatcttgaactgtttaacacatgtgcacacacgtctcatttctgtgtgctgagaggtgttaaatggcttgaaaactgtaattaaatagctgggatcgtgctgcagaaccattgaacattactctcagccctgagtgctaaaatttaacctgagtagctgtgactaatccagtctttgtaacacatttgagttaagaggtgtgtgttcctgttcatgtactttctcattagcactaatattgctaatgggagtgacagatgtattttagttttgctttctatcactcaaccttttagagtacttgctccttagacgaggtaatttgctctctggtacatttatggacctgattgttttaacacttttactcaaaagggagtatgtctgtggggaccgttttagttggtgggcccttgggaagagaagtttcgattagtcatttgaatcataaaagaagtgatggtggtgggtcttgtgagtagggttcccgtgtgtctcaaatatttctccgtttgtcatgaatttggaagaaccattcccaggttcccgattttgcactctgagtttcctttcaggttttatttctgtagtgttagtactatagagaatagttagtgtacttaggactactgaggtactaagtagttcagccatgttgacagggaaattagaacttgccaagcaggcttggaactgcaccattatttctgagtaacttcaaaaatggccatttccaagttgtgaactgtttcgtctcttttaagaaagggtcttgtgtgaccttgaatctctgctcctttcacctttacctctggattgctgggtcactggcttgtatcactttagcctctttttgcaatgctggtgattgaatccagggctttaagtatgctgtgtaagcattctaccaacggaactacagtcgcagcctggtttctgcctgccttgcataactctagccttccccaactgtggacatggctatgttaagtctttttattattattatttatttattattatatgtaagtagactgtagctgtctttagacacaccagaagagggcgtcatatcacactatggatggttgtgagccaccatgtagttgctgggaattgaactcaggacctttggaagagcagtcagtgctcttacccgctgagccatctcaccagcccaatgttaagtcttatatataatatcaaagaaaaatgacttggaaatctagaaagtggggtgtgggtcttggtcttactagtttgaagtccttgagcaactcatgagtcttccctgagcctgagcatgtccagctgacaagtggagagtgattagcctctagcatatgaactttctaggagacctgatgccaaatcatggtaaccacatggaaaggatatgatgcagctgcatatgtgtgcgtcagatacagcaagaggaagggactcatgtaaaagatacaattatttgataataacaactggcaagataaaacaatagttgtgtttgactatcctctgaaatacacattttcctcaatttattagaggcattttctgggatttttttttttaagttcctgatattttattgaaccattaatatgtttttatataatccagactttagtcagttaattttttgaatggcagtattcttctacatgaaacacttcagtaataaggttcttcaagaagtcagtgcacttgggccaatgaacgatcagtcggtccttttatgtcccatagtactgcaataccagctgccgtattaaatctcaatcagtaataatattctcactaattactatagttggtttatatagtgagtaaattgctatttgtaatgttggattataataactaacacaactaattgccaaccacaaataagcataaatttttttaaaagcttctgtcaggagcttgaagtaggcattgctccgtgttatttccgtcaatgtggaaagacaggtcatgacaatcaggtatacatttataatgcaggccaattaaaaaacacatgtaagtattattactttaccaggagcctttgaaatatggcttatttaaggcattttaccccaccccatattattaagatataattgagatttgaagttaaaaaatgcatgtagtcagtgtggtacatgaatcataggtttaaattgcttgtaattttaaaggcacttaggggaattgtgaaattctcataatgcagtcttatgtttggaaaaggttagaggaacaatagtctagttattttaggatttctgtcctaaaaatagtcctaaggtagccagccgcatgtgagcaaatccatgtttagttcttgttaactgctttttatgttttcccttaaaaccccttgtgtttagtgaggtagttaagcggtgtataatttctgtacaggccgcaatcttgttcttgtaaactatacagctggaataatgacaacagcatgaacggtgccagtgcctttagaagggaatcagctaaatggcacttggaattttgatgattattgctttgaaaagcccgaaaatcacaggtcttggctttatagtttaattacttgcttaacaattgcaagtgattcactaaataagaggcttccaaacaaataacatcagtaactctgtcatgcctgagcaactccagttttcttgacaatggctaccaaactgtgtttagctaatataaactgttagtttagcagcaagcagtaggagctttgagcagccattgatgaggtgccagtaaattgagcacttctagcagtggtgacactggtgtcaagataacttcagcatgcgttatcagaaccagttggggaagcaaatatagtaattatccacatccttttttgatattggatttaataataatgagagccgtccagctttctggggcttctaattaataattggttcttaagaacacagcatgtggcttctcacagtttgaatgagattaggaaaatagggcaagcttaaggtcccacatactttcatgaacaaattgaaaaggcagtgtagaagaagagcaaactgtaggctgagactcaggtgtgctggtgtgaaaatttaatttgtgtctttattgacccatgtgctccttccttgctgtgtcttaactctgtgacatttttgtgagtatacctttctcccaacctgccctttctcactggtcaaccttttatttcaagttgactctccagagtcagatggcttcctaggctttacttacatagcagccacacccttctctgtaatgtaatggaaaagtgtgtctggtcccgagcttacagtactctgtcaccgtgggaaaactgtatgcatgcattctgtagaagatgcacgttgattagtgagttttgaacttttccagggcaaagatctgatgctcttagagtatgggctaaggacaatgagccttgactcagccccagtgaccaagcagggaggtgactcatggactgttcagtatacagggtgttgagtgtgctcattttcaactcatgaaggatttattagtgtgtaaccttactggccaagcagcagcattaacggaaaaggagcaggaccttcatctaatggaataataacagcgagtgcttattagggttaactcctgccacacagtatacaaagaaatattttaaccattgttcctacgtgagcttgtcattttattgttacctgctttaggaatgactaagagttagagtggctgagcagttcattcacagtaactggtcagtttggctctagactatacctctgggttgttatgccatgctgtttccttactaaatatgacttagtataattgtgaatattacctattagtgtgtcagtactatgtgaagaatgatccttctgctgcagacacatttttattaagaagtttatgttttaatgacttcagttatttcaacataatagtatatgaaagtttttttttaaagcttctatattttcttttgaacagttttttttctatatttgaatgaagtctggaatttagtagtcaacaaagttttgcttatgttctgattcacaataatacatttataccatcacccagtacataaaactcattagttcttctataggaaatccttctacttgcaattcattattttctgtcctcccgtgttttttcttgtattaattctatttcattataccagtattattagtaaactgcaataatccactagtagttaaccagcagtttgaaaaatcaccacaaaccagtgctgtctggtggggctcacactagccagtgaagcctgtgttcgttcccatctgcccctgccggcctcaggcacattctcttctaattttgttagttctgccagcaggccttgtgagcaattggattctgaggttggattaatgttttccccaaggctgtgagatttttctccttggccatttcatcatggtcctttgggggtctgtgggagtcaatgacatgactgtccttagaacttctgccttcccagaagttcccactctgaagctcctctgtagcagggaggttcgttataacaactgtagaaaaactgtctctttccagttatctcatttctgttttgttcttatgttgctggacatagtacataaatacaccttagcattaatgaagatgaagaattgtctcattatgtcctgtttcccaggcagaccttagcacaagccgtgaggatatttctctacttgtctttacctagaataagctgatagcaaagacaagataatctaacactatctcagtttgaggtatccctatcacctagttcattcctgagtgtgcagaaacatgttgagtgtcttctgtgctgggtctttcaggctccaggattatcaaggtaaatgagatacatgggtttctattcttttgtcatatagtctactggaaaagatagacaggaaaacagatagacatatggataggcactaagcattagaatgtggagatatatgaagatagttggatctggtgaacaagttgtgggctgttctttctctacttattcacaacccaccacatggattgttaactctataccacaccaggtcctccaaagaaattccagaactgtgaaaccatctttatgtgtaaaaaccatgcactatagcagaggaggtgtcatcacctgcttgcttattagaaatagtccctttagctcaggttggacctattaaaccagagtatgcattgggacacagtttttatgagaccttatatgaagttaagagtttgaagtgcagacggaatatttcttatttgaaaagctggggactaggactgcttcagatgttaagaattttggattttggaatatttttgtagatttaaaaaaaaaaaaactggctgagtgtttcttatccgaaaaatctcaagtgctccccacaaatcctaaaatgtcttttcaggttttcgtactagtgatgcataacccaagttggtctggagaagcgattctcaggctggacttccaaacgcaaagcaaacaaagcaacagtaacaaaaaagagatgggactgtttgggtttgggtgtggaaaggtccatgtgttgtgtcagaagatggccctggaggaggagttccagttacttggcctgtgctcatcgtgagactgagagccctgctctcttcctcttcccattccttcctggctctgtctccactgcactagcctcagtttggtgcctcattagaggtccaaaccatgagaccacttggtctatgactggaagctccaaatctacgacccaaaatagaagcattttctcttaaggtaattgaccatggtgtttcactgtgctgctagaaagctatagagtcacagtacctcactccctgccaagtgacattgggcggatctttaatctgccagtagagatcatcaggtgccagtgttactctctatgcctgaggagtccacacaggggcagctgtcctgccctgcccactaggcagctcccttctctaccagagaacagccacaaaagtctaaactagctctcctccagcatccatcattctggaatgctgcttgtgcaggccattcctgtatgcctgcccccagggtctgctacaatctcttttctttttctttttctttttctttttctttttctttttctttttctttttctttttctttttctttttctttttctctttctctttctctttctctttctctttctctttctttctctttctctttcttttccttcttcttttttctttttctctttctttatctttccctttctttttcttttttctttttctttctttttcctttttttctctttctctttcttcttctttctcttttccttccttccttccttccttccttttcctctctctctctctctctctctctctctctctctctctctctctctttctttctttctttctttcagtgtagacctttggggcctgctttcctggccacctccctcacctttgctgtggccccatgagtaatgaccttctctgatataaatggcacaggcatggggttttatgcatcctttggacccagttgtggatgagggctcttaaaggaaatctttgtctttaggtgtcactcacagccagtgagatcagcatctctgcaagcttgttccgtcctaagctgtagcgttttctacagcttcactggctgttccttcaagcagctgagattgggatcctgtgttctcttcaaatctgagcataccctgtagacattgtaggggattctcatgctcaagtctgtgagacaccatgattgcatttgaaaatccacacttcttgttcgtgtgtgcgtggcacagcgggtacaccgtgagaaacttctgataacactggggcaggactgactgccgccgaagagttactagagttaagtcagagttctccttcctgagatagggtcagctaccaggagagtttgttgccatagaggtagctcagttggtaactgagtatagtatcattctttttatgtttgaaaatttacagcttaagttttttagatatatttgcttattacttttatataacttagaccagagtcttttgtaggactggtcagagctaggttttgaatgtgcatcagaaagggatccctccagtccagaacttctttattacccttgctttggcctttcatctagcacactgctgtagggatcagccagagccctcaaaggtggctgagctaaatggagttaaggggaggtattcgcagatagcaatagtggttatagatgaagggactatagcgcaaaggaagctgtttaaggccttggagtttatgaagtctgataagccaggactatgaatcatgatctggaagaagagctcaggtgggaagaattgaaaggaggtacccaaaattttgtaggatgtggaaatgagaaaacttagcagaaggcttatgtgcaaataatgaggctggtttgaaatacggggcttgtggccctttgatatgtgtctgcctttgacgttaaggccctgtgtgagctggcttagcttgtgaatcctgaccgaaaagaacagtcagaggctgtagccgcagagctgctgtgtaatagcgacagctcctggagttactcaggccagtgagcagagccgtccagggcggggatggccgcctctctttggctttgtcttagtgactgcttgtctttgacagggaacaataaaatgggctgtttgattgcggactgactggcttcttttccgtgtccctcccgcaatcctcctttttcatgttgcattatccaaggtgctcttctcctctcctttctgaccctgagttccatgttcacagcccctctcacccaggctgtgctctaattggccaagctgtaacctggtagcagcacttctgtattgccttttcctaattggtgtcaggggctgctagcagagcacagccatgttggattgattgatagacttgcttgctgtcattgccaggcttctgcttgaccaaaaattctgtgtatagcttttgaaagtaaaaattaatatgttaaacctatcccatagtgtacttagtgcatctgaaataaaatcagctattaaccattaaggagtacttttgatgttacctgacttcccctgggcttgcagctggcaactccaaattttgttctatttctaattcacagctggttgttttcttgctttgctgatgcagagtaaagctgcattatgtttcacactgcctgctgcacagtgggtttcttcttttcagaagtaacacaagcatagtgtttggggtgtgtgtagggtaggggaacatagaagcattgaaaatactccttcagaacttgaaatttccaagctcatgccactcgtgtagacaccattagggtaaaggtgactcctaagaagaaatgatagagcttccctttcagaagctgtttcatgtcattggcatttattttgaaggtataacagcatttaggcatatgagtgtaatttatgattagtttacacaaattactcactgcctggaagctacagaaggctacaaaagagtacattttaaaatctcattttaatactttgattagcactgtggatagccagtaaaatgaaacagcacagtgaccttacagcaactagatattaccaatgactaaacctatttggtacctttgtctttctgagtttatgcagcaaagtccttagttatttataaagccacgtttctgttacagcaagataagctgatcaatctttaccaataaccatcttgcaaagtattctcataaaagtactatcttgtttgtgtttgtattgtgggaacttttaaaagaattttcatttggtgctttgaaaagtccaaagtcagttattatttttacattttattgatgagggggactggaatctaaaagttttaatctttgaaaatcatggctgccacatatgtgacctagttatgtcttgaacaagtccttgggactctatgtctagattatggtagtgactcactgtcttagggtttctattcctgcacaaacatcatgaccaagaagcaagttggggaggaaagagtttattcagcttacactttccacattgcttttgatcaccaaaggaagtcaggactgggactcaagcaggtcaggaagcaggagctaatgcagaggccatggagggatgttctttactggcttgcttgctctggcttgctcagcctgctctcttatagaacccaagactgccagcccagacatggcaccacccacaaggggcctcttgatcactaattgagaaaatgccttacagttggatctcatggaggtatttcctcaactgaagctcctttctctgtgataactccagctgtgtcaagttgacacaaaactagccagtacactcaccaagatgattttatcacaatgttttacgtctcaagtggccttccatgggctcatgtttgactgttcagtcaaatttggtgcagttttgaaggtcatggtgcttttaggctgctgggtctgcctgatagaagtaggatttgcattccattccctcttcctcactctctgttttctgccccattgctatggtaatactcacctaattcctgctgccacacagaactgctctaccctatctgccattccacagtagaccagacagctctgaagctgtgggctaaaagtcaatccttacttggtcacagcggcagggaagtgcctggtatacctgccctgtgcagtaggcagcatgttcttgcttttgaccagactggtactacaggcctcctgggttttatattgtgttcagaagattgatgtaggtgcaggtcaaaaacattgaagtgctaagggctgaatgagtaattcatgctatagatttaggcttggcaggcttgaactaggagagaatctggcttagtatcttaaacaaggtctgatctggcattttaaaaaggggagaatgtcaggatttgaaatatgtttgacattttgacagagaaagctggaattaaaggtgtggaaagtggagaatatgggctttctctcaggtcgaggagtaacaagatttagttggatgtaaggtgtagggtataaaggatggtttctcacatctgataggttaagaaagtagagagtgggcaagctcactctggtggaagtgatggttaaatggcaggtgagaagaaaggaaaatctattagaaaagtaacagagccgttgaaataaggagccaccctgatctgaaggcctcatcataattcatacagattccacaccccaatgttgctgagctcctatttatggaggtcagagaggaggagggagctacatcctagtgtgatagctctccagctttggagacctttcagtttaagatttctgtcacttctggtttgttatcagaaaacaaacaagcatttccaagagtaggtaaggatccaagtagctgctaactctttctcttgcctgcctcttttatcaagtaagctcaacaacagactgggggcatggtggctggctaccaattgagaaataatgttcctccttagtggctgttggaaatgtagcttaagcggaggcaggagccctcctagcttttaccaggtggggaagctctctgtgctcacctgcatattctttcactgtccattggctctgctgcagccctcggtagcccagtatgaagcccagagaccatcagagtgctcagctctagagtggatacatttgttagagacattggaaatacatacatgtttagagctgaggagaagggccacacatggggagagttcctgaactcctttttaaagacaccattctgggaatgagagagaataactataccaagatggtgaagacataatttgggaaatgctctcttctgaatagcagactaaggagaagttgcataggagagtgtccaggagccctcagaatggctgagagaggagagttatgaaaggatttatggggcgaggtttctagaggtggcccatggctgcctgaggaccagtgagaggctgccgagttaggcacagtgcttactagctgtctttatgtagtatacctaggcaaaagttgagtgttgcaatcgcaggctagagttgaatgattaaagaagaggaaaagatgaaacacagagatgcttaacgtcgagacttcaagcttctaaggtaaaaagaataggaaccttaaagaaacagtagtttgggaagggtttctttgaaagcagtcactatgtttgagtattgaggaaagaagtcaagtggatgctcacagtcagctattggatggaacacaatgcccccagtggagaagctagagaaagtacccaaggagctaaaggggtctgcaaccctataggtggaacaacaatatgaactaaccagtacccgaagcttgtgtctctagctgcatatgtagcagaagatggcctagttggccatcagtggaaagagaggcccattggtcttgaaaactttatgtgcctcagtacaggggaacgccagggccaagaagtgggagtgggggggcggggaggagagagagtagcggggcgggcatgggggacttttgggacagcattggaaatgtaaatgaaaaaaataactaattaaaaaaaaaaagaggaaagaagtcaatgatgaatgaagggtcaactatgccagacagagagaggtagcagggagctgatgggacaaattctcagcctcttcgagggaattagctggaaaaagcgttgagggcatcagggtgaggcttgaacatgaacaggaattgtcctgtgcagtaggagggagtggcatggaaggcagcttcctgctgtagatggtgggagcaccgtggtggatgagagctagtttctgaagagactggtaaatgagaacatactgatttagtgtcacatggtggcaaggacagcctgagaatacagcgtctggatcttttgtttattgctgaaggcctatactatggatgagcgtaagactacacgtggggaatatccatgagtatccgttttagaggaattgggaacagcaaggaacatctgtcagtcacagttttgaagcataggaattttcgctttttaaaaatgcaggttttttttctttgtttgtttgtttgtttttttggaagcctttatccagtttgcttgtctagaggttttacccagtggctttacacgagctgctgctttttattctgtagggcacatactcggattagatactgtcttagtcagggtttctattcctgcacaaacatcatgaccaaaaagcaagttggggaggaaagggtttattcggcttacacttccatactgctgttcatcaccaaaggaagtcaggactggaactcaagcagggcaggaagcaggagctgatgcagaggccatggagggatgttctttactggcttgcttcccctggcttgctcagcctgctctcttatagaccccaagactaccagcccagagatggtcccacccacaaggggcctttcccccttgatcactaattgagaaaatgccttacagttggatctcatggaggcatttcctcaactgaagctcctttctctgtgataactccagctgtgtcaagttgacaaaaaactagccagtacagataccaatgtcagagaactttgaggagcacagtttattaaagcaactcaccacaaatgactgtatacataaacccattcaagttaacagtcacgagagcagccccaatggtgtagatgtctatctgtcttccaaatgcaacgttagaagtaattttatggaaaagtataaatttcctacacacagcaaatgcagccacatcaggcagctcttggccacctgcagcttcatctccaggggatctgaagtttccatctagtctctgagaacacatgcagtcatgtgctcatgcccacatagacacatcatttacagtaaaatccatctttttgaaagatgacaataaggctattaaggccgcttcttagtgcagcccgttctgacaggttgcttcatgtgtgaaagtaccaagcacagatatatttcaaaaattctgtaagttacactaactaaattaaaactcacatcactgtcttgaaggtgtaaccaggaaggaacgtggaactggaattgtaatggaaggcatttttattaagttcagtttttacattgaaagcaccagctggaggactcctcagttccacacagaggtggaaggtagtcatgtggagtggatttcagagccccaggggagcttggttcatgatgatcagtcagtagctgtgtgtgctctgtatctggtcctagccttgcttaaatgcagagtacacccccattcacctggttcagaaatgagaatcccccctccgctgcattcttcttccatctgtcgcacctcttctaatttcctctttggtattatcgtctcataagtgtgttgtgtttttagaatttgtttttcttcttaagccccttcatcctcttcctccagacagaaagaattcaaagaatcaccatttcatccattatcaatgttttttcatttgagtgtgtcattttacttttgttcccatggagatccaaggcacaccagtttaccctggtgttcagctccttctcaatgctggacctcaaagaaatgggatcaagttgaatttgctggagccttagatctctctccagataggtgatagtcacatagctgcgcatatggctgtctgccatgtctgttgttttcctttctttaccctgcattccccaagcaagagtacaagtgtgtgtgtgtgtgtgtgtgtgtgtgtgagatcttgtgtctatataatacttagttttacttaaatcaacattggggttcttcacatgaaccccatgttaaaatatctatcaaataatcttgaattagtatcacatagttgtttatgttttgtggttgttttgtttttaaagaggcttaaagaaaaatatactataaattcttgttctggccacagtcaaagtcatagttgtgatattttggtagaatgaggtcagaaaagaccagtatttatatctatctgtatttaaatttaagaatactaacctgggttttagtgataaaacatggaatcaatcatgtctatttctaatcttaaccattctatccacacaaaatgtgggtctggacataggagtctgtctgtaaacacagctgttttttacttaactgtgttgacatattccaacataaaaaccaactaaaacatcaaaataactttgaacacagttattcttacaaacactatttgttttgtaacaaaacaaaacaaaaaaacacccaaagatgtaagattctgctgatgatcttggacccctaatgagattctcactgtgcatcttctgactgactactggatgtctgaaaggtgtgtactttcctcttgctcgagcacatttctttgatcattataaagatgacaataaggctatcaaggcagcttcttagtgcagcccgttctgacaggttgcttcttgtgtgaaagtaccaagcacagatacagcttgtgtgtgctactgactgatcatcatgaaccaagctcccctggggctctgaaatccactccacatgactaccttccacctctgtgtggaagtgaggagtcctccagctggtgctttcaatgtaaaaacggaacttaataaaatgccttccattacaagtaaccatgttccttcctggttacaccttcaagatagtgatgtgagttttaatttagttagtgtagcttacagaatgtttgaaatctatctgctctgaattgccttttagtttggctttacttgctgaccatttccagactctgtgtagagatgacttgagtgttcatatgtcagtttctcagcataaccgtcactgggacagagagacaaagcagcagtatttagacagatgtttcctcagtattggttagcagggtttttaaaagttaaaagtaactgctttattggtaaacgacctgttcttaactatagggtagttagttgttcataagtaaagctaaaataagcttgggaatctaagttgtggctgaataaaagtcctaacaaattgatcagttcacttggatcctgaacttggtaagaattctcctcaaaataggacttaggcaatccaaagtaagagtttgcatttgtttatgttatatcattattattatgagttttttagagtaagagaatagagatgtggtactaaaacctctcacttaaagcaagcagtgtgcgatttggactggatgttgactccccttagggcatgagatgtgactcagtgaaatattaaccatttttaagatttatgttcttctttctgttgtttgagatttaagtgtggatcatccattgataatgacaaccaaaggtattcagcagtaatgtcagtggtgttactagggagaggcctcattgagtgcatccacatttattgttacaaccttcagaagagccttcactcttcttctcactccagccccagtactgcaggcgtgaaccgagggcttggtacctgtcagacaacggctgcagccctgagtttctgcatcctttgtcctttctcattttgtgaccttgaactcactttgtagcttaggccttccttgagtttgtggtccttttgcttcagcctcacaggtctttgggattacagcttgcatggtacctaccatttgtcttggtgtctgtcccaggcccacttactaactgctcacattgtgtcagcttcacattggaccttaacacctacctgaggccattcactttttcagctgtccagacttgtaatgttatagttattcttctgttgctatgataaataccccaacaaaagcaacttaataaggaagggttagtgtgtctttaatctctgcatttaggaggcagaggcaggcagatctctgtgagttcaaggtcagctcatcctgtaaattgagttacgtgacagccagggctacacagagaaccctgtctcagatatattttggctaaggagtcaaagtccatcactgagggataagttttgcttgcagttcaattaacctaatcaaggtaattccctctagggagtcccagaggccagataatactacatttcatcattgtttaaactaaccatcccgactttaccctttgttaacttggcagccaacaaatcacttcacatcttgctctcaaggtctttaaaagtttcagcatggattaatagttcatctcatctgatatttaagttaagttctttattgagcatgtataaaatagaaatgtgtcataaacatccaacatacagtacacattcccattccaaaatggtaaaattgcagcatagcaaggaataatcagaccaaagcaatatcagtattcagtagggcaaacaccaaattctgtatctccatgcctgccatttgtagctcatgatgaaatttcctaggctttgaggacttagatagccccacccttccaactatgccatctgtaaaacacatgttctttgttttaggcctctccactccatagctttccttggcaagtgttccacagtcctggcatctttgtaatttagacttcatcttcccggttacatgcagtggcctcctaggacatccatgcattgattttggctcagctatacattgcttggtttcctctgctctttgaaaccatggaacaagtctttatggtactgactgtggggcatgcttctcaagtcacttgcttttgagaaacaggaaatcccttcaatttaggctttctttcttcaggtaaacttgtatctttacaagatggagcctctgaatagtggacctttgcccagtgcagtacagagggtttttctccagtgataatgatctattcagtaataaaatttacttttatatcatcagctaccatgttctcctaagattcctcagccaaacaggttacctagtacctttaaattcagctttacctaagttttcaagaaacaagcaaaatgcagctggatccatagacagaagaactcattagaacccttgttcttctctgaaagctcacaaaccagccctccgctgtccacatttctctccacatgttttgtcttccaggcttccatcagaaaacccagtaagctctgtttacaacttccaagagtttttctgtttcaaaatcccaacttctttcatatttgtactataaaccaattccaaattccgtgtggttattacagctccagttccactcctggtgaaatttttctgtctcagctacttttctgttgctgtgataaatacgctgacagaagcaacttaggagggaaaaggggatggtatgtatgtttgtgtgtgtgtgtgtgtttctcacagttcagagttacagtccatcatacagagaagtcatatgaaataggatatagcttgtcatattctgtccacagtaagaagacagacagcaataaatacttatttttaattagttttcttctttaataaaaagtccaagatcgtagtctaggaaataatgcaactcacagtggacgggtttttctggatcaagtatccttatcaagaaaattctccacaggcatgctcacaaggtaggtggtaattgtgggtttcgagacatcagttgacattaactatatagcatttgcctacctggttaagagcaagggtttcctttcttcatatcttcttcattagcttaaaaagctaatcacatctggtgcagatacacacaccacacaagatgatgcagaataagccacctcttctgtacttccacatgcattctgggagtccttaggcgggcattcactcttgcctaacctttgctacttctcctgaacaaagatgtggcgtcaaaggaaggctgtctcaggttctctgaaattctaaattcagtatgttggcaaatctggtgtgttctatggggacttctcactagccctgtgtctttactcctgagtgttggtgataagaagcctccttcaggcctcacaggctgccctggggccagcttctaatgtaaaaacccattctgaattcaaaaaaaattgtcttggaatttagtttgggaagatgaattgtgtagtatatcgtctttttaatttgtttgtgtgggtgtgatgtactctgttttgtaggtgtggtatatttctgctgtgtgtttagtaaagtttcaaggcttcttttatttgtttatctttaaatggggtttgatgccacctcctccaagcgagtgttagatttatttactgtttactctttggatgagccttaatatacagagacttgtacattattagtctcattactttggaagaaaactgtttcaaggattgagtgcagaaactggccttagtacttggagcttacttgcttttattacatttcttaaatgaaatttcagagcctggaggaatgtagtggtatatttcaggaatatataattggcttgaattctttaggataaagaaatttataaaattagagtatcattttgagtatagtttaactttttgcctgtgtgtatagagagaccctcaaatcgttttaaaactagagccataatttactcaaatgtaataataacagcactaacacactgctcagctgtatggatcactgttttctttcccttgttctgagtttaatgacattccatggattttgcctctctgtgatagtgatttatcacagagaaactgggaataatagctgggaaatagcctctctctgcagttgctattttactgtaagtaatgccaccccagcccataagtgcagtgagtgggcagagaagaaatggtgttggaattacccacagccaaaggaaggaaatggtgtgctgatcacccacgcacgagcttggctgtcttggaaagtaggatttgaaatgctgtttttaggtgcttcctgcctgtaatccagcactccacagactgaggcaggaaaatcacaagttgaaggattcagggaagtcacatctttaacaactacattaacaacaaaatagtcacatacaaacaaaatacacttgttataacccaggtgttaggcataattgagatggctttaaaaagctaaatctgaaaatacagcaaagatgtcaagcaggtattataatgttctcccctggggatgcagcaatctttaattctaagtaaaagcaaagtacccaccccaaacttgcattggcttggccatttgttggcctacactgcacacaaaagttagtttcttgaaaacacacaaaagcatgttgtccacaccttaggaccccgtagacagaagctgacagacacataagaaatcaatcaacaagtcagaaagtatcattttacttatgactcatttatcttatctaacaaaaatatgttgtaataacacaatgtctttattgcttatatttggaagttcagaaaatgagcagtgctttaaaatcctgtttctgctgctgacaggggttggaggtttggggcttggggatggtaggagaattgcctatcagggaagcaggatgttgttattgggaggacaagtaccatggttcccattaagtatagggttcagccaccttttcctgtaaatggtaaatatttggctgtatggctagtttgttttgtattcttgctttgttttgtgttgtgctcacactgtgcagccaggttgcagtggaatttgaccttcccttcatgtgcagggattgctgacatgtgctaccacaccttgcttacctcttagaaatctctttcttaatatgcaagataaatcattctgatcatactgctaaactactatgcccaagaatcatttttatttagtgtacaaaatagtggttttcattaggatagttttatacctctctatcactttgcttagctcacacttgctctacactgttagtgaaatcctaccagctcttgtagtggtaagtgggcacagacagtacagaagcgaattcatgggactgtaataaatggaactgttccaaaacacaggctcttgccatagtttgatgaccccagcactagagtgacagtttgttctggtctctgctcatacatacactaccactgtgaattgctcattctagataacgggatctttattgggacagtgatggcacacagagacacatgcacttgtagacaccccaccccccactccaacacacacactgcttttatatgatttaatttgggtcttaaaagataaaacatattattgcaaatacagaagtggatgctcacagtcagctattggatggaacaaagggtctccaatggaggagctagagaaagtacccaaggagctaaaggggtctgcaacactataggtggaacaacaatatgaactaaccagtacccctggagctcgtgtctctagctgcatatgtagcagaagatgtcctagttggccatcattgcgaagagaggccccttggtcttgcaaactttatatgcctaagtccaggggaacgccagggccaagaactgggaatgggtgggtaggggagttgagtggggagggtatgggggaattttgggatagcattggaaatgtaaatgaagaaaatacctaataaacaaaaaactttttaaaaattaaaaaacatattattagctctatattttaaatgaagaaatcgaatttcataaaatttagatgtactcagaagggttcagagttctaatacatggaaaatattgcttttgcagtaggagagttagaaaataaatctttttctgtataatatgaatactttgttaaaggagaatgttgaggggattagcttctccttatatatgtggaaggatgatgtggggtacagcctcttgtagctttaaagggtttaattttatcaggaaagattgcttcaaggcagaaactagttctggtgtctgtgtgtctgctatttcattttatctgtggaattggataaaacagttccagattctttctgggatcacatgataaggcagttaacaaatgcaatattctataaatgcacaggatgcttaccttttaaatttaattataaatgataaacttggagttagcctgtaagagtttaatatactaaaattagatatccagactgtgccataaataactataacttcttgatatggttttattgttttttgtttgtttgatttttttttcttccttgaaaaagtgggaatgatgatatgaactgatatatttcagcaggaggaggaggctatactgtaaaatctctggtttcaagtttacattcttccaactaaatgatttatttttttctacttctctggaataacactaaactggtagactcagcagtcaaccatttgggataaagaatagaaggacaacttccgatctataccagcactggagtaccttgggcacggagtctacggacacctgcaaggtacctacaggaccctccacgagatcttaagacctctggtgagtggaacacagcttctgctccaatccaatcgcgcggaacctgagactgcattaattagggaagcagaaaacccggtctgaccagggtcacaagtcacttcctgtccacaccagcactggagtaccttgggcgtggagtctgcagatacccacaaggtacccacaggatcctccatgggatattaagacctctggtgagtggaacacagcttctgctccaatccaattgcatgggacctgagactgcattaattagggaagcagaaaacccggtctgaccaaggtcacaagtcccttcctgtccacgccagcaccagagcaccttgggcacggagtctgcggacacccccaaggtccccacaggactctccatgggatcttaggacctctggtgagtggatcacaacttctgccaggaggcaggttcgaacaccagatgactgggaaccttcactgcaagaggagagcttgcctgcagagagtactctaaatactgaaactcaggagagagctagtctcccaggtctgctgatagactagctgatattcacctgaggaacaagctctaaccagagacaactataacaactaactccagagattaccagatggcaaaaggtaaacgtaagactcttactaacagaaaccaagaccactcaccatcatcagaatgtagcactcccaccccacccagtcctgggcaccccaacacacccgaaaagatagtcctggatttaaaagcatatctcatgatgatggtagaggatatcaagaaggactttaataactcacttaaagaaatataggagaatactgctaaacaggtagaagaccttaaagaggaagcacaaaaatcccttaaagaattgcaggaaaacacgaccaaaaaggtgatggaattgaataaaaccatccgagacctaaaaagggaagtagacacaataaagataacccaaagtgaagcaacgctggagatagaaaccctaggaaagaaatctggaaccatagatgcgagcattagcaacagaatacaagagatagaagagagaatctcaggtgcagaagattccatagagaacatcggcacaacaatcaaagaaaatacaaaatgcaaaaagatcctaattcgaaacatccaggaaatccaggacaaaatgagaagaccaaacctatggataataggagtagatgagaactaagattttcaacttaaagggccagcaaatatcttcaacaagagtatagaagaaaacttcccaaagctaaagaaagacatgcccatgaacgtacaagaagcctacagaactctgaatagactggaccagaaaagaaattcctcccaacacataatattcagaacaacaaatgcactaaataaagatagaatattaaaagcagtaagggaaaaaggtcaagtaacatataaaggcaggcctatcagaattacaccagacttttcaccagagactatgaaagccagaagatcctggacagatgtcatacagacactaagagaacacatatgccaggccaggctactatactgagccaaactctcaattaccatagatggagaaaccaaagtattccacgacaaaaccaaattcacacattatctttccaggaatccagcccttaacaggataataacagaaaaagaacaatacaaggacggaaatcacgccctagaaaaagcaagaaagtaatccctcaacaaaccaaaaagacagccacaagaacagaatgccaactctaacaacaaaaataataggaagcaacaattacttttccttaatatcccttaatatcaatggattcaattccccaataaaaagacatagactaacagactggctacacaaacaggacccaacattctgctgcttacaggaaacccatctcagggaaaaagacagatactacctcagagtgaaaggctggaaaacaattttccaagcaaatggtctgaagaaacaggctggagtagccattcaaatccatcaacgcaatccattatataaaaaaactcaaaggcaaaaaccatatgattatctccttagacgtggagaaagcatttgacaaaatccaacacccattcatgataaaagttttggaaagatcaggaattcaaggcccatacctaaacatgataaaagcaatctacagcaaaccagtagccaacatcaaagtaaatggtgagaagctggaagcaatcccactaaaatcagggactagacaaggctgcccactttctccctacctattcaacattgtacttgaagtcctacccagagcaatttgacaacgaaaggaaatcaaggggatacaaattggaaaacaagaagtcaaaatatcactttttttcagatgatatgatagtatatataagtgaacctaaaaattccaccagagaactcctacagcaataaacagcttcagtgaagtagctggatattaaagtaactcaagtcaatggcctttctttatacaaagaataaacaggctgagaaagaaattagggaaacaacacccttctcgatagtcacaaataatataaaataccttggtgtgactctaactaaggaagtgaaagatctgtatgataagaacttcaagtctctgaagaaagaaattacagtagatctcagaagatggaaagatctcccatgctcatggattggcaggatctcccatgctcatggattggcaggatcaacattgtaaaaatggctatcttgccaaaagcaatctacagattcaatgcaatccccatcaaaattccaactcaattcttgaacaaattagagcattctgcaaattcatctgggataacaaaataactaggataacaaaaactcttctcaaggataaaacaacctctggtgagatcaccatgcctgatctaaagctgtactacagagcaattgtgataaaaactgcatggtactggtacagctacagtcaggtagatcaatggaatagaattgaagacccagaaatgaacccacacacctatggtcacttgatctttgacaagggagctaaaaccatccagtggaaaaaagacagcattttcaacaaatggtgctggcacaactcatgtagaagattgcaaattgatccatttctatctccttgtactaaggtcaaatctaagtggactaaggaactccacataaaaccagagacactgataactatagaggagaaagtggggaaaagcctcgaagatatgggcacagggcaaaaattcctgaatagaacagcaattgcttgtgctgtaagatcgagaattgataaatgggacctcataaaactgcaaagtttctgtaaggcagaagacaccgtcaataagataaacaggccaccaacagattgggaaaggatttttacctatcctaaatcagataggggactaatatccaatatatataaggaactcaagaagttggactccagaaaatcaaataaccccattaaaaatggggctcagagctaaacaaagaattctcacctgaggaataccgaatgtctgagaagcacctgaaaaaatgttcagcatccttaatcatcagggaaatgctaatcaaaacaaccctgagattccatctcacaccagtcagaatggctaagatcaaaatttcagttgacagcagatgctggggaggatgtggagaaagaggaacactcctccattgttgtttggattgcaagcttgtacaaccactctggaaatcagtctggcggttcctcagacaattggacatagtactactggaggatcccgaaatacctctcctgggaatatatccataagatattccaactagtaagaaagatgcatgctccactatgttcatagcagccttatttataatagccagaagctgcaaaaaaccaagatgcatctcaacagaagaatggatacagaaaatgtagtacatttacacaatggagttctactcagctattaaaaataatgaattttgtcattcctaggcaaatggttggacctggagggcatcatcctgagtgagataacccaatcacaaaagaactcaaatgatatgtacttactgataattggatattagaccaaaaacttagaatacccaagatataagatacaatttgccaaacacatgaaactcaagaagaacgaagaccaaagtgttgacactttgccccttcttagacttgggaacaaaacacccatggaaggagttacagagacaaagtttggagctgagagaaaaggatggaccatctagagactgccatatccagggatccatcccataatcatcctccaaaggctgacaccattgcaaacactggcaagattttgctgaaaggaccctgatatagctgtctcttgtgagactattctggggcctaccaaacacagaagtggatgctcacagtcagctaatggatggatcacagggctcccaatggaggagctagagaaagtacccaaggagctaaagggatctgcaaccctataggtggaacaacattatgaaccaaccagtacccctgagctcttgactctagctgcatatttatcaaaagatggcctagttggctatcactggaaagagaggccctttggacttgcaaacttcatatgccccagtacaggggaatgccggggccaaaaaatgggagtgggtggttggggaagttggggggagggtatgggggacttttgggatagtattggaaatgtaatttaggaaaatacctatttaaaaaaaaaagaatagaaggacagataacagatttacaggttacaagagtagatttagaaaatatgaattttacatatttttttgtccacatcattgagcaataattagaaaattagtctctctgtgtacaagaaacaattggaaatctaccctcccatgcaatgtcctagtgatctaccttctgtcttggtactttcctgttggtgtaataaaccatcatgactaaaagtgacttatggatgaataggtgtagtggggaggcacagcagcaggtggcaggcgtggcagcaggagcaggaaatggagagctcacatcctcaactgcaagcttgaagcagatacccagtgggtcgtagaacaagggtttttactctcacagcctatccctggtaacatgcatcctgtagcaaaaccagacctcctaagcctcccatctgcaccagccagggtccaaaaatcccaattccaaagcatttaaaggacacttttcatgtaagtcaccatacatgaccatgcatatcctttagctcaaacactcccacggtgataaccttttgttctttttttcttttttgtaaggtcataaagcactacagtcagtatgcacaccatttgtactgtgtggaccagtgagtgtggtattccctcagggcagtgatgctgagtggggaaatgaggatgaaaaatgaactcgggtgtgggttgggcgtatactcttggttaccagaaggaaagagagacaaggcagatccagggaacagcccaaaaggaaacatctgaatagttgcccgcctcacagactagccccagctacatctcaggattcttggcctgcttccacttccaccctctgagtgttgaacatgtcttaggggatgccagcgttgtttttttcctaaccttaggagtccatcttcctaacccatgagtcccactggcctacagcttctgctttgtttgcttgctgctgtctactagtgattagccttagaagctccttgaagtgggtaattcccttctctttattttagctttccttcctactattctaaaactgtatattgtacagatatacagcagatatgctgtgtatgtggtaaaacctgccatggtgatgtttatgcagagcacagacattattctataaacaatatagtgtaagactatttatttagcatttatattataaaaaaagaaataatttggggatgctggaatatctacaagaagatggacataggttatatacaaataccacttttgtttcaggagtatgagcaccagagaaaggccccacactcagccccctgtcgcaagtgtgtgcagtgggagagcccagtgtctgaagctcctgttggcttgcatggcgttcacctgggtgctttttgtgtgcacttgcttgccggtgggtcctatatcagggttctctttttcactcactcttcagcccatcttaaaaccttgcttctcttccctgtccccagacacctggcctcagcccactgaagggcctactgcacaacagattccttggtccttaagttgtttacttgttcagcctggcatgctgtggcagaaggtctcttggtaaacaatgtaacatagttaggtgctcactgctgccgccagggttccaatgctggttgttcttccacatggccttagcagttcatgcattctgaagtgtccttgtttctgagatagtcttcctcttgtgagcagtttgctgaccacagacatactttacctctcctttaccccaagttcccatcttcttgctattatacagtcatttaaaggaatcttgttagaatcactacattataggtcctcacaacttagggtttgcttatcatgtatgcatcgggcataacttcaaaaagttattaagtgtgaggatgggcaagggtagtcacatgaatggactgagtgttccctgtcctctgattggcttttcggaactcctttgcccatcccctgtgatgtgtccttgcacagctagggtctgggtgtctgtttacaggagcttgcatcagtgacctgtcttaacattcttgagctgttgcagcatgtatgtcagtatatagatggccataatgtttttgctttgtaaacctagattagagcatttgagttgttaatttgtttaacttcccatttaataaatgaagaaagaagacacagtgtagatgatttggctactattccctagctggtaggtgttacagccaaagtcttggccaagaggcctgccccaatggccacatgtgatttgcccttgaattttaatgctaacttagtggtgttgatttgctttaagcactagcagttgtttatgcaggagtagggactatgtcttagctcaggtccttggcccaatcaatcctaacaggaatttgctttctttgtgttgtcactattatcttccacatgatagttaatttctacttttccaactaatggcatttatataggtttacacaaacttttaaagggagtgaatttgaaggaaagtatcagtggctagcaataggctataaatgatggagtcagaggtcctgaagaaattcctgagatgctacttgacagagcattgtggtgtatgtgtgtgtgtgtggggggggggggatatgtatgaataggacagctctctggtttgactgatggaatcaacattcttttttaacaatgagggaactcaaaagatgaaaaataagaagggaagaagaaaagagaataaaattgggtagaaaaggacaggttaatgactaatttttaactaacttaattgcctgtgagtgagttgtttagcttaggttaacttatattcagttaaatcactcatttctaagagttctattggggaattgatggaaatcaaacatttgacttgtgtagatctatggaaatacagaaagtctagaaaagaaatacgaagaaccaaaagttagtatctgtgaagttagtgcagagtccactaattggcagggtacaaagctatcctggaaatataccccaagacctggacacagcaacaaacactagatcatctactttcaggtcactcttatttccttcagcctaaacagatttttcacagtactatttttttttttcaaaaggagactataacttgagacaaattggacttcaataacataaaaaacttagttttatcatcgctgctgaactggatcagcagttaaagtgtgtgtgtttctcagcacccatgttaaacacctcacaaccccttgtaactccaactccagacctgacattctcctgccttgtgtgaacccaccaccacacacagacaacaaaaaaaatatttttaaaaatcagtttaataattgccaggtgagaaaattatacctaccattcatttttttattgtcaatgtaagaaatcaagtaattatcatacttagttaacaatcctagtacttcgtagggcatactctgttgtgcccctaagatgacagtcaccttctttatggggtcttggttccccttctgttacaccacatggaactgatggctttttaattctgaagaccattttatgcgtctattgtcactgtatcccatggcatgcttgcatcctgatcgctgcttaatgccatagccactgtgtgaatcactcttttctttcctcaagggtacctgcaaacagtctcctctgctttttgcctgaaggtgacactgagaagtgtgaagtggctcttagttttccatgaaattgccaagtcatcatctctatacaccctgggctggtactgattccagtcttgcctgtgtcagtcccaattatcagtgtagcctaccttttcttcttcctcagtactgaggtatttgttgggatgtgaaatatgttcctgaggctatccaatcactgctctgtactccatctcctctagcttttctctgtaagtctccacatccttctgacccctgattctttttagctgggaaggcttttgcttccctttaagcctactcagtgattacatctgatccatcatctgcctttagtctttagcttttctgtttcttctgctttgttttccatcttcttatattacccttttgacctatagtgtgactgaaggcaggatagtaatcttacaaactactgatctgccccagttggtgagctgtgcttgtgagtactgctgtgtaggactgtgagcaccactcagatctggtggtggtgaagggcagggatggctctgccatggggacaggagtgatacttacaatgccattatctctatttgccatgtctatggagcaccttaattgttaatccctttcctcttttcagtgtatagctctgttctgcttgataaagttagaagatcaggttgtattagagaatgggatagaaagccacttgcacagagcttgctcttggctcaagggacacagagaaaatgacacctagaaatatattgtattgaattgagagacaaatttacagagggggaatacagaagaattacttattcctctttcatgtccctgtaaaaaatctaagtcttaagatcttaaaagttcttaagattgggacacaaagaataagcattcagttcttgggtatgtcaggaacctgggaaatgttgacattcataaaagctagaggaagtctgaccccattctctgccacctagaatcctgttttgctcttataggcccgtgctaggctctcctataatgaaaacaagacgggactcttgctagtaagccctccatcacatttattttcactgtttatagtttgtaacttatttcatataaaattcattattaatttaatataaaattttcatagacaagcctgcttctgattcttttctcattcttgctatgcccccaagcaatataagaacacaacaactcatgactaggtttttctatgtgtttcttagtgaattgtgtgttgtagaacaggtgctatgaagagtatataaaagaaagtggccaagggaacctgcctttgggatgtcacaatgaaagggtaattgagtttttaagaaatcttgagcacttattcctcagtgactgggctaatgcagttcacttctgttatcccagatgctctctatctctagcctgtaatggtagcgttaacaggtttttttagtttttaatttctatacctctgctattgttgtatgcattattttgaaaattgcattaaataacataatgaatataaaggacattacaaactttggagagccatacaactgtgatttgtttgttggcttttatttttagaaaaagctttcctttgactactgaatttaaggatatatcctttaaggcccatcttttatttttgttagtgttccagagcctaaaggatcatatgtgtccttgacctaaacttggagcaagtttttatcaaaatcaaaacagcagaatgacaccttaacagatgtgaaatagcaagaaggttgaagcaatgataagaatctgccaatgggggctggagagatggctcagtggttaagtacactgannnnnnnnnnnnnnnnnnnncatggtggctcaaagccatctttaatgggatccaatgtaatgaggtttgactctgaagagagctattagatataataataaataaatcataaaaataaaaactaaaaaaaaaaagtaaaaattcttaaaaaaaaaaaaaagaatctgccaacggtgaagacagcagggccatagagactcggtgttgaacacgatcacacctttgaagaaccactacttccaatgctttcaaactgttgccctaactgtagaagttcattgagttctatagtcattgagtatagttacttttggggtgtgtgtgtgtgtgtgtgtgtgtgtgtgtgtgtgtgtgtgttagtgttagtttggtagatatgtatataataaagtttaaagtgaaattttaaaaaaggcaaggaatgtttctagacatagagtctttgttcctaacattatgctgctgataaactggaaaagcctacagttacaacaagctagaggccaatttccttgttgaatataggtgcaaaaattctctagaagatatttgcgaaccaggtttataacacattacaaaggtcatgctgcatggtcagtctcctccattgtagggagtcagggatggttcaatgtatataaatttgtagatacaataaagcacataactagaagcaaggacaacaatcatacagtcatctccataaatggagaaaagctcgtagttagttttttaaacaatcagttctttgttagcatataaaataataggttacattttgacatggttatacatgtatgtcattggacatgctcattcatcttccagttacttttgcatgctttatgccccgccccaacatctgctggctacctactcaccaaatattgtttcttgtatttttaaatcacgtgtgcatgcacatttatgtgtgtgtgtaaatgattcttcatataagagaaaacatgcactgttttctctttctttcttgtccttcattatctttccttgatttcttcttcccctcttacttgcatgctttcagttggtcataaagctccccttatgatttcccctcttacttgcactgcactgtcttctctttctaattcacctttcacaggaaaattgactttccaaaagcactgttcttatcttgctaatgtgtttcaaagcctaccctctcctcactccctagctgcctgcagcctatagaaataagtgagcctcctagccaagtggtgaaatctttatgcagcacagttcacactcattcatactgtgattccccttcagctgacatacctgctgagaccacctttcttccctctattgtcctgtttattgtcaccatttttaactgacatctctgatcatctaaatcctgctcattcagttctcacgtcccaggccagttgattagctccttcatgttcctgcagcatctgctctcctcaacatatgtaatggtttcttttctgaatggtttttgtgtaaataacctatatacagattcccttccactattttgtaagttcttgagaaatagcacttatctacaggaatggattcttgttagttttatggctttgtgtgtaagtgggagctttagcaaagtgccttatggtcattgaatgagatgtgataggttagttatttattatgatccacttgtccagcttcgtgtctgagggtggcacaaaagaagttttcattgaatacttgttgaataaatgaataggtgtattaagtttgtattgtttctcagattggtcaattattttaacatttagccttttaacatgtatgtatacagtatataatttatttctttggtgattaaaaaagacatgttcagaatgtcctagagtcctttatagattatcccattctgtgttatctgcttatagtgtgtctgtgtgcttgcttagagctgaatagaggtagccaggccattctaccaaccacactggggaaattctgcatccaaaggactaggaattatattgacaatagatcagtgagtggttttatgttgtatttcatctcttgaagatgtgggtgatctcaggtgacagcaagctccaccaggacaaaggacagcttgttgctaagaccagctcggcagtcttttgcagatttcccagccagtcgtcagctcttccttgatcatgtcatcattactgccggattcatctcacaccagaggaaaagaaaaaaggaaacagagactggggcttgggaaggaattcctccagcgcctaagccaggcttgcacactgcaggggcacagtgtctggttttcataatttcacatgtcattagtagtaaaatataaatgtatttttaagagctttatgaaaaattttttgttaaaattataaaaggtcatttatgaccttcttagctcagagtggccgaggaggtgttagcttgtaaacgtcattacactgcttgtttcagttttagattaatggcagggagtagccatttttcaaagcaaacaggctatcttttagttcagatggaaaaagcaccaattctttactgtggcctagaatattccgtgcaaggtaacaaatggcagagatcacataacattcaacatctttaaaaaaaataagtatttggctaatattctaaattttctaaagtaccaaacaaacttttagcaattagtaatatgaatctcatcataccactgactgaatcacagtctggtccttatgcggaacatacatgactgtcctttcagggaggttattttcaggtacctgtgttggtttgcattttattcattgcaaataagtggttagtgtgctctgtgtgtgtgtgtgtgtgtgcatgtctgtgtttgtgtttctgtgtgtgtacacacatgttcacgttaggaacctggactggttgatgtgtttgaagtatttaatttggtccttttcttattcagggatcgtttaaaggaatgtctggaggtatttagtattttagctttaaaatatgagccaatataatgcatatcttatatcaggtaccattagctacatgctcattcataccctaggaccttgattccttgttcccaacacatatataatgcttggtctatatgtatgaatatttttgcccaggccataccagtgctcctttagccctgagtgtgtacccttaatgagtgtgtttaataacagggcaatatgcatggcgtgcccctctcttctatggctaagatcatttttacatagactgtccgtgcactttctttagacgtttgagcatgtgggccactctttcctgtgtttccgtctgactgcttagcacatggctgtgcacatgttaggcactttcatgcatctgatcaaatgatgagctaatgaaaatcattctcacaaatggcaatctataattaagatgatagctgtaaccataaagcagacaggatactcctgtcagacagttaataatattcccacttcccagcaggcaaagcctaatccaagccctgaggttgctccttattgttggatccaaacctaaagaaggatctgcctggggagctttagagggaagagtcatagagtctgtgttctccaagtggttggttgctttagccgtggatttcctacagagctcttgtttgcaagtgtttccttaactgagtgaataaattcatatgtaaaataaataagtcaaaaataaaaatatggacattaaaaattttgatattcactttacattctttcatattcaatctttcttgtgtggatatgttgctaaagctttttgtgaatggttaaagatactgaaaatgtatgttgataaatacataatgtgtatatagatttttctatttctttcgatttgaatgttttttggatgattatgttgctttagatctgtttttaaattttatttttaattgaacacatacttgtatgtgaatgcaggtgcttgcaaaggccagttgtgagttgtctgacatgggttctgggaatcgaagttgggtcctacaagagcagcatgtactcttaaccactgaaccatctttccagccccagaaggtctttacaggttgtacaagctgataaaaatccaaggtgccattcctgaatctctaggcagtagatctatactaaaagtacgtacagtgtgttagaggagtctccatttgtcaggtcccctgaagcagaatcgaagatgattatgagttatcatctgtgcgctgggaaccaaacccactgtaagagcacaagtgttcttaaccactgagccgtctctccagctctttctaaattctagatcctgttgcagagttacatcttagttttaaaatcagcatataagggaaatgttttctttggtttatgactgttcttcaaagtccctcattgctaactctcctatgttatcaagtcagtaggtcttttcttttcttttcttttcttttcttttcttttcttttcttttcttttcttttcttcccctcccctcccctcccctnnnnnnnnnnnnnnnnnnnnctcccctcccctccccttttctttcttttttaaatatggcattagttgcaaatgctgctgccatataacttcagccactacagttttgtttgctaagaagaggcattctctatgaggttatgttgggagtgagtcagacagagggaagagctgatgggtggctccctcccaggcttcctcaggcagctttcctgagagtgacatcaattctttttctctttcaacctgggtgattgagtttacaatgtaattcttttgtgtccacttccaaaaagagccataactgaagaaaagatgtctagttactttctcgccttacttttgtatagaaataatgaaaactatagaatgacctggttagcagataggagtgctcccttctttaccaaccttacctattttacttttctaggttttaacaacccagagaaacagcacagttagttttgccaagtctctgttttagcagctacaaacccattcccagtactgtcaggcagagtgggagcaacctgcatccacacaatgtctgcccctggctatttccgaatgctcagtgtgtgcttgtcaagtcctaagagtttggcatcagaacaagctcatctgttgagtttcctctggcctagccatactatagattcaaaatacacaaagcagacatgctgtggtaaatatggtagagaaggagacctaagatgtctagcttagtccgtgaagttcacaaataagaaaagagactcaaaacaaagtgagtcgccaagatgacgcgctagctgctgggaaggaactgcagctctaacttctcgagtaccatttgtttattttctggagcacagaacctgcgattcagcttatcccactggtctgtcatgttggagttgctctgcctgtcctacacacaaggaaagccgttctgaaggaccaattaggtccacacatggtgctcacccttagtttgctggtatcccttctgtatgctcagaagttgactttcctgacatcttattttgttacttagaagttcagagtatgtggcagacataagcatatgcccttcggctctgccatgaagggcagcagcctgactagggtctcctcggtctttgcagtcttcttccttccccctcctgctgtggcactagacctgcctgatggcctgaggtgctcagtctgcacctgctcattctttccagatattaccctgtcacttatttcctgtactttaaatctcccaggaattgtatcccacacttgaactggcacaaagtaggtgctgttttgaacaatacttctacaatagtcggtatcaagtgctgcagaaatcatactaaccctgtttgtgctgcaaagccactgaatagcctgatgcacttggcaagtcattttcacatagtcttctttaactttacaccagtacagaatgaagtcactctagagtgttggaaaataaactgctgacaagaggtaggagtcccagaaccaacttagttcctgaccttccaaaatctccttagtcaacaaggagcctcactacccatacaataacccagatgaccctggtgtgtgtgtgtgtgtgtgtgtgtgtgtgtgtgtgtgtgtgtgtgtgcgtgtgtctccccagcttcatctgtaaaacagattgcaagaacagttgactagccaattgttctccatagtgtgaacattaaatctaaatttaaatggaacaaatgcaagttcatccagagaaaaagaattcagtagtcttatagtaattgtttctgtgttgttgtccaatttatttgtcagatcagtcacactgaatgccttggcccagatagtacagtttagttttcttctctttcagagaatctgagcttggtaatgttcgtggaaaaacaagattataaacaaatgcctgggaatagacatttattcttcaccgtggaataagaaatagatgcatttcggtataattgcacctaattcacacagcaccagatgcttgaggcttcttcacactctgcgccacctcagctctagtttagttaagagccgcctgcttttccatgtgctggaaacggttaatgtgatagcacggatctctgctgtggctgcatgtggtgatgagtgtcccttactgctgcaagcccggacagttatgtattagcttctttactctgtcctttactgtgctgtcctctttcagctaatgtacatctttcaagttttttagtgttgcattaattactctgcaagagattggggggaggggggttgttactaagctagaactctcggttcctgcctttagcttctgaatttggttcactgtggtcttttagacatgttatgtgttcattttccacccatgactttcataagcatgtagtagcaagagctagagaataagcgcaagtcctgaagcgctagcagtcaatttcaactcttggtttttgtttttttctttttactgttgttgttgttttggtttattctggtttggtttagttttttgagacagggtttctctgtagccctggctgtctcagaactcactctgtagaccaggctggtctcgagctcagaagatccacttgcctctgtctcacaagtgctgagattaaaggtgtgtggcatcactgctcagatgagtcctttttttttggggggtatggggggttcgagacagggtttctctgtgtatccctggccgtcctgaaactccctctgtagaccaggctggcctccagctcagagattcacctgcctctgcctcccaagtgctgggattaaaggcgtgtgccaccatgcccggccagctgagtccattttgattcagcgtttatctggtctttcttagacactgggaactgcagtcgttttcttgttttaagtgggtgttgagaacaaacctctaactgtacagcctggactcttgaggctgttctttgagctccatgtggagatttcttactactctgtaacatgaaatttgcaagttttggtggaagcacactatgctttgttctcaagtgtgacttgtaaaatttttatcagggagcctggcatagacaacactgcccaaacagaacaagcttaaaccagttccaacatatgtcggccaaatatcagtcctacccgaatcaaacatgaggtcacaggctttagaatcttatatgtgatggaggcttggagtcttgttttacatggaatcacaggagtgtgcttatgtatctctttaattcttctagcttagacataatggatcaaaatgtctagcttgctctctgactgggataggattcattccatcccacatatgtggccattctcaacaattctgtgcactgtctttgcaggtcagccctgctgtgaggttatggtacagctagttctctgttcaattttccaatacatatggatacttactagcaggcaggaacagtgttattcatagaacccattttgtgaaatcagtgatgtcccgatttgctgttctttgctgaaatggttccccagggggaaagagctgctgatcattgagctcaagcaactaccaatctgtagaacagccgttctcaacaggggacattcggccatggctggagagaaatttggccatgatccttttgggctatgtaggtcagagtcagagatgctgctgcatatactgtgatgctcaggatagcttccagagcagtgagtcacttggtccacatgtcagaagtgtcccaagtaaggatctctgtcgtcagtcactgacttgatacaagactggcttaaacaggttctgatataccattgctgccatccctgagctgtaggcactgttgaaggcacatagcatgttaacactgaagggagattctttatataatattgtagcctactttcaaatacttgacaactttcatttactaagaaccccaactgtgggctggagaggtggctcaacagttaatagtgctcttgtagaggactggagtttgaatcccagcatttaagtcacgtgacccaacaatcaccggttgctcctgctccagagcaccaaacactctcctgacacttgcacacaggtgcacatgcacgcatacatacacataaactaaaaataaagtgttacaaataaggaagctgtatctcacatttagtatgtaattaatcggtgtgtgcactaataaagtcccactcctaccagccattgtgcagtgttactgtgatcaagacatggctgaatgacattctttgcagaagcgtccatttaactttgggctcctattaggaagatttgttttcattcttaattgcaagatattggcactaccttgttttgtctttagcctgagtaacagatccacatgatatgccgtgactttgtatatacctttcagtgtagtggccactggatcctggatgctgcttttgtgggaagtattgactttggttgagtcaaggatgtagacagaggaggagaaatgtcttgcctcattcttgccccagagagttgagagttaaaggacaggcaaggtgtgtgaggaaaaaaacatgcaaatgaagacaaagattaaaagaaccacggtaaaatgttatgaaagttttttttttaaccaagtggtaataacaataagttttgaatataaaattaaaccaaaaacaagagagatgaataggttaatccccctcccaattaaaaaaaacaaaacactaatgccgggcatgggggtgcacgcctttaatcctagcacttgggaggcagaggcaggcgaatttctgagttcgaggccagcatgggctgagtgagttccaggacagccagggctacacagagaaaccctgtctcaaaaaacaaacaaacaaaaacaaaaacaaaaaaccactaaagaaatgcccataaattataacttttattttgttaagtaccatgctctggaaactgagctgaggagagaagtagaaatgtatgaagtgaacatcgctgtctgaacagcctgaaaaagggtagacatattttggctcacacttcagtgatttcaatccatcacagttgtgcctctgttgtgtcccttttttctcaactcttattccacctaggccctgaatgttcaggccaggtcattcctcacataatcgtctctgtaaatgaatgtgtagaaacagagaggtgttctttgctagtctcttgtaccgttctctctagtcaggttaatagtgggcattagccttcaatcctcttaccagaggcgcagagaatgctgggtaatttcccatttttgacaggattccagtgtttactctggcacatttctgttattccctgatgatcctctgtaacttctggtgcagtcttgaagtgtgtgctaagccataccctttggtatttgtttttctcctataattttattgagattatacatattatgcttcgttcataattttgacaatgaataactccattgctgctcttagttgcttatctttttacatgaattgtgaggacagatagacctgcctggcacatattatccctgtccttgtgactcccagctcattatgtctgtatttcagaaggatcgaggacttaacaatagaagaaaatgtagtgctaggtgtacctgttgagaactctttaagaaggctgccttttcttagctctatgatgtctgctcttaggggatcatcttaagaacactgagcaggtacctgctttgctttctgcagtgagttttcaattccagccctggcattcaaagactttcacaaggccatactgtgactaagtcattgtgacatcactgagttcctagtgccatcattttgtgccatccctgaaccagagggcacagcaatgccaaaaactttgagccatgaggattttccaaagaatattcgtggaaaggtaaagttcctatcagcatagtgtgtcttccccatgtccccgcatcctcttgtatttactttagtgtatttttttgttgtgaagcatcttcaaactttgtctgaaaagagacaaatctattaagaggtgagttcatgctaatatttaatggccaacactgagttaaacatcaaagcatttgcttggggttcataagacttgatttccttattttctttgattctcttgattatgggagactagatttccataatgatccacgttagcatattctgtcatgttttcaacccaatcatgttgtaccacacctagcacaatctgggagctaatagtatagatttcttataggaatagcaagcattcatggggaaagactttatatttatctttccctcaagaaatgatcctaccttaacagcaaataatgttgtaatcctctttgtttatatttgttcatttacaatgactctgtgtctgaacttttatttctttgcagtcagtttactgctttctcttaagctaagtgtgactttccattctcaatagccattagcttagccaatgtattctcagcttatttaagtttcaggattcatatcgtgtgacttttcctcccagcatcccattaactgtttgaaagcgatgtgccactgaagtgttgtggccatgtttctttcttagttattctccccagtggatatcaagatatcgattgtgtgtgcagttggggagagttgtgatgcttgtgtatagtttgatgctgtcaggctgttggagatggctccctctcaggtctttagagtatgcttccgacagttggtgtgtagctttaagttcttcagccgttaatacccctgctcatcccttattcaggtggagaacagctcttcaaagtcatcagatttgttccttgttcctatgttcataataagactcaacagtacacttgcaatattgaattgtcttcgtgtttttcaaatatcctcatggtacatactcaatgcatttttttagatagataggaaaatctaaaaaaaatttttgccatactattattttaatattgatgttgaaaaatatactttgaatggagggtttaggaagtaatttttctatctataggtgttcaagttaaaataaaatttgaagttgtaaactatcattatttaatactttactctttaaaaccctgtgtcagggggttggggatttagctcagtggtaaagtgcttgcttagcaagcccaaggccctgggttcggtcctcagctccggaaaaaagaaaaaagaaaaaaaaaaaaaaaaaaaaaaaccctgtgtcaggctggatgttgtggggcatacctttaatcccagcacacctgccccttaaagtactggcatgtttgttggctttgtttcaaattaaatttaaaactactagggctaatattctaattaaattttttttgaagagtataaaccatgtgatggtgacacacacctttaatctcagcagtcaggtggcagagacatgcaaattgagggcagctagggctacacagaggaaccctgtttcaaaaaactaacaaaaacttctacatcagttaatgttttcctctcgtagcttaaaatactcatatttaagttttctgggattacagaagtaagaactgttcactatgtataataaggaatagcctagataagaaatgtagccctcattgtgtacatcatagctactggtagcatttcagcatgctttctacttctttgtacatctttatagcatgcaatcaatcaatttagtgtctttctctgctctctcagtcctttcttatttaaagtaaggaaccatctttacttactattgtgacttattccccaccacagacattacacacacaattgatattttgattatttaagttattttctgaaatgtcagctttgcatgagtcctaatgcctgctcatgtgactgggtcaaaatctctgattttattttttgctacaatctttgtagttactgttttattgttgggccttttcttatttgcttaaactctgttgttcttcctttattgttggtctacataattcttttatgaatatcatatatcttagataaatgaactttttaattttaatagctgctacagttgaatgctgtggcgcatgcctttaatcccagcactcgggaggcagaggcaggcgtatttctgagttcaaggccagcctggtctacagagtgagttccaggacagccagggctatacagagaatccctgtctcaaaaaaaaaaaaaaaaaaaaaaaaaaccaaacccacaaaaacaacaaaaaaagtaaaattgtctatcagtaagagtaattgcaatatttatgagcgtatctgttctggtttccttttgttgctgtgattaaaacaccgaatgaaagcaacttagaggaaaaaagggttcatttcatcttacacttccaggtcacagtccctcattgagagaaggcaggctctttgccattctgacctgagccaaggagttacagtagaaaccatggacagaggctgctgcaggctcagtcgcaggctcatgctaacctaactttccaatgtagcctagggaccacttgtatagggtcgttacaagatggtgctgctcagagcaggctgggcccttgctatcagttaatagtcaacacatgctcacaggccagtctgatctaggtggtttcttatcaaatttgcctctcaggtgacatatgtgatatatactgtccacacacataaaagccattgatatcttggattattttcagttctttttccttgtggcctcttaacagccttgtggtgagtgtgttctcatgctgctggaattgcttaaaaaaaaaaaaagtaaaaacatgctggaaatggagaagttttacatttttctgactttgcacaattttaagacttattttgtattgtcaaattaatgctagaaattgttagaccatttatatattctgacaatataaatgaaaccctcctgtattcttaccaatattgatgattataatctttcattcctgtcaatttgacagatgaataatacaataatttttatccacgttctttgattgtgtagctatgttgtttttcaacggcttattatctgtaaatagatgtgaatcaccagtctctataatgtgtcactttgacttttgttaaaactaactttcacagttttatcttaggatttttgtcctttttgtcattggcctatttggaataggccatttagaataaattcagtcattttcgatttttacttatttatattttgagcattcatattgaatttagtttggtctctttaaatgataagttatattttttttctcatgtagtatcttcatctgtcaaaaattctttctacatttatttttttcctttgaaatcctaaaatacacagttaactttttactgtgttctaccaagaaaatatagactatttacttgcatataaatatcttccagatttatgggaaaattgtccacatatctaaatatctgtatttctgtctgttgctaaatatctgtttattttcaacatgctgcaggatattgaagacaaagtaagtaacaacaacaaccctaccatgagcaaatgcattgatacaaactaaacagaactcgattgaacagttactctggtacagagtgagccaggcaacatatgatcacttttcaaaggaatataaaccatataaagatggaaataccaagatacattgatttttttttctaggtaaaagccaaacatctatttaaccttcactgaacacaaaatggtactataataactttgttagtatgaggtaacattttaaagagaaattgtttctgtttcaggaacaaaaaatcagtttagcataattcaggataacaatagttttgaaaatgtgggtttgcattttaaccaaccttgagacacccacaagtaggcatcttcttttgttttatgaagaatagaatattattgcttttttaaaaattttataaaatatgatcctgtaaaattaatattatgactaaatgtcttaatactttattatacttattatctttaaattttcaaataatgaataaacaaggctgcttaatagagtaagctgctacttcatgtatcgggaaatggaataaatatatgtaacttcatacaaattgcactaatcactcaagggttcttgaatataaggtttgtataggcattttttgttacttgttcagggttaacaaacatgtatctaattctaaaaatcagacagaagtttcattctgcatattattaattcttaaaattactctttggatgagaagttaaataagacagtctgctgtacactgtattctgacatttccagatacatttggacaaagtaggacacagctgttacagtaagaaaaacacaatactgtttcattctttacacacaaatgcagcaatcatcatcatattaatgttttctatagtagggacctagtagaccacaatgacagttagctttgtatatgtttctgcctgagttttgcttcctggttgctgctttcactttctctcaatatagtctactccttgtatcttttttaggctcggcagctggaagagaaagaccgagtgatgcggaagcaggatgcattctacaaagagcagctggccagactggaggagagggtatggctatttcttgttgatgcttctcttctttctatctgtagctgcccatatatttgttttaaaaaaaaaagttagcactaatgttccttttcctagttaagtgaagtcataactatacagtgacctagttaaaatggtaggccttttgtctctgagaacttcattttgtgtggtcgtgttattggcttgttgggtttccaggtatcaatggagggtgacatgagtggtagagtatgtaaggggtttggttgggaatgatttgttgaatagatgtgacacgcaatgattttgaggagaaatgagtgatgacatcccctcagtaagtattttagctcgcgtgggccctttctgttttcctaacgctccctctgaaatgtggaaacgaaagggactatatacagaaggaaggttacattttacataattttcacatcataaaaatttttaaaaatagcatttacatatagaaagaccattcttaggattttctcagccatcaggtgagcctaacacggatgaaggtcagtttgtagaagtgctacttggacccgttgtggcatcgttcatctgtccttcacaggctctgtaatgaaattcttgccctctccagttcttttgcggttaagaggaagtaatatttgtatcactggcttattagaataacctaaagcaagaatctaaatagtgcttgggtagcaggcttaacacctcatgttcgacaccaagtaatgcccctgacaaaataaaagataacacgacagctctttgaaaatttgcaagaatttatcaaattgaggtgttttcatcatagggcatatctttcatctatgattacataaagaatattcagtctgtcattttgtaaaacctgtttttgtttgtttgcttgtttgttgttttttcatattgttaatggttgtgaaggcgctctgtataagcatttctaatagacttctgaacatacttggcattaaaaatataaaagtgtggaactggatagtgcttagtataagaaaacatgataggatgtgtgtgtttacagtgcagtccaggttgctgtggattaaatgtggatttgaacacacctttcctttaatcacatgaattgataccttcaagtcaatactcggttaccagtgaagaatgtgactcagcgagtcctgtaaggatctgggcattcagcacagagttctgtgtaaggccttatattcttgtggaccactaaaaccaaaacaagttttaggacaccattccaaagctgttgctacggcaggctaggcacagttggcatgtatgtcccacctttgcatgattgcttccttactcctttaatatccactttggtgcgaaggtcagcagttatgaactagccagtttgagcgtgtgccgcacattctgttctgtaacactgcccagttgctacttggttttatttcagttaaccctgccagttaggtgattgccatgagtcaagtctcttctcttcccagatgtgtccaccagggagggtctgagatactcttcttccttcactaatgtgtgaggcttcactaataagtgtaatttccctagactacagttttattattcctggaagcagttttccaaatcatggctattaaaactttcacaggtaggtcctcatttcccagtagtcagagatcacagactttcccgttagtatttggatagatgagactataaactcttgagagtgttaaaaacctcgtgtgtaggtttatggcccaaagggagctggatgagtatgactcttgcttcagagaccagaataatattaactcctggctgacagtttgcccagaggaagcctggagcagtctctagagaaggttgctcagtgttctcacacaactggcctaagtcccttgggcagttttttctgttttcacaattttattggtgtataattaattgacacgtctatactgcttcacagctctcaatgataactgtacattatataataattgtgattaaatatgtatgttgttagacacatactatnnnnnnnnnnnnnnnnnnnnnnnnnnnnnnnnnnnnnnnnnnnnnnnnnnnnnnnnnnnnnnnnnnnnnnnnnnnnnnnnnnnnnnnnnnnnnnnnnnnnnnnnnnnnnnnnnnnnnnnnnnnnnnnnnnnnnnnnnnnnnnnnnnnnnnnnnnnnnnnnnnnnnnnnnnnnnnnnnnnnnnnnnnnnnnnnnnnnnnnnnnnnnnnnnnnnnnnnnnnnnnnnnnnnnnnnnnnnnnnnnnnnnnnnnnnnnnnnnnnnnnnnnnnnnnnnnnnnnnnnnnnnnnnnnnnnnnnnnnnnnnnnnnnnnnnnnnnnnnnnnnnnnnnnnnnnnnnnnnnnnnnnnnnnnnnnnnnnnnnnnnnnnnnnnnnnnnnnnnnnnnnnnnnnnnnnnnnnnnnnnnnnnnnnnnnnnnnnnnnnnnnnnnnnnnnnnnnnnnnnnnnnnnnnnnnnnnnnnnnnnnnnnnnnnnnnnnnnnnnnnnnnnnnnnnnnnnnnnnnnnnnnnnnnnnnnnnnnnnnnnnnnnnnnnnnnnnnnnnnnnnnnnnnnnnnnnnnnnnnnnnnnnnnnnnnnnnnnnnnnnnnnnnnnnnnnnnnnnnnnnnnnnnnnnnnnnnnnnnnnnnnnnnnnnnnnnnnnnnnnnnnnnnnnnnnnnnnnnnnnnnnnnnnnnnnnnnnnnnnnnnnnnnnnnnnnnnnnnnnnnnnnnnnnnnnnnnnnnnnnnnnnnnnnnnnnnnnnnnnnnnnnnnnnnnnnnnnnnnnnnnnnnnnnnnnnnnnnnnnnnnnnnnnnnnnnnnnnnnnnnnnnnnnnnnnnnnnnnnnnnnnnnnnnnnnnnnnnnnnnnnnnnnnnnnnnnnnnnnnnnnnnnnnnnnnnnnnnnnnnnnnnnnnnnnnnnnnnnnnnnnnnnnnnnnnnnnnnnnnnnnnnnnnnnnnnnnnnnnnnnnnnnnnnnnnnnnnnnnnnnnnnnnnnnnnnnnnnnnnnnnnnnnnnnnnnnnnnnnnnnnnnnnnnnnnnnnnnnnnnnnnnnnnnnnnnnnnnnnnnnnnnnnnnnnnnnnnnnnnnnnnnnnnnnnnnnnnnnnnnnnnnnnnnnnnnnnnnnnnnnnnnnnnnnnnnnnnnnnnnnnnnnnnnnnnnnnnnnnnnnnnnnnnnnnnnnnnnnnnnnnnnnnnnnnnnnnnnnnnnnnnnnnnnnnnnnnnnnnnnnnnnnnnnnnnnnnnnnnnnnnnnnnnnnnnnnnnnnnnnnnnnnnnnnnnnnnnnnnnnnnnnnnnnnnnnnnnnnnnnnnnnnnnnnnnnnnnnnnnnnnnnnnnnnnnnnnnnnnnnnnnnnnnnnnnnnnnnnnnnnnnnnnnnnnnnnnnnnnnnnnnnnnnnnnnnnnnnnnnnnnnnnnnnnnnnnnnnnnnnnnnnnnnnnnnnnnnnnnnnnnnnnnnnnnnnnnnnnnnnnnnnnnnnnnnnnnnnnnnnnnnnnnnnnnnnnnnnnnnnnnnnnnnnnnnnnnnnnnnnnnnnnnnnnnnnnnnnnnnnnnnnnnnnnnnnnnnnnnnnnnnnnnnnnnnnnnnnnnnnnnnnnnnnnnnnnnnnnnnnnnnnnnnnnnnnnnnnnnnnnnnnnnnnnnnnnnnnnnnnnnnnnnnnnnnnnnnnnnnnnnnnnnnnnnnnnnnnnnnnnnnnnnnnnnnnnnnnnnnnnnnnnnnnnnnnnnnnnnnnnnnnnnnnnnnnnnnnnnnnnnnnnnnnnnnnnnnnnnnnnnnnnnnnnnnnnnnnnnnnnnnnnnnnnnnnnnnnnnnnnnnnnnnnnnnnnnnnnnnnnnnnnnnnnnnnnnnnnnnnnnnnnnnnnnnnnnnnnnnnnnnnnnnnnnnnnnnnnnnnnnnnnnnnnnnnnnnnnnnnnnnnnnnnnnnnnnnnnnnnnnnnnnnnnnnnnnnnnnnnnnnnnnnnnnnnnnnnnnnnnnnnnnnnnnnnnnnnnnnnnnnnnnnnnnnnnnnnnnnnnnnnnnnnnnnnnnnnnnnnnnnnnnnnnnnnnnnnnnnnnnnnnnnnnnnnnnnnnnnnnnnnnnnnnnnnnnnnnnnnnnnnnnnnnnnnnnnnnnnnnnnnnnnnnnnnnnnnnnnnnnnnnnnnnnnnnnnnnnnnnnnnnnnnnnnnnnnnnnnnnnnnnnnnnnnnnnnnnnnnnnnnnnnnnnnnnnnnnnnnnnnnnnnnnnnnnnnnnnnnnnnnnnnnnnnnnnnnnnnnnnnnnnnnnnnnnnnnnnnnnnnnnnnnnnnnnnnnnnnnnnnnnnnnnnnnnnnnnnnnnnnnnnnnnnnnnnnnnnnnnnnnnnnnnnnnnnnnnnnnnnnnnnnnnnnnnnnnnnnnnnnnnnnnnnnnnnnnnnnnnnnntgtaggtttatggcccaaagggagctggatgagtatgacttcttggcttcagagaccagaaataatattaactcctgggctgacagtttgcccagaggaagcctggagcagtctctagagaaggttgctcagtgttctcacacaactggcctaagtcccttgggcagttttttctgttttcacaattttattggtgtataattaattgacacgtctatactgcttcacagctctcaatgataactgtacattatataataattgtgattaaatatgtatgttgttagacacatactatattttgtctaattttatcctcacagtaactgtatgaagctgcccactctgtgaatatcctgaagctgagagcagcttgcccccagaatacaaagccagattattatcagtagatctggttttgagtcggctgcctcaacagtgctgggggccaggacactgctgtctttaaaatgtatgagtttatgcttaagttgtttagtctatctggggacagtattagttctttgagtgccgagttagcacctctagcttctagtacaactcttgggcatcagatctcatcattggatgattgccttctcataacctgaaagtattgagctaaacactcaaaaatgtgtcatgtcctcctcaggatttggcactttcaaagaaacttttacagaaaggaagaaagaatgttttccgtacctgaacctgccgtacgctgcagtccccaagttccttcccggtctgcatttggtgctttccctttcagtgaggactcagtagccgtctgagcagttggacaccctcgaggtgtctgcacacttttactcttgtaggacagtcaggtcattgtgcctcctggaaagaaaacatattttttcttattaaacagttctgactgataatttgtttgaagtggattgttgacacgttcttaaggaaaatgtatttttttgccaggagtttattggttctaaggttgtcaccaactgaagaacacaaaggttctcctatctagagtctttccaggataaaagtccctgtatcccaaggacatcgtgaacacttgattcctttgagggttccaatgtcatgcatatataactttttaatttttacagtgaagttcaattaattctttttgctgaatcaaccactttgttcttggctctgtcaaggatgatggggtttggcacagcatacaggggaagtgtaaaagccctggtggccttaggagctgagggtgaacagagagcttaatgaggtgtaggctcagtacaaagatcagcctggtcgtgtggcacatattacttgtagtttatagactccaggctttcagtagtaatatgcttacactttgtaatgagccacctagaattaacacagaagggaactgtatcaacgtggcagagaggacaggggaaagaaaacagtgaaaaagtaagttaccacaaggaagttactggcctgccacctggggagagttactaattaactgctgaggtcatagttccatcaaatgagaaatggcttttgaagtccctcacttccagtgggtgacatgtcttctgcagcatcagaaaatgttgggcccatctgtatgattaattggtgatgggatttagtcactttttgtcacttgatatttttaccgatgttaccttagaggaaggggaaccatgataactgatagtgtgagaaatgacaacagagtaggttatggtgaacctgatgcactgcatatggggagacactgttatgtattttactaacagatgaagtctcccactgtagagtatctcactaagtgaaaccagggtagcatgggatagaatctaaaatctgagatacaaaaatgtgaaaatctatttgaaagggtgaaataataaattgacttactggtcttcaaacaaacaaactaactaactaactaactaacagacagacagacagacaccctacctttgctgttttccctgctagagcagttgtgagtgcatttggttagtggcaaactccctatggccatgcagtgtgagaaggcagactcagcacaggagttaaaagcagagctctcctccagccaggcctccacaggtgaagctgaacctgacaccctgcagagatactttgtccctctgacacctgggaattttgtgttggcttcatgatacttgtggaaatcagggctggttcccatggtttctgtagttacagaacattgcagaaacagatgaagttctctggttcacacgtttgcacactgaaggtactccaagccactatcaggattgtaatgtcataatgtaaagctcttgcagtgtgttttgtacattgagagttacactctcttaaataaaagctcttttcaagtaaagtttcaaataaatgcatttagatattattaggtaggacattaacacagcctggttacagcatgtcttttgttactacagcggacacagctgattataacttagatgtgaatgctgagccatttcgcactctgacctgttttcttaaaggtttattattacggttattttgaaaagtagcaaacagtatgagttgatgtcaccactacccacttctctttctatttcattctctcaggggaaaatcaatacagtttagtagatgtgggggtcttatccttaattcattattcaacaaatcctccaagtacattggcttttctgttaacctctctgaaatttctaacaggaaatgtggtttgagtaaccttgaattgcttttttaatctggctttagggatataagacctagggttttttttttttttcctagggtgagcttttaagtgtattctgttaaaatgatccccttaactggagccagctcttctatgtctaactttagaggaaagatttgcaaatcatgggatcagcacttaatttgggctctatttaccatgtcatctgtcaagaagcattaaccttaaggtaagatgagaacatggagtacaaagctgtgagctggatggcacacagtacaccaggtattaaatagcattatccatcctgcttgctacagtaaataggattccactattatgatgtgtcagggctttcagtaaaatcacatttacaagacactaaactgccttcctctctgctcagcagctttatgctggggtcttgctttcatattaatcctgttgctaggaaatacttgtagcagttgggcatagaaattataatttgatgatctcttcctcttctctattcagagattagaatggaccactgtgctctgcagtgatagccgcagggctgtgcgaaagagatgatggagagttcagctttaaagaccagtggcctcttagtgagtgcttataatgatcataggtatgaaggcaccaacaggatgggctacctactttcttagtgctctgcattgcctttgcctttgaaagactgtacaatgaaataatttgattctgtttatcatggtggttgtgagaaatggcatgccacttggatgtgtaaagataaggtgaaaaaaaatgccttgtgaactttgatgggaaattccagtttaaagatcctatccaatttacagaggcttggcgagcatttgtagttgagaaaaataccacattcttttcactggaactatatttgggggaggaagtggagggtgattgtcagtattgcagcaaggaagccattttgtttcctttaaatgaagttgaaaaatgggctaaatatctgaattttaaatatttttaaaatatccagttttaaaatgaatgattgtttggcttcttgctatcttatttgtaaattgcaaatgtactccatctaagcattccagccaatgcttatttcctcactttgctgactgaaaaattaaaatacacgagcattaaactcttaaaggaaattgcagagcttgtggtagaaaatgccctgcaatcccagctttatgttaagaccatgggccagctgtgcctctataagggattacattttagcacattagtttcagttagaaagactcatatggtcattaaaatatttgcaaataatattagcacttgtcatcactgaagaagaaatgtccacatctgaaccaaggataaagtaggtttacactgtattctgcatccaatgaagggaacccaaatctaatttggccaccaaaactgggacagtcttgttataaccttatttattcacaatcagaattttggcattagagaaaaagcattgacattcaacatttgttctgaccaaatatagtcaactttatgagtgagccaggtatatagatacagtgacatacagctagcacaacatggccatgggcaccgggaaaggagttttcattgacaattgattcaagatggctgtgctggcctattattttctagaggcaaagtattttataaaggctatttggtaactttgtcctttaaaggtcaaaaaatcatgagattttgaggagaatttaatggatagaaaatatctccctagttaacttctcagataaagatctattgtctgatgtactgggttgcctcagatgacactctgaaaagaagtattacacatgtagcttccatgaagtcagaaattaggcactagataaattttgaagattaatgctattgtcagagaatggggttgattccacagtcaaatgattccaagaaatgttaggtttaaatgtgacagatgtatttacttcccacaagcacttggacacctttcaggatgaagatgcttcatgtgatggttcagcatcacactcaagccgtaggaccttttctcgaaacagccattaatctcctcttgtaggttaataggatctatgtgcactacataattaaaatgtgccattttgagaccttgattgcatcctaacttgtaagggcagaaatcctaggatctctccccaaatcctaggattgcatctctttgcagacagtgggcaggtgagacaaggcaggatgagcatgctgaagtgcctatgggattcttagcaaaacagtggtgtagaatgtaaataagcggttgctgcttcctcttcctctttctcctctttctcttccttccttccttcttccttctccttttttccttccttccttccttcctgccttccttccttccttccttccttccttccttccttccttctttccttcttttttcttctttcttccttccttcttccttccttctcctcctcctcctcctctttttttcctatacacattgctgattctaacttgcattctctcacactctgctaaattagaagtgatgagtagcaggatttaacccatgttagaattcaaaatcatgccataaaccaagggatggctatgcttttctgaaatcttagatctgttcttctcctttcatgaaatggaggagggtaatctaattgaatagtactcagttatcgcatagatttttaaaatacttccatcaatggagtgaggtcccaatctggcaggcaagcaaatgacatatcagcgcccattcttgatggacctcgagtcactgggaccttcaggatgtttggagggcttgcaaggtctgaaagggtgctgtgatgttcgctggcctagtaaagactactttgtacttggagaatagatttgatgatcaaggccagtaatcatatgccctgtaatataatttgcctctgttagagttcagaagtacagctcagggaacagggccctggactgtcactttatgaccttccttcctgtctgccttcttgtgagctctctgaaagtgggcactgtccgttttcaagacccatgcttggcatttgtcgagtagacgagtgaagttgtactcagaacgttctcctctgtgaagcaggttgggtttctgtgctagtctgtctatgccatccattgggtgtcgtcacgaagctggaggcctgaaatgacctcacaggacactgtgctttaacgtgggtggaggagggaaaggcacctccttgctaccttacccagtcagttgtcgtttgtgttggtcaaacttagagacatttaagttgcctcagatgtcccagctgtgcagcaggctccttgtggcagacagcctcttcctctggatgagcactgaggggacccaaagttcccacgatgcagacactctgcatctcaagatgttcatgagtgtgaacagaatagctcttagtttttcctttagagccactaatgtaaagtaacatattctcggctaactaaccatttctacaatctaagcaccataggcttactttatagtgggtcatgtttatagcaaagagaaattgcaccagctatgtactaagttgggatgagctgaatagccagttactgtgctgtggcactcaggttataatgatggaggatgctaaaagaaaagagatggaaaacgagctatgccttgggtcttattcttctgataaggtggagaaaagagaaggtggttctagacatacaatgggaaaagtaggcagggataacttttgaggcaggctactccagctctggtcatggttgtgagagtcagtgtgatggcatctatgggatcctatcagagagccctgaagatggtgcccactgctgctgctttagactgtgcaagacgaatgcctgggttaggaacttccttcaaatttagattatagacagacagagtatagacaaaccatttgggcttcaggaattaatatgtctcagttaaatatatcttccttcctgctttctttctgctggccccttttgcctttcattatatcgttcagaccttaaacctgagatatcctccacccactgtctcagcatcatgagcgctggaattgcaagcatatgcactactttctctttacatgtgcttgcttcatgttgggcaccacctacttcatgctgagctgccttacaaagtaagtatgggatccgtgcagtgaccagaggaagcatagtttgcctccttccttgctacttcttagtagtaatatttctagaacttcctatagtttctaccttgccagagtagaccatttgacttgagagagggagtctaaggctgagaggaaacagtcctgtggttcctggggtgggagattcagatcttagcatgggcatgactgtttactctgtcatcaagatgagcatatcactagaactgtagtaagtgtttctgtagttcagaaaaaaataatatatggaggattgtggattatctgttctctcataggatttgcttgaaattgtagaaatttggcagccatatcttgaactacttgttaaaattcaatagtgtataattaaacacagagactgccattttgctgttggatagaccagaaaattatattatgtcccatttagacttgaccctaaacccattttccaaaagataatgccaaagagacaaaagggcaagtattatagtttggaggctcaagctacatcaagaagcaattcatagaactattcattgttgtgcaggcatttgatttaattgtgcagaagagggttgtgaatgaatgttatgttaggagtggccaagtgcaagcagtgataatgatggcattctgggtttcaagcattgccagacaacaaaataatacttgtgttattttaagcctctcccaacagagagttaaaaccaatatgacctggataatatgccagtgtttgggatgttttattgaaacgaagtttgctgctcttaggaactcttcatctaacaaagaagctagcctgttttcagactgagaaattaacatgtagatgctggaaaattgggtttgtgctgctggcaaagggaatgatgatagtgtttacctaatcactgttactgctccatcaactcagtgccaggcatgtgaatgatgcgcatctatccatttaggctcttaggactggtttgcatggcagccctcccagatactgcagagatgactaaaataatgagtatgctaggtggtggtgtttaggttttatgaaaaccaagcaaagtataaaatctcatcagctttgtttgagggatgagcaggtgtgcatctttgagttgactgctgtacaggctgagtgacatttgcagttgaactcagctgattggccttatcagagcaaaggtgctcttgctggtttggtctacttgattttcgggtgtcacaatttgataaaacctttatttttaagtacttgtctcctggtatttcataattgcatgaaatagttaagaataatcccaggtcttagactcttaggggcataagcttaaatgaccacagaattcattgatacattgataactctccccacagagttcacaaattgcatcaaagaccagtggatatggggtcaaatgttactcttcagctattttttattggaaacatctgtctgacccttagatttcttcttggtacagtggccttaatgatatactcccttgtgtatatggaaatatgcattaggtatactaactgaggctaaatatcagctatcatcattggcagcagcacctaagctattgagaattacctattttgaggtagcttttgagtgaagaggtttttaaaaaaatggaaaggggataaggggtgggctggaaatgtgggttgggctctgtttgaaacatctgttatttcattatagtattttgaatttttcaaaggtatgagttgagcctactatgaaactaattttataataaaaatgtatcgaaacatacatgcattcttttggggttttcaaacctcttatatgtgtatttttttgatgttaaaatgagatgtcattcataagtatttcccttcaaacttcatagattgccaatatgcaagacagtaacctaagaatgtatggcagtctgagttttttggtctctctctctctctctctctctctcgctctctgaggctaagttgtttaatgaaaaaagaaagaaagaaagaaagaaagaaagaaagaaagaaagaaagaaagaaagaaagaaagaaagacaggggggaaaaagtacttttctgactaagaggcaggaaattaacaggcaagaaaaaagaaaaaaacaacacccaaacccacccctatactcacgtgttaaaacaaaataaaacaaaaccaaaccaaacaaaacaaaacagaatcaatgctctctttgatgtggttaaacttgatgtttactgtaagttctgtgatgttcagtgtagttcccatcctgtggggttagtaacaaagcccctcggaggggaaggagctgggttctaccaaggcttgaggaccctgggaaggccagctgggaggagactggttgttcattggaggcaatgctttcatgcctggccttcagtgatgtgctgagctcagccgctcgtttctgttttctaatattcccatagtagcttctgatataaggagtcagcacagaacaaggactttgtcaataatgtttgggtcagtcttgcagggttgtttgtttgtttgttttgtttgttttttgttttttaaacaaagttttcattcgaatcacatgaggacattgttgagtctgaaaagtaaacaggtacagaagaagtttacattttcccttctatctgacttccttaagtgcagttttaggactagaaagcaagagtgcagctgagtcctccctggctgctgttgtccggagcaaggagacatgtcaggaacgacccagagtgcttctgatggccactacttcctcagggtaccttgctttacttagaatattcctgattaaaagatccttcccaggaaagactagacatctactctgggctgtatccctaggaggcagcgagcatttccaagcctaaggttcaggagattgacagtggggtgttaatgctgtaaagtgaatccacgcagaaaaatgttgtaggccagatgcagtgcctgcaggtctcaccactttacactatttatgcaagagtctattaaaatgctcaacaaagagcaaattcgccaactttcttttcattatttgaactaaggacctcaaattttgatgacaagctcagggaagcaaaacaaagttaaaaatatcacaaaggcattgtgagattagagaactattgttaaatgaggaggggcagaagagatgtagctgcttttacagaatacacaggttcagttcccagcacacacttcatggtctacaaccatctgtaactccagttccaggggacccaatgccctctttctgtccttcccagatacagtgcaaacatggttcacatgtgtacatgcaggtaaaacattgacacactttaaatgagagaaaggaaaataattgaatggtggagtattccagtctgggaaacaaactgtactatggtcatctaaatagtaaatatttctgcacaaaccttttgtagcatctgcatgaaatctgaattcatttttatcgtttctctacagtgtcctgttgattttgctctttccaaatggggaatacaaatcaactctagattagaactctgcagctatctttcatttctgtagatcttgtgctcttaatcacatgatgtaaagtgtactggaggatacacttgttacattggaagcaaaagattaaagccagtttctcagtgtgggtgaaggtctttttattttattacatggtggagtcaggacagggatatatgtaaccattttaaattgtttttctcatattttcctctagtacaaaatgtggtaaaaatcctccctaatttcaccacctggaaaatcaaagcacagttaaaaaattttactgtaacacattttatatagcatatcttctggtttccccattatctaaagaaaatgatttgtcctttgagaaaattactttttaaaaagtttatccagacagcagagcagcaaggcattataagtagtctttctgccttatacttatcagtaatttaccccaatataggatatgttcatggtttttgaaaaataacgagatggtggctttattaaatttttggtagtagtagctgtatttaagtgagggggggagtgaagagggagagagagtgtatgttgctctctcttttcaggtgacaaaatgaaaatcacatactgtcctttcttaaaacaaccttctgtgttgctcaataagctgttttgattccaggatcacatgttgtctaactttttggtctctttcaagggtactttcaaataatttgctttttattgttctatactctagaagaaatcattactttaacagtatttgaattgattttttttaaattaatctacaatactgttgtttctaacaatttaggacatttgtcaatatgtgggggtttttgttttatttagttttgttttgtttttcagtttgctttgtcaccaggaactagcttttcagcagtctcattccattcatttatagaatttttttttaatatatataactaccaatgcagcagggtctgttttaggctctgagaatagaacaaagagacacaaacttcttctttcatagagttggcaaaaggttaatacaaagacagtgtacagtatgcatattttatgttgagtggtagtaagttctggaaagaaaaatagttaagtcattagtgaaatgtgtgttggggtgtgctgcttagtcagggaccaaaagagtgagccaagcatgccacacctgcgaagacactttccaggtcctctcatctcaggctgccccattcctttacattgctcctgggtatttgctgctcttgtgtatctatcacttcacactctctgcagaaagtgccaggcttgctttccaagcgcagtagctggcttgccaggcccagcagacggtgcttattctggtctgcactttgttagcagatcacttctatgtggagttagttcaacttgtgctctcgtttcaagactgattctaatcccttctcttctagaggaatagcaaataagcccggtgagtcaggttaaatgatattgaagtgatattgaagggtttttccttttcttttctctttttaattccttatcaagtaaaaatgcaccaggtttttccctgtgtctttcctcaaacccaaatcaacattgataatccttcctcactgtttgaaatagggaataacatttactgtactgtactgtggtatttcacataacctttccaacagcccagggcagtattctcatttcatagctaaagggagtgagacatgggagtgctaactagtactaacgagtactaactaggtccttcctcaggaaaggtaagtggcagagccagggtttgaaacctcagaccaggcccatattctgatcctttacaatgttcaggctgaagaaaaacttgtaaagggggttgcattagacacaaaaggagacgtggaaaatctttgatttcatgttcccatgaaagatcgacaacctggggaattaggaaagacacaatgtaatgtactgcgcttgaaaagccaacctgtgtttgtgcagagagcgtgaagtatatgtgagagtagcaaatgcctgtggagcaatataaagggatgcggtggtgtcgggggcccagcaagcctcttcacaggtgtggcatcttggctcactctttggtccctgactaagcagcatcctccaatacacaaacatttcactaatgactcttaccatttttcttctaagtagatgtccctctaagagcgtccacagatctgaaacggccagtgtgtggctatgggtggagaatgtctttttgagacttacgcaaatggttgaaggttgaagttggtaactgagtctgagagagtacaaataacagacctgcttattggataggtaatggctacttgcccataaatcacagattgcatttttatcactttaaatttggagtttctataatagctagctaatgatgcccatgaaattgttgggttcttgtctagtcaggtctataaaaccacagaggagtgtagagccatcccctgcaacagttctcttagagataaatgcacctccccaccctccgaaaaaaaaagtgaaccgtaagcaaaggtctggagttggtgagttatttggggaggaacactagtctagcagaggttccattgtgtgagggatatgtgaataaggaggagggagcaaaaggggttaacagcatccttaccaagcagagtctctacttgtcttaatctgatcgctggccttgttcggcctatgcattcacttccgtttaatttgtagacagtaaaaacatatcttcacctttaggattgctgtgctttaaaagtcatttattgacttgccaaccacatctttgtttggaggttaaccatttccccttctctatgccccatccccacaccttatagaaattgaaaagtgtgtacaaaaggacatcccatagtattttaattaataaaattattttattctgaacatcatagacataaatctaaaataaaattgaaaagtaagttgtctgctcttgatttcctcatcctgagactagggatcatagtgccagcatgacagcatagaaaatgggtgtggttgatgcatgtctgtaggcctagtgctcaggagactgagacctacctgcctggcggcatagagaatttcagctgtggcatgcataagactgtctcagatagcctggatgaatgggtgtgtggatagatgggtgaatgaatagatcagtgcgtggataggcagatctcactgtagtgcctggtcccggaacttttatcagtggatctgaaatattacgagtgatacagtagcactccaggtaatttttgcattaatggagaacaggtcataaagaatggatctttttgctttccttttcctgcagtgctttacagaaggtaaagtatttgaaagaattatcaaataaggccatattcagaaacatttctacttggataaaataagtgtaggaagtaaattgaacaatcttggcctcctgtgttatagaatggagtctgtaggaactatgaacctgtgaactatctccaaagaacacatgttgctttttatcctggctagttatgtgaaaataatacaagtcagtggtaccttagcatctgaataattttggttcacaggataggaggggcatcctctagctttctgttggcgctgtgtccagaacagaccataagttaatcttgggggtgttttcctggagagtttcccagcctgctgagttgctggtgcctgtgtaagaggacgtccatgatgatggaggccttgcggggaaacaaaggctccaggtgtacttgaacttaccagcattggtgtctggttatcagtacacagacagcttgataccaacacacaccacacctgctctcaggtcagaggtgaggctgtttgggaaaatgagtaaatgaaggttgggtgaagtgaatgaactcttgtggaaagaggctactgaagaggctgacttgctattagcacttactcttacgttctcagaatgacttatggagacaggggatattaagcactattatattgggaagaatgaactttgttgtttgttttgtttctttggaaagtatctctgagtaggccaggttgcccttgagcatttgaacctcctgagatagccttggcagagtacaccactgaatcactgtatctgcgttttgtcaaaaatgaaggatgaagaattaaagtagattcagggaaagggaagccatgggaaaggagggaaaagaaaatggagatactctaagttattttactacagagaaatagtatctatgtgaggagatgtgcgtattatttgatttcaccattcaataatatgttcatatttccaaataccatggattagatagcttgccttgatcataccagtcactccatgtttaggaagtgaacccccatcaggctacacttggaagtatgctagttttttcatgactatttcagcaaatgtgaatgatgtcttatgagacatgctgcagaaaagatttctctagaaggactcagtgacatacaagatttcttatgacttaaaatttagtctcgattcatagatttgccaagacctacctatcctgccgcccccccttgtgtgtgtgtgtgtgtgtgtgtgtgtgtgtgtatgcatgcgagtgtgtctgcctgcctgcctgcctatctgtctctcccctttccttttctttttttctcaacatggatatctaagagcatcatgaagtatttcccttttaaagcatcacttagcattgcttctgagagctttatagtgttgtatgtaagctgcatgtttgagtgcttgtttgtcagctaatagccacagtgttagttacatatgaaacggtagcttggtgaaattacattgcacctcctcactgaaccaaagcttaagcaagcatcttgttgcagggaccctcattttcctgctgtcaaactgactgatattttaatttttctgcgctgtagaaaactccagtctcttatccaatagataaatgagtgaacccccaggaaatgcagcagaatgtttctgtttgccaatgcaataaatgcaggagctaataaatgtctccttccatcaggaggaggcgtgtaatgagtaaatgatgagaaaaagaattcggggaaacaaatgatcaatgcaatctaagatgacaaaccatttcttaataagttggcctctagttggaaagggctttcaccaggcaaggagaatgcccgttgaaagtcagcctagcacggaaccatttctgtctgcctgctgatggatttgatctaggcacatttgggtcgcactgagcaataaactgagattcaagcgcagcctcactgttgcacactttcttttgctctgtgatttctgcaaatgtgtgctagcaagagaaatcattttaggaccaaattcacagtgtttaccccaggttccatttatatcctatatttgtctttttaataaaggccgtatttcaaaagtacaaatcaagtctctttcctgagagatgtgttgatgccacacgttttcacaagaccccctcccctgtggggtctgtgagctattctgtgtaaacctcagctcctccctaagtccctggagtctgcttttgtggggactgacaatgcagcaggctttgtcccttgtggatggacgcattcttgcttacaagccttgcttgaaaggtcttggatcctctgtcagcagaatgcatagtataattaagatatagtaaatgagacaggccttggaaggagcgtttcagcccacatggaagatgtgagagaataacttcatgccagaatgaaagatcatttgacgagatgcattttgttatcacccttttgtgggctccttctaagaacatttctcagaagtcatatgggaaagattggctaccacatccccaccattttcaaagacagattttcatgaatatttctagactatctgtcttgcttattgtgtcctccataattatctttctttctccatccttgccaccctggatcctttgtaattattttcccttccctatcctacccatcctatttttaagagatatggcacattctggtgaattcagtaccatacgaatgaatgcatgtctacagtgaagagtgagactgttaggtggtggtcaagtttgggatcatcattcaggaaaatgttaacaagcctggaccgaggctggaccaaggtgataccaaagggcccttagtgtacttggtagcatatgaaatgcactgtggagcttccagatcctgcacagtgctttctgagagagctattatatttgaaagctaagacgtttcaatgtgcctctattcacatgcatatttctatgccatgtctttcaaaaggcctttcctttgaaatacaaaaagataaacacatctttgaaatggataggtgatctctttgctacttttaaaatctttcttcatttcatatctgtgatttttaacccttaaattaagactggcttttctattcacctgtgtcatttaatacacattgataagcactaagaaaaaatatgacatagttattattaacatctggatttgtgcttacattcctgaagggaaattaaaacttgatagactatctcccttgagtaatttgcttggatgttaaaaaataaatataagacctccatagttaaaagtatgaatttgccaggaactcagtagggtatcatctattgctctgaattgaaggaactataaattatgagtgatacagccttctagccttaggcctgcagtattaggagctgaactgattttgttcatttttgtgagctatcaagtatgtacccctggctaagcgtaagcatgctaatcgtgacagggaaataaagaaggcactccttgaccatgcctccttactgtagttttaccaagaagtcaagtgaaggaaaaggtggatgttgaggagcccaaagcctctctcggttcctggtagaattgactctatcatttgtaaaggggaaattgccagtgtcccattcttaggactcttcatttgaatgttacattccaggaggttgtaagcattggcattgtgactactgtaaaataaaaaaatctctttcagcactactggtaatttacacagcagaagttgagtgtctgtaaatatttgagtaaatgaagagtgaactttggcccacttaacaggtggcaaaagaatttcagaaacaccaagaataattaaagactttaatgttactcataacttcagtttaacctgagcctcccttttaaaacttacttctggctgcattggtgctcactgtagagtttcattcgtgaggagaactggcaccatttagagcatcatagccactgtgtaacaatgcttccttataggtttgctcaccaaggactcaaactgcatgaagttagacagttcctctctctttcacccccttcagggaaaacaaaataccctaaacaaccctagcatcacctggatgggaatgatcttgtcttagctctcctctgtcattgtaatctttccatattaactctatgatgaactgataatggcaccccaattttgtgtgcatcagtgttgatccagacatctttaggggtgtaacttctgtatcagcatttattatattgaaagacagtgctacaaatggttctttttttatactttttgtagcaaataaccaaggttcccatttgcacatatgttcattggcaatatatctgtgctaaaaatgagtgggtttgagtatgggggacatggaaagaagtgtgcatgcttcagggatggttatgtgcacgtgcttctgttctgctagatatagaacgtactctgagccatactccagccagtcaggaaggatctttgttttaatctatatagtgttttgccttcatggatgtctatgtatcagatatgtgcagtgccctcaaaagccaaaagaagacatcaggtccccgagactggagttgcagttggctttaagataccatgtgagtgctgggaaattaattagcttgtgacctctagaaggatagtcagtgttcgtaaccactgagccatttcctttaaatggtttcacttaggtaaaatttgtttagaaaacaataaaaatcctttttatgttattttggttggattttatagcttttctcctagtttgatctcttaacatgcatcaccaatgccattgacagagttgctttgcaatggatgactgtgtgttcgtgccagcatcagttccaatactgtgttaaagaacagtgttacataaaggtcctaagtctttattgaatatagctatgaaatgtgggtaagaggtggctcctaataagtagatgtgctttactcaagtgatgctgtttgtgtcacctttgaaggggacatggaggcatgtgatgacatcatcttttgaaactccacatgctttgctgctctttatcctggagcagctcctcattaagccttcatcatgtaagcccacagagatcagtttgcacgtccccatcttatcccctgatcaggaagtgcacagtttggttatgaggctctcaccctttaggagccctgcctatttgctgggggattggaaaggtatttattgtaagcaaataaaatttcagtcaattgcaagagctgcccagctggtgtgaaggagcagagccaccagctctgttcagtctgtgaaagaactcaaaggtttactcaattttcagataaattctccattagaggaatatctggagcagaatgagctattgaaataggcttctggagaatggctctgtctgttaaaaccatctgatagtcacacagtgggatgtcatgttctgggtgaagtgggtaatggtgagctttggctggacctctccactctcctcatagtctctcatgcctctcagaggtcctcttggcctctcttggctgtaagagtgttcttctttccccagcctttgctatgtcttgtagaaggctttagggcgtgcccagtggattcactcatagcttctcagcctagattccaggcaaatgagctcagaggtcttctgctctttaaagtccttagagtttgtattctgttgtcttgtgttcttctgtggttattgcaatcatattttcagttgttcaaatggatgttgttacaaagctgaggaatactgagttgggtgacaaagcttgtatttcccagggcatttgcataaatagcactcttgaagactcactggactataaaaactggaagccagtcatgtttgtgactagaatcggcaacttgtttgcacctattggcttttctgcatgtcatcaaccttccctatacatctcttgtcctggtcaatattagcccatctgcaaagtgctcataatgtcttacataagttcatgattttcttaggccacatttatagctatttttagctgcaagttagataggtctttaactaagaattatcatttgaggggctggagagatggctcagagattgagtactgactgttcttccagaggaccctggttcaactaccagcacccacatggcagctcacaactgttactccagttccaggggaaatgataactacaaacagatatgcacaaaaacatctatacacattaaaaacccaaaaagaataatcaaaattattatttgaagcgttctatgccccgtttcactttgactccatctgcaaaggcttacaccagcacttgtgctgagcaaacacaggagaatcaatccagttgtttagatttacaggggtcctgttcatgggaggtgagaagaaacaggctagggtactctggtgttcaggctgagatgtgcaagcagtctcagtatgacagcttctttatgaagctatctggtgtgtgtggttaaatacgcacgctgtatcgccttgttgaacatttcccaaggaagacctgtgacttcaagagtgactgctggatcacagagccctcgagagaatgagaggtgcccatgctggcaacacacagtaatttaagagttactctccaggtcttgcaatacatactggtaaattctcttgataacccttctgataactgtgaaattgctttgtctcacccttgtagagaaacagtgagacacataaccacagcgagagcagaaaggtctcaggtgtgtgatttccaggtctgaaaggtgagtggaaacgagtgatgctgttctcacaaggaagaatcaagcagaaaataggaaatctttctattggcatcatgggatatgggagcagtttctcagtgctgtttcatttgtgtgcatcatgtcagggtgctcacatcacagcagagatcttaggctagctctcaggagttggttttctcctttcccagtgtgagtcgtagggattgaactcaggttgtcaggcttggtgtctttacccagagccatctttttctggcccactctatgctatctagacaactttcttgcatggtaagacttccaaaggagccctttctgacagtgcataaatacattgtggtttgccttttaaaaattagtaggctcatactaagactttgttacaggtataggtagctactaagaagaaaactaagatgctatgaagttaaagttgacgtagagcccccaagatattaaagatgccagagtgggcggatacctgctgagaaaagcagcgaacaaggaatggaagcaggctaggaggaagtagtttgttgcaggcaatacagatgaaaaaggagtggagatctgaaacctgctttgacatcagccatggagatgcagaggatggagattacccagctgttccctgcctcgatttgggaattacagttgattgattggctgaatctcagaagagaatttcaactttggacttttaacattgttgagactgctatggattatggggactttggaagttggacaaaatgtattttgcattatgctatgtttaagtatggcctccatagattcatatgtttgaccaagcctatggggtccagggaatggaatgttatggtttgtatatgctcagcccagtaacgggcactgttagaagatgtggtccttttggaatagatgtgtcactgtgtgacaagaccttcaccctagctgcctggaatttagtcttccattaacagctttaagatggagatgtaggattctcagctcctccttaccatgcatgcatggatgctgccatgcttttgccttgattatactggactgaatctctgaacctgtaagccatccccaattaaatgttgtccttcataagaaaaaaataaaataaaaattagtaggctcatactaagactttgttataggtataggtagctactaagaagaaaactttatcctcacagggtcacagctgttgctttcagaatctcaatctactcgtttgcctgtgtgtgtgtgtatgtgtgtgtgtgtgtgtgtgtgtgtgtgtgtgtgtgtatgtttcacacactattctagtattattcaaactaatttgtagcttctgttttctttcctcttagtcttcatttcacaagcctagtagatctcttattgctgaaagaggtcagaacaaacttttttaagaggagagaacttggaggtactccttgaattgtttcactaaaaattaaacaaaataaaattatagctgagccaggaactgaatgtgaagggttccataccagagaaatatagggctttgaaagctcattagacaaaccacttccaagtagtagaagcctccctttagtgagccaatagtccgacagtgcttatctagttatacatttatttattggatttttaattttatgtctctcttccacattttgccataaactctatgaaaatggagccacatcaccatactatgccaaatgcctgtcattatgcctggcacagattttcagtgcttatagaaccataggttctaactccctgggtgttggttgagttagacagcgtatgtagcttttcagtagctatctaccttggtaaggaggaatcttgtcagtgtgaccacacggaaaaatactagaggccacagtgggatgggaaaggacatggtaagttagaatagactgcaggctgactgactcaacaagattacattgctttattatttaccattatatattaaagcttgaagtttgaatttgttaaaaaacacacacatacacacacacacacaaaaaaaaaaaaaaaaaaccataggttctacaaaagaaaacgttggtgactgtctcagggctcctattgctgctataaaacaccgtgactaaggagcaagttggggaggcaagggtttatttggcttacacttccacagtactgtttgccatcaagaaaatcaggacaggaactcaaacggggtaggagcctgaaggcaggaactgatgcagagaccatggaggtgtgctgctgcctggcttgcttcccttggctgttcaggctggttcttataaaacccagtgtactggctagttttatatcaacttgacacagctagagttgtcacagagaaaggagcttcaattgaggaaatgcctccatgagatccaactctaaggcattttctcaattagtgatcaagggggaaaggccccttgtgggtgggaccatctctgggctggtagtcttggttctataagaaagcaggctgagccaggtgtggtggcgcacgcctttaatcccagcactgggaggcagaggcagtcagatttctgagttcaaggccagcctggtctacaaagtgagttccaggatagccagggctatacagagaaaccctgtctcgaaaaaccaaaaaaaaaaaaaaaaaaaaaaacaaacaaacaaaaaaaacaaacaaacaaaaaaagaaagcaggctgagcagccagagcaagcaagccagtaagaaacatctctccatggtctctgcatcagctcctgcttcctgccctgcttgagttccagttctgacttccttcagtgatgaacagcaatgtagaaatgtaagctgaataaaccctttccgccccaactgcttcttggtcatgatgtatgtgcaggaatagaaaccctgactaagacacccagtatctccagatcaggagtggccctacccacaatgggcagtcactcacccatcaataattaagaaaatatcttacagctgggtcctatggaagcattttctccataggtcccctcctctctgataacgctagcttgtgtcaagtggggttagactagccgcacagtggcaggtaaatattcttttgttgcagatgttggtgcccagatgaaggaactgaggcatagggtaatttacccgaggttatccttgtgtggtgccaaggctatcagtgaacctaggattactgttttaattagaaaatgtaattcaaggaaaacagaacaggagcctctaattagcaaagtttctaaagctcctggaataaagttagaagttctagaaaaagtctgaatatttccgtttgttctgtgaataacagtaaagatggactcagagggtaattacaagagcagtttattaattttgccaacgtaccccagagacagggagactttcgtgaaatgtggctttttaaagcttgtaagattgaaagctagatttaaacgtagctgtaatttccttttttaattctccctgctctttgctgggacaggagacaggcagaaggagatggacgtggaaggataagtagaagcgaagttgctgccaggaggaaagtacttcatgagtgtcttcacatgttttattgaagctacccatggggtgtatgaaaagcaaacaccttggggcttaaagaaagtctggccttgattagtttgacttcacatttcataaaagtagaatgatttcaatcaggaaaaaaaaaagatgtatttttcatttgtttaatacaattctaaatttgaggcatctgcaggctgacttgtagcctcagcgtcccgagagctctggacctgcatgttgactcctgctctcccacacactttcctcgaaaggtcagtttgtaggccaagatggctgttgaggcactcagcccaagtctacactgcaaactgaagaaggggctttgggaggagagaagatctgagcgaattttctgctacgtgagaccagttccttttaaaagcagctaggctgcgagtcccatccaacagtgctacctggtgcagggacgcttgcaagttgagtttgggtgacgtcattaccagcttgaaatcaggatgattgaggaggaaagagatgtagtagaacactggtgagtttgccccacagagggagccttcacttgccttcactgtaggatataatacggttctgaaaccaatagaaagggctaaaggtagtcattagtttctggtcaccagtggtacagattagaactgaataggactgaaaacaatgaggatatatatacttcgggtattcacaaatgcctattaacagaaacctaccagtactgagaataaatgcccagcctctgagctccatgcactacgggacaaaaggcagttgaggctttctcatttttcaggtgggcacagggttacagtgataatctagtgggaattcaggctctttatattatctagggatccaggcattggtggaggaatggtggtatggttgaggtcctctctccgccacaagaaaaaccaggctctctgccaatgactggactgcaaagtaagtacttctgataggatcacacctcgttttaatatggaagtgagactctgtttatacagcccagcccattccagggcaccttttagaaacagaatactatatctgatactccaagaatttgaagccatgttggccattggcacattgttgaagtgtctgtttcctgtgtcccatggatagctgtgtcctcggcagtggtaaaggggaggcagaggataaaggaaattctcaggagaccatatggaatcaaagctggtggtttcaaagacctgtaaagaggttctttatcattctgggcccattaccttgtgaagaacttcagcttccttccaccattctcctcctagtctacggagtatgagacacactgcagaggctttatactaatggctgtttcgaggaaaggaaaagcctttagataaactggatcattcacgattccttaaaatatatagctctcaaaattcctgtggtaaaggtgtggtggttctgtgaagtcagccccttggttatatgaaattctatgaagagaaaaaccatgaaagctgtggtggtagcctgccactcgtccctcacctgcgcaggtgtttgaacacgtgggtccccagctggtggcatccttctggtaggttgtggaaccttttggatatgggacagagctgacagataaagtattttaaggtgtagccatcctcacttcctgtctgagatctgcttcctttatctcatcaagttgctccagcagatattgtctcagctttagaaagtgtaaccaatgtagtagccagggcttcgagcctagaattatgtccgggctgtgattaacacagctttaacttgggctcttaagtgctgactttgtcttggggattcatacctagcctctgactgatgtgtggttcctgggaatgttgtagcaaagctagaaataagacttgtgaacccagtttgtcaacagcaggcatgtttttaactgcccctgctgtttggactcagacctttatttgaattgactagccattcaagtgataacttgtatctaaggagttgaagagacttgtggttagaggtagttgaagattagttcaaaaagaggagagccacaccttcagcccagttcagtgcacactgggactaattcctgtcatcccttgctttgagctgacagtccatgagcagacaggaaagagcagagctggtccttggaaagtagtgtagagtcagttacatcttggccacgatgtgttaaataaggtgaagcactttgtaagtgaaacttcaagtgctaactagccagtttttgctctgcacttttgggtgtgttcctttcttgtgtgccacaggtggatcacagtgcttacagagtggaagcagacatgagaaagcagtgcatgtgccctgggtcccttctaatctcatttaaagactgatacgatattttcaagacttagagtagcatggtctctgtgtttatgttagtgcgcatgttaaagtggagcctctggaattgcagagtggagtgtgtcacacactcagacactcacgtgtaagccagcccagaggagcatggtgatgactcctgtgcttgcttctcttttccttcctgggtgtcaggtggggcaacacccccatgtccctgccgccgcccccactgcctagtattttaagagagattggaaagggacatggaaatggccacatgtaaaatcagcccactgctttgtagagtcatctgagccctctggcaggtttgatagattggctcagtgaaacccattacaggttcctcttctctttagtttagaagcaagagaacaaaaaaatcctcagttcctgagcctctttccagctaagatggtgcatggtttattataatcctgtctaagtgggaatttctgaagatggcctcctctccccacttcccccttcttcctgacaatatgggggaggggggaggcctgagcacagtagccatcttttggccctgaaaagactaaatgccaaaggaggctaacagagaggcaaagacctagttaactgattatatacttagacaagtacagtagccctgggtttctagtattcagacttcatattacatgggaaatcaaatatcttgcttgcttcaagctgttgtttgcctcttcaactcttgactctgctgttactggaattgaacacagtcttaaccagatttgaggcattgtagggacctggtaggtggagtctttggcatcacattttatttcaattagacctgtttctgtcttactgtgttttgaataagagtaaaaattgaactacagttcagatttgatgatgtcattgtgacattgttttagtattgtgtcctgtgttttgttcagtgttcttgatatacaaggaatagaacaatgtatgtatttgttacttatatatcttttctcacagtttgggctttcagcctatcatagtaaggaaagcatggtgggtcctcttaatccatagtggtgagagcatgatttcagaccaaaaaagcaaagtgatgatagagctagggatctgggcgtaaccttcagaacctggctataagcatatatttttcacaactttaataagggttcaacctcctctctagcccaccacgcactagaagtaatggaaaagaaaggttagtaggaaatggggttgtggaactgtttagaaattgttctttgggaatattccaatctttgttctcagcagtgcagtccattcagcaatcactactcacgaatcagcaacagcagttcaatccagaaatctggagactctgctaatcagctggagtccgcaaaagcaacaagaagccgcaggagcctcaggaaaagttccttggcgagtgtctctctgtgaagtcaccacaagctaagctcagcaacacagtgtaaggtgaaccaatacatgaatcttcagtgaagaatagcgaagtgtagggaagcataccagtgcttgagctgccactgtctctgggatcatattcatatcacttctgagcatcacacttcctttcatgtgtctgctatagcaaaacatcctgtcacctatgtctgcttcaggaaaatactctttgacctgtatgtcccagcaaaacatcatttgacataactgactttccaaagaaatcagaaagtcccacttcacctatcccttagtgagctacttctgtcaactcgttcccttcctatcggttcccagcttccctaagtagcaacactaaggaatgaacatggaaagcaggagcctgtggggcgtgtttcatactcagaccctgacagggtgcccttagggcctgtagaagcatgctgttggttcagtgccatgtgttgttcttgagagcacagagaagggcttgaattgttaacttttgggtatgaccatctaacccaaatactgacctaaaatagccaccatgcattcacctttgattctccaacccccttgggctggtctcagctggactgtctcctgccaagtacactgaagtttcatgtgagtaggatgttgtctactagatggcttttattctactctggtttgaactagcatcttggcatggccacatgagtcactagcccaactcaaacaaaagctgaggggccatagattccaattattcctactagaatcccagagacagggaatcaggaaagaaaaaagaatggtgcccatttatacaacttagcagagagttcgggaagaacaggttaggtagagcaacagctgccttaatgggatttgatctcagctaaaaaaaatgacgcaaagaacaaataaatgttcttcaagcatgagaaccagagttcagatcagttcccaacttccatgtgggacatcacaaacactgacggtccaagggattcgatgccctgggcccccccacccacccacacatttttaaaatgaggttttaggtgctggacagatgatttggcagttaagaacctctgatattgttgcagaagacttgaattggttcctcgaacccacatcaagacctcacaaaatgcctataactccagttgtaggttatccaacactctctggtctctgctgacacctgtatttatgtgcacatgcctacacacacatatgcacatacattaagttaaaaatacttttaagtttaaaaaaagctgcttgatttttatatttaaaattcagggtaaggtttagagagatagctcagtggttaagagcactagatgctcttccacaggatctgggttctctcccagtgcccttcctggtgactcacaactgatataacttctgttccagggtttccaactcccattcttagcctctgtgggtaccagacatgaatgtggtacatagacatatacacaggcaaaagacttgtacacataaaataaaaatatttaaaaattagtataatgccttgatttttattatacttgataaaaaatagtcttcaggcatcaactttgtaattttttagcattgccaacttctcattccttaacatttggatattagttctaagcccataagaaaatattgcttttaagaagagagaagttgcatttttaaagtattggtgaactttctttaaactagcagttttttatagaccagtccatgggagtttgcttatgaaaggcttcaaaagaaaaggtccatgagctgactgtggagtcatgatggctagcattccttagagattcataatgcacagtaaaaataaacagattaaagtacttgccnnnnnnnnnnnnnnnnnnnnnnnnnnnnnnnnnnnnnnnnnnnnnnnnnnnnnnnnnnnnnnnnnnnnnnnnnnnnnnnnnnnnnnnnnnnnnnnnnnnnnnnnnnnnnnnnnnnnnnnnnnnnnnnnnnnnnnnnnnnnnnnnnnnnnnnnnnnnnnnnnnnnnnnnnnnnnnnnnnnnnnnnnnnnnnnnnnnnnnnnnnnnnnnnnnnnnnnnnnnnnnnnnnnnnnnnnnnnnnnnnnnnnnnnnnnnnnnnnnnnnnnnnnnnnnattttgaggcaaggtctcaatcaccctgtagcccaggcaggctttgaactcacagtcctcctatctgcagcctctcgagggctgtcattacagcatggagaaccacagtaagcttgctcccccccccccccccgcccccgggctatttagtaacatagccacccacattcccagcactccccaggccttgtcttcaggcttcctgtcaccttatggtgtggcagaggagtgtgagcctccttgacttggtgcctgcttgactagaaaagacttttgtcctttacggtattttgattgggggctgactttgtcttgactaacttagagtgcttttcatgtacttttattttctctccaaaccgtctttctgagtaattgtcatatggtccttgttttatagacatgatgaacttgctggtgttaagtgatttgtcctattcctctaggaactggggtttggggtctgaccttaaggtccttcctaaccaccatgctgcactgctaagaattgttggtggggaacatccgtgcttaaaatgaagcatgtttttaaaattatgtacagtagagccttttcacccagtttgctgcttagtttccagtaattggtccccagtgccttggttgggaaaatgttttaatattgaaaataaaaatgcgtagtgttccaatgatgtcttgtcccctgggacatttgacagaagcatatccctaatataaagacttgcattattgttttggagatagttcaccttggaggaacatgtttttcctgataaagacagacaggactatatctgggttttgatggtgctaaaacatctcaaagataacatccttctaacctgaattgatggagtttactttctcaaaaaaaaaaaaaaaagtgtcttggtggaaaacatttatgcttgtatcactaaatatttttgtatcaaataattttatctagaatgaaattagtgaatcagacatctaatatgtgatttaccagaatttttcttgtggctgatagggcaggaaactccatggactgtatttgtatggagctgtccttggctgtaggctcatggtactcaaaggcctggacttcatttacacaaagcagtggtttccattgaaacaccaccttgcaaggtcatgagcacctttcatttttggttctttctataaaatctgtttaatctttgtttttatttttgttaacatataagaagtgataagtttcactatgatgtttttatgaatgcatataacatatctttactgtgataaataatgctttgagcatccttgccagggggcatgctatccttctctgtatcttccagctttaccataagaaagcttgtagttcttttttgaatcttcctggattctccactacaaaatgaacacttgatgtatcagcagcatttgaggaatatacacatagctcctttagatacaaggaatatagatattatttatttgagtcagatttcaacattgtgaaatgattgggtaaaaatcgtccatgtaggtttgtttgcctcatattttcaggttaatcaaaggacttgggcattagagggcaataatgacattaaaatatgaacaacttgtatagtaagatggtatcaagtataatgtagtaatttctcaggacacagaggccaagagcagatgttctcagaactgttgctgtgcttgggtgagaacagtgtgttgctgctaggcagtgtgagaagctggaattcctagaggagtctggggttcaaccagtcatctgtagacattatcagtaaaaaaagctgacttggaattgtaaaggtggctgctttattaaagatgatttgccatcattcttcaagaatactgatgatctttcactgtttcattggtctagcacccagtagtttacaattttagggaatgttcaggctaacatgttaaaatgtagttttctcactgtggtggtcagaatgagaatggcctctgtaggctcgtatgtttagatgcttggttagtgttggtgtctgggaaggaggcgtgtcattgagggctggtttcgagggtccagcagcccatggcatggcattccagctcatattcatattagcacctgcctcagcctcgtgtgtgtggttaactgtagtgcaagctctccactgctgctccagcaccatgtctgcctgtaagctcatgctcactgccttatggtcataaactctgctaccttctcgatccgtgagtgccgaattgaataactttcttttataagtttccttggacatggtgtattgtcatgagaatagaaaagcaatctaagacacaattaacccagtccctgtgattcaggttacagctcactgtgctccacacgcaactctgaagcagcgagtcctcaggccatttgtctagggactcctgggataataggaaactagttggggttccttcctaaaatcctctacctagagttgagttggctcctgggagaacatctgaaacttgccaccccattcccattttctacaccttacaggatccggtctgcacatacccccagccatggtcagcactttccagcttgtggcagcaggagggagggtccaccaatccaatgcagtctagcatactggctactagtagctgaaggagcaggagccatgatttcctgatgtaggtctatccgtctctcactattagccagcccactttccctcccctttttaccttcattttatattccataatcaccacgtgggcaggctgtttttttcaagagaacagctgccaactctttggagattattcttttaaaagtctttttctaatctgctgtatgttttctactattgaattttttaaaaatgaattgaagcttatcataccactgggttatagggatgcaataatgtcatttaaaactacatgcatcagcagaatatactagtcgtggttgcagactagacttgtcagtgaatgcagaaagagatgtactaaagcctccaggattctcagtggtgaattacaaaaagtgatgaattacaaaagggcacacagtaactttgctgtggaaaatccctgcagacactccttaattcggtgttcaaggccaacaccagtagaaagttcttctgacttttagcaaacaaagaagaatggattggttctgtgggactctttcccatggattcagcgcagtcaggaagaaccatcagaccgtgagttatatacaaaatatctacccactgcccttcagtaatgctaagcttagaggagacaagcaaagccaaaggtactgtcacagcttagaggaaactcagctgtgacaatgactatggggtccaaggttagctctagaacagagaaggagcacacattgggaaatgctagttcagtctagattgagttcagggacaggggataaagtgttgtcatgcaagcatagtttggaccctcagcactcacagaaaaggccaagctgagtgctctgtaatatggtagagtgttggagaatcctcaccatccatctctgcacctctacaggtgcatacctctccatgtgtgcacacacacacacacacacacacacacacacactcacacacactcaaaccccatgctttagttaatatcggctactacaactactagttacaagtgctgtgtcattgtaaacgttgtactcatgctctcagtgagatgtgaggtcctgctgttttctgccctttatctgactcagatttttcagtaaattaagtaaataaacaaacaaaaggaaaaacacatttgtttagtaagtaaatgtagtggcttaatttgtaagactatattaaaattccactcagcctgtaccccttcctcaaacatgtatttatgttctagcaaattataccatttattcttaattagcccctttgtgggtagaaaaaagcaatgcagtttttgtatatgtgtgaaatacaaacaagtctagctacattctctcacctcattttaaggaacagaacagagctgtgagccatgcacctttgtgtccctttttttgtggcatcctgcctttctgttcccttcttaccaccagcacaatattgctcccaactgaagataatcagcaatttatttttcatttttccaaaccacataaattatattttacagcatagcttcaacttttctccatatgttcttagctccttttctctgctgtatacacttctagcaaaacacccagtattcatcctttctcccatggcaaatagattaaggatttgggcttgggtttgaatagatggtggatattcttgataccttttctaaggccaaagtatgtcttctgcactttagaaacagcacctacacgtacactattcccttccaaattggttttccttgttattagattgaaaaattgtcaaggatctaatttccctgagtgaacattattgtgatagtgaggatctagtgttcattgaataagtaaatattttaattaattaaatgctgtctacatatcttaaatatacttaagtgtttatgtagtgttgccttcttggtactttttaatcagtagaaagatttgtgcggtaagggcaactagtcactgatgtagaagtgtagagccaaactcagacctgcggctttacagggagacttctccaggaagcttggcgacaactgctgcagtgtttatctccatagactgtgttcccggcatcgtttcccctaccttccacatcacagggggagggccatccactgatttgttccacagcaaaaatctcatttttgtgcattattctcattagaacactttactatttttgattatttaggatttgtgcccaaagtggaattacacattttactcctccctgtccctgcctgcccccgttattttatacagatttttctcatactccacaaaatactcaccagatttcacaattcttgccacattgatttcttcaacagcttgtttagacataagtagtgctaattattgtccatattttataggttacaaatactgaagaagttggggaaggttaaaagttgaactcaagttcacaggctagacacaaaactagaactctcagctcagtcctgtccagatgttaaagttttagtattcaccataaaggaacatattaatcagaatgttattgtgtcaccagtatcaatgacataatggccatttgacagctagaaacagtgttctgatgctattagtgtgaaactggtagctgcttttgttactccctctttgttaaaaatctcccaggaaaagcttaagacaaacagtgcagaaaaacacaaggaaatgttacaagtgaagcatatggagaggtacggctaacctaaagctacaatatccgggaagacaaatggctttttgatagctttagacctactgatgaattaacacctctccacatatagagtgtggctgatcactcaaattgcactttttaagctgcagaggcagtgcacttaggatactgtcttcatgtcagaaatgcacttttgtgcttgaaaatgataaaaaattacaatcgatccttacaactgttctgttcatctttattgatcaggtgcaagaaagataaatcgtagcccaaataagattatagtaaatgttagcatcataggggactggcggttgatagagagcattcatcatctcaaatggtgacctgtccatggctccagccaccccagtctgctgtctaatcacatacctattgattttatctgcatcttagaaacctggatgtgactgtcattggacaacccggattgttaaatgcaaagaggtcaccagtgtgaggaggctttcattttcattttctaaccaaccaacaatgatttattaaaaaataaactacccaagctgtggctctgaagcccgagtgattggagggcgagggcacacaatagagccttgcattgtgttgcatccttctgcactggccagtgctttgcgggattttcattgagtctgagagctcatgggtcatttgggccgacccctctagtacactgctttcagagcagctagcagctagtcagaatgggacacttttagtcctgctgtctgtcctgggaaaagtattggattgccactgcagcttggcttatgttgttcatgagttcatatcatatatggtgcaacctcttttgctaagattactaagcctgcctttttgttcatgttgattgttacaaatgctgagattttttttttttttttttttttgtcatgtgcaagtgatagaacactttttgttgttgttgttctatcaaagattcccccacccccaaacccaaacagggtctggaacttaccatgtagatcagccttgcctggagctaacccctctctgccgcttgagtgttgagattaaaggcatgtaccaccatgcttggctaagttctgtactaaaaagaaaatattttgcaaagtaaatactgcatttgcatcactgagaatgtgtgtgaattttgttctttgagcttaagaatcttttgatttacagccctagtcaaccaagtaaggtagtgtgctaagccatccttcaaaaacatgttaagaattttctcaggaggtgattctgagaatctcagtatttgtaacaaacaatatgaacaaaaaggcagacttagtaatcttagtaattcttcattatgtgaacatctgtcatgcagttatatatatgtatcaatgacaatactgccatttaaattagtggccttccaagtgtttaagtactgtaccatttaagccacaaattcctatacttctggtgtgcctataacaaggttgcttctgttttttaaaattgtaggtcttcagaacatttgtcttctagcatagttaaaatgtatgtgtaaactttgtccacagagctcagagttctacaaagtcaccaccgaggagtatcagaaagctgctgaagaggtggaagccaagttcaagtgagtttcaccctgccctggccttggatccgacatgaaagcttgattgtgtgactttctgctgaggagtatttggaagtggttttgggtgggcaagggacagccatgttatctgctttacaagaacatttgtgaaagattgttgctgctcaatccattttatgaactaaatgaaaaataaaagaaagggtaattgttttcaattgaagtagtagatagcatagaatgttgttgtaattgctacctctattaactgaaacatgggaatcaatcacttgtagtaaaatgatgggcagatccaaatttggatatcttgcatttaaactatttttatttcttcacaagtaccttgaacacatttaaatcatagactttaccttacccttgattatgaaggtgatgttaaattgctacgtctattcatcctcttgatatctaaatgaatattcagtaattgatggatcaaagtgtccacgacccatagccttctctgttctctttaccgccagttctcatattaggtaagatgatattttactgagtatataaaggactctattatataagcccttttagtagcacatgtacaaattagtgaagaaaaaaaggtgttgtgacagatttagttaagagattgcattgagctctgacctccttccttgcacatgtttataagcgtttaataaaatgattaaaccttaaggtagaattattagtttctgcttcaatgccattgtgtggtaatggatatttgtgttacttaatgttggttaaagtaagattttttttaacgatgaggtgtgtttaaataaatgtaaactttctatcttccttagcacaaaaaaacaacaacaacaacaacaaaaaccaaaaaaacaaaaacaaaaactaggggatagaggagatctcccaaagtgagtcaagttccactaatcagtcagtgccatttatctttgaagacagaaagtcttgtgtggcccaggcagggctcagatctggtattgccaggccttcaattcctttatctcccaccacacaagtgctgtggtcatacgtatatgccacaggtctcattctaggagaccaggaagctttaaagggctaggaacgtaaatggacatgaacaaggcccttggttttgtccctggcactacataaaccaggtcgacctggaatacataagatgctgtcttcaaaacaaaaaaattcagataaaagattggatgttgaaaagtagtactgtacttactgtggttttttatattgtagtagtttatcttttctcctgatggaataacatctcaaaacccttgttttcatactttgaaaacctttgagttatcatcttggatatttcttcattataagataatcactataaaagtaactaaaatttaagttagaaactaatgcagactagagtgatctatgagtcttcataaagagcatggcatttgtctttgactggagaaaggcattgagtaggtgcaagaggaagatgtccagaaggaaaatattcctgctttgttagtgggtgacaactttagtgaagatcaatggctcaagagattagcacaagatagagctgcagaggtcacaggtcaccagctgccaggctgaggttgggtcttcatttagtaaggagtaaatggaagtgggttgagcgcaagagtggcctgacttcagtaccttgtaggaatagacatctgatatgggtgtgaggtttggctggacatgtacgaggcaagagtcaaaagtagtaggtgggcattctcagcagattagtgcaaactgttaagattggatgtgaattaataaaggctaatggattgagctccaggtctgcagagtactggagaatgaagtccccacccaaggttcagggctagagaattttgaggccttaatggcctgcagatggccactttgttctcatgtgccttcactttgtgcgtatcttctaaactttttaaaaaatataaggacagtagtcagactagaccagagcccattcttatttaatcctacattaattatcttaaaaaacaaaacaaacaaacaaaaaacccaaaactggatcatgctttgtagatctgcctgcctctctcccaagtgcatgcctggattaaagatgtgccaccccaaccaccccttgacgtagtaggcatcagggttttagcatttaagttagaaggtaaggatgacacagatgaatccttcgttccttggctagaacaggcaaaagaactgtgattgtgagcttagcagcctagaaaactgataggttgattcttctggaggaaatgtctggtttgggatgcgacagacggctcttgaagttctgcactgagccatcctgccctgagtgctgcacttggctactggaaagtaagagagcccatggaccacatgagtcttttgataacttctataagaaaatgtgggcctggaggataaacataattatgaaaagaaccccaatagcatcattcgctcacattttgatgtattatttgtacaatctaattagcatctggactgactggtaagttaggctttgtctttgccaccaactggtccagatttttatcaggctccttgagtgataacctctaaaacttatgaacctctcttgtggtggaaattgttatttatagtgggctcctcagctcatatgatattagtgtaataggccaaacactgacccatgagacctcaggaagtctgtgcacctgggcgtgctccccttcctagcagtatgtgagaaggtggtcacgtgtcttcagccaggtacctcagtatcagctctgcattcggagctctccagactgtctatgcatcttcttctttggctaattttttattaccctttcccagcaatgaatcataactgactttggcttagttctcttgagacgttttgagtgaatgctccatccctagggcagtttgggagccttcctacactttgttttgtcagcagtgagggaagtctgtggaatgttccctccgactaccattttcccagctccagtgccagcaaatgctcaggcttcattcacactttgaaaaggctttaggattcgtagtttagagagaagctctcactgtgcctgaggtggtgctttctagctactgcctgctaggccgaacatctcggagctgtgactataagaggggcttcctaacctcaaagagtaggaattgctgagaagagtcccatgtctccgtagaagattgaccatcaaaatctcatgaccctccgtctgttccaaagcagtgcactgtattttagtacatagctgctcttacctggcccggtgattctggctgcttcctctctgtatacctgtgtagcacctgtgagcttctctttgaagctggctgaccatcttgaacctgaactcggcaatctcacttgagcagcaaacacagaggctcttcagtcctttagttaattcggtttcctggaagatgatcgagtaggatgtaccctggttggctgcaggagatggatactttttaaattgccgttttaagggcaatcttatcctaagatggggcttgcatgaagtcacccaaagtagaaagaaagtgaaaattatctaagatagcagttgactaataccatgatgtcagctcctcctgccaagacattccagggccagttaaaatactagctcatgctctcagcctgcaggctggagtttggacagtaaagcatttgggcacgttagaataagtggggcttctgttttcctccttcatctacctggctttcagtccttgaaactctggtgtcaccccctcacccccattgtggtctacttgtttgtgaggagggcaagtggtctcactggggtgggacctataccacatcataaaataaaagggaagatcagcttttcaaatgaagaccctttcaaaatcccagagttctgttgtaaagagagctccctccccaatatgctctaaacattgttgccatcattctggtgagaattacagaacttaaagacaatacatactattcaattttttcttcgggtactttttatccccataatagcttaattaagtttttagctatgaaacatcaatccagtggtcagtgagatggctcagcaggtaaaaggctcgtgctgccaagcccaatacctccaagtctcatggtattgagagaacttactcatgcacatttattgtagtgagctgttgttttaacatcatagcttgtgaccacttggtgttagcatcctgttcctcggtatgatggaaacttgtgttctatatcaagcctgttctgtcttatagttagttagaatattacatttatcagggttacatcagattaggagtgtagctcagagggtagagtactttgcctagtgtgcctgaggtcatgggttcaatcctcagtatacaaaaagcaaaaaagatcgtgtgtgtggtgcttaaggcaagtctaacacaaaatacatgttctataagcgttagattttatcattatattagagttataaaactatgtgccaaaggaatacacaaaatctagatggtattggggcactctaacaaaacattaggagaactaacaataagagaaataaggactgaagggagtccaaagtctaactaggattccaagcacacatggacaaaacagtatagctctcagagatgagtctcatcgaaacagtgaatgctgcagggcccattttcagtcaacatcagaaccccctctccccggtaggtcggcgctcacatatcagcacatagaaaacagaatgttcccgtgtttgtacacaaagactgtttacagccaggaccaagcaagtgtaaagcacataccagaaacaaactactgtaaagtcgtgcaatgctgtagaagcactttagaattggctgatacttccttcccaagctgcccttaaaataataaacagtttctaccttccataaaacgggggacgaggtagaaaattatttgggtcttgtgcagtatttttggaagggcgtcattggagactaagcttcctaacttggcctcagtttctttgaatggtgaaacattgtaaggcaatgtgattgtatgagattgcacatgaatacaggtaatactagccagctgtgagtcagagtacaggagaaacttcacttttacccttgaatgaagtcgtcgacctgacttagaaatctaggcatttgagaagagcttgggctagcctcataaagtattaaagatgagctagcctgaaggaataaacgctgaggtgggtttagagcacctgtggaatgctatgcaaaacttgcgcagataaaatggactttgtgagtctcactatctactgaaagtgtttcttccatgtaaaaccctttcactttaaaacgttcttgggctttggggatccacttggcagtactgtttcttctcgggttgtgaggccttgtgggtctgtatcggcagcaagtgcttctcctgtttgctatcataacagtgtagatcagagactgttgtaagcaacagtgcttaaaagatcctgcttaattgcctgtaaaataattaaatacggttttgactggtaaatttataattctggtagatgcctaagtcagtgtgcccaatgcctgcgtgacttcagtttggaaatgttagattaatagggctagttggactgcgggtacagagcttgctctgactaatagtcttacatcttctagaagtttagtcaggtaaatttatgttacttaacttttccacctggacttttaattaaaagggatttcagaacgctcggtggcacttgctgctgtcctaggtgctctgagattgagctctggcagcttacaggactccagctgccttactgagtcactgtcttctcaaaaggactaccattctatgccactgctgagtgctggtgcctgctgctgacaagttccctacacgccgtccttcatgcttaccgatgtctacttaaaacctgtggtagtgctgtgtgaatggacataacctgccaaatgtacatgaaaaatcttttatctatgacttctcattgatcattttgaaatgatcaaatggtttatctcagtcagacactaattcacattgatcaaattcaaaatgacccagttgacttagtttctgctgaacacaaattgtattaaaacaacattatttgagcatgctgcctgttctaatgcaggagtgatgttacagcagttacatcatagctagatttattgtgttataaagatgtctccttcataatgaaaagtttacacaagaagaaagagtgcatattccaggaaaaatggggctccaggcaagaattggggcttttactctctaattaaattctgtatctgtactgggcctcaccacctcccttccacccccactcctttcttctttaatttgcaggactgtgagccggaaatagagcagctgcagtggtgacatttaattccctatggcccttagagccaagtaacatcttgattattcagtaagagagaaactaaagaggcaaaaccctagataaagtaaatatacctgtgccctctgcacctgcccttcttggttacaattgccagtttagaagttcagggttatctgtgaggttggttttttaaacataaactcacctgtattgacctgtagcacttttgtaccctatggaatgtgaggagaattttaattcttttaaagaaaagtgtttatgcttaagaatatactttggagctggagagatggctgagccagtaagtacatagtgctcttacagagtgtctgggtttgctcctgccactcagatcacggtcacaactgtctgcaactcaaggaaacctcatgccacctgcaagaccaccagcactcatgtagtgcatatgaactcatatgtgcagacatatacatgcacataagaaaataatattttctaaaaggatatacttttatgtatggctcagagcagaggctgaacatgaacttggctgtttaacatactcagtctcaacaaatgacttactgtgtctttgacgtctcctagttcccaacagtgaaatgtaaactgtcaccctgttatcttaggccctggagctgagaggtttcaaatgaagaaaactgttctttctttatgggaaaagattatcttaatttgtttctttaagtctaatatggcactggttaccttcaagtgtgttattgatgaagccatcagaaatgtgaagagtagtcccagcccccaagctgtattctggttgcccattttcctgagcaatcaaattagttccaaggaaagagaaatacctttgaagagagacaccaatgtttgagaatatttttttaataatgagcatttagatatgattgtgtttggattttgggggcaggggccacttcagttatttttgctccttggccccaggactggagccctgctagtcaggtttgtctggttagaagtttaaaggtcattacttagtttttcgttccttgagttggaccttcgttgcttaatccacacacactttttttaagatattagaaacaaatggtaagatagttccatctcttgggacttaaatttctgtgtttctactgaactggtggtgtcttaagaaagagacaagaagtggtgttattcattctcatggaaggtgatacaaactgcagccatcttctggatagctgtgtctgtcaggaccactctgaaaatgctcctgtcccttcagcataggtagaaaaagtcacaaatgtgacaaacactggtgatgctgcagccaagatagctgtggcccagagcacttgtcacattgcagtcacttgctggtatctctcgggagtcttcttgcctttattgtatggaatgagcaaagccacacaagcagctaccctaggtctgtgaactcgtatctctttccctgtaaaggaacaggttgttctgttttcccctacagaaacattagcattgaacttccttccgtaatcaatacaatccattaagaatctagcattccttacatgttatatgaaatattaattgtaccctgttagttagataaatggagattctgccaaagtgatagcttgtttctttgaatgtatgttaatgagaacttggtgaatttgaggggttttgtttattggtccttgcttatttgggtaatttaactatataactcatagttttaaatagtattatataaatagtttaaaagtaattcctaagtttttcctcttgatactagctacagttcatttagttcgtaaaggtaccacgtttaaaaaaaaatgatctctgtagtttttcttttgatgctttgaaagatacagaaacataattttgctctctgagtggcactcagagagcattgaggcttgcaggagggccaattatatttagttattgtctgactgacctgccacattataacatgtccaggaacatttctagaagacagattttaaatcctgccagtatatcaagcttgcaaagttaactatcttaagtttttgtgattaaaaaatgaatcagagaagttgtctgcctataaaagtgccaagttttgaggtgtctgatgctgtccaggtagctatattatgaggtttgtctgtgttttattactgcagagtttaataaatatctattagttctaacttgcttttaaacaagtcagctgtagatgtaacagccacctctgctgtgcatgagtgaaaaccatgtacaaaaattgaaaccaaactttgaggatgattatacctaagcatatattcttacccatttgaatatgtaataagcaaacctgcacacctgggtggcatctatctatcttggctcttttgctttttcatagcaagtaagaaaaatataaaaattgataaaaataggtccaagtttaggagttctgcttaagagaatttcctaaaacgaagaaaagttgtttaaacagacacttcaaaggaagatgtaagaaaggccacttagcaaaagaaaagcacttggctgtcattaaatgccagggaaaagcaaattaaacctgtctgaaatggtgaaaatcaactattgcagtattgtgttgtccatggatgtcccgaaaccagacttctcagggctttgctggagggtggggcgggatggaaagaccacttgagaaaactatggcagttggtttcttaccaatttaaactgcacttactctgtaatccatttcctggaggcataaaagcacaaatccacaaagtcttacaagcctgtctatagcactgtggttcattcacagcagtcaaaagctagaacatatgtgtctgcagaagaacggacaaacagaccagaccctgttgatgatctggaagagcagggctgttggtcatgtgatccctgggtgaatctctgaaacaactttttatgctgtgtatggttccatttatacaaagttcaaaagtaaaattagatgggtagaaatctgaaaatgattggtgaggacgggaaacttgattggaaagggacacataagtagaccttctatggggtcctaagatggctcacttaagtccatggagttgttatataggagttacaccctggcttttctaccagtaatcagatttattaggattcaagcctcttacccccttaccttatctcagggatattgttttgttgtgtttctttactctagaaacagagaaacagcttctccgcgtatctgcctcctttctgtctttctccccaccaaccccttataacatttgcctgttatactctgaatctttcaagtacaggaaagtttatcaataatactgtttatacaagaaacaccaaaggctgctgtttcttccatgctctgtattttgatcatattcagcctcaacttcttttagactcacccctacctctccaccctttccaattttaggttttctatttaaatgtcaatagatagatagatagatagatagatagatagatggataatagctttccaagtccagtttgtggtgcccatgggtgtagggacatacactaaagtatggtcatcccttaaggaaatggactttccttttcccagaagccatcaactgtcaatagccattcagttagaggtaggggcttgtgagcttctccacactgaaatattgactgatttgatctaatataggcagctattaagtgcaggagccttgtcaaacccagaagacattgtctagttctgtcctcctggccctctacagtctttctacccttctgcaatagtcttggaggaggaaggggaggtgttgatgtctcctgttttctgcactttgatcaattgtgagtttgtgtgttgccttccatctattgcatgaagaagaggaggagttgactacgatgactattgtggtctaagagcagctttatctatagtcatagaaatgacagatttagagagcaattcgatactatgtccatttggcaaaataatagtagtagtctcacccctgggacctgttaaccccccgttcccccaaaccatgtgttcttagccaaatttacagcaccaagcatttgtttcctcctgtgaaccatgccttaaatcccatcattaagtggtcagttatgcccctaacattcatggcactgttggagctgtgggcatgtcagtgatcatttcctacagttcacagggtacacaggtggataagaaagaaaggaagttgatgactttattccccatagtagcctatatagtcccttctggaacttttgaaaacaagacagcaatgaggaagcttcgtggtctgtaccaacttgatttctcaattatggtctctttagcatcaagtctgatgggcaaacaaaagcagtagctcagtgcattgatttaggggtctctgggacactctgaccagctcaaggggaagtaactcagagctggcactgggtttttatctggcaaactattgtttctggaaagagcattatcctttgtgtagggtatgtgtatgtgtttatgaaccttatagaatagtagatttccatatggcttttcagacatccttagtgttagataacctttcctatcccttccaccctacaattccaaccctctccccacctaagccatcctcccaattgttccctttccctacctcatagtacttaggttctaccattccctctcttagatcttagatcttcctttccaccctcaaccaacagtccctgccttaagtcaggatttcaattgctgtgacaaaacaccatgaccaaaagcaagttggggaggaatgggtttattctgtttaaacctccacttccaaaagtgttcattgaaggaagtcagggcaggaactcaaacaggatagcaacctggagtccaggaactcatgcagaggctgcttactggcttgctcatcctgcttgcttatagaactcaagaatgctatcctagggatggcaccaccctccatgaactgaaccctcctccattgatcattaatggaaaaaaatgccttattgttggatcttatggacacatttccttaactgaggcttattcctctctgatgatgctaacttgtgtcaagttgacacacagaaccagcgagtacattcttgttctagttttctagattcaagaggtactccaaattaaacacataaatctaaaaattcaacaccaagatcgatgtatgagtaagaacatggcaatgcttatctctctgagtcttagttaccctcaatgtaatattttcagttctacccatttaacaacaaatttcaaatttcttcacagttgtttaaaattccattgtgtaaatggatatcactattaatatttattcctcagatgatggatatctggactccttccatattctaactgttgtgagtagtaaagttataaatatggggtgaacttgtgtctgtatagtaggaaatagagtcctttgaatatatatgctcaggagagagatggttgggttgtatgacagatttagttctagtttgctgaggaacctgtttttcacagtggttgtaccagttttctttcctatgaagagtacatgaagcttcactgttctctatatttttactagcatttcttgtcttttgtttttttaatgatttatttattcatatttaatgtgtattggtattttgcctgcatgtacatatgtctatatgaggatgtcagatcccctggaactggagttacagacagttgcaagctgttttgtggttgctgggaatagtacccactaagccatgtctctccagcccccttttgttttcttaatcttagccattctgattggtgtaagaaaatctaaaaatcattttagtttgcatttggtagctaaggatggtgagcacccttttattttaaaatatttcttcattatttatatttcttctaagaactagtttgattttatagcccacttctgatatctgttttgttttgttttttagactattgtgaataggatcatctctcatctctgtcttgtctttggcttctaggagggctactgatgtgagtgtgtggattgtcacctgctacttcctcgaagtgtctgccagctctaagtcatttccttgatggtttggtttctagttctttcaagatactagtcctgtataagatgaaaaactttaagaacttccccctggtctgtaggctcccttcttagtcataggtttccttcacaatgtggaagcaaaattcttgaggtatattgattgttgctttaagtcctgggcagccagagttctgtccagaaagaccttaccagagcttatatcctgaagtgtgtaccctactttgttttctagaagtctgagaattgcagtctgacaataggtgtttgatccacttggaattgatttggcatttggtggggggaggctctttttcatttctctatgtgcatatatccagttttccctttgttaaagattctgtcttttctctgatgtgtatttttggcatctgtcaaaatccatatagctattgtatgcacaaatatctaggtctgcagttctacttgatcgatgtgtctgttttgtaccagtacaatgacagtcctgcaggataacttgatatcaggactagtgctacctccaacagtttttttgttgttgttgttgttcagaattgtttgggctttctgtggtcttttgtacttctgtatggattttcagggttgttttttgttttttggagttgtttttttttgggtttttttttccaatttttgtgatgaattacattgtaattttgatgggaatgactttgaatctttagattactacggaaaataagatggccattttcatatttaccctaccaatccatgtgcttgggatgtctttccctttgctggtgtcttcagtttttttctacagaggtttagttcctgttgtataggccgttcaattctttgatcaggtgtattcaaaggcatgcctgggctggcttgtttctttgggctattgtgagtagaattggcacttttatctctgtcctgtctttggtgtctaggagggctactgatttgggtgtgttgatttttgtcacctgccagtgtctatcaattctagaagtttcttgatggagtctttgggtgtcttgtcaccttcaaatagggacactgacttcttcctcttaaggggaacttgaaaccagtcattgtaaataaaacattcttactgtgagcagcaccaatacattttcatataatgatccaggcagcagttttccttactgaggcctggcagaatgcttgaaaacttgtaaaagctcgcatcttggcccttctctacatgttgacagaaaagcacacatgcttccatgttacagggccgccaagcatccccaccatcctccacttgctcacatggctgccttgagttactttgtgtgtgttctttttcattggcctgcagttagactctcattctgtgtgagtgtgtatcccagcactggtaatcagctgtgtcccctggaaactgatagatgtgctcattaaggcgagattttgctcttggctctgattcacaagtcacctcagctagtgtttctggatgaagctggcaaagaattctgtgtggtgatatatctggctttattctcttttaagcactgaaactccttttttgctgtgttcactgtgctttgtggggatcttacaatcacaaagaagtcagctatttgctaattacagtatttacaccagaaaggctgggggctgctgttgtgttggaattttttcccctcattttgttctcttgtgcttctgtaactacacaaatgcttatttgtgaggcagatcttggcatcatgactctgaagaccaccagcctgctaccagcatagatctcagcaaagctgctgggtgagagaggcactcagcaaggttcatgactgggagtttgaagttagcctacacctgttctctgctttcaggatgaaaaatgaattgccaattactgtcgacatgttcagacacaacacttcatatggcagaagcctgctcagcctgctatctgctgagcccccagctagaaacccatcaggtctgggaagggggtgtgttggcaaggagaagacaaaaagggatcgctttctgatcccatcccgtgtcccttgtttgtgcaggctatgggctagagggcagtgcctctcacctttgtttccccagcagagctcttgagcaagatgaagtggtcaaagtgggtgccagcatgtgggcggtgcagtctccttccactgcaagctgcacgcccagatgctgctgttttctgcagtggcccttgctgattcacattcataacacctccattccagctcatttggtgctgctgtcattcacagctcttctctttgtggggcgggtgtttctacaacacaaaagatgctaaagtgaaggagaatttgagtagtgagtcttcagtctctatccttcagcagtcctggttagttgataaaaagcagaaaccaaatattctgttgctacttaggtgaaggtttgaatttgatggtggggattgccactttgtgttatttttgaagctataagtctgatatactagatttttgccagaagaccaatttcatctgtggtgtatcttgggtgttcttgtctgttagtaaattctgacacctgaccccattggctcgccctcccctagtaaagagctctataatgtagatctcttgtttaaaggtattcataaggcagcttttcttgggggaaagaatcccaccaagagtccctttgaggtgctaatttatttgcactggaaagttaagttccagtttccaactcccagaggtcttagatatttgctcaagaacaattttgattactgtacctcattgcatgccaaatggttttatatattagaatataagaagtggcctaaaagttttaatataagcatgaagctgctagcaaaacactaaaggggacgggctatctgtggaagtggctggcatagactgtttcttttaactttgacatgttctgaagcaaacagggaaaactgctttccataaggaactcaaatgctagaaacagtggagatcaaatggcacaagagggtataaaggaacactggccttagactttgaaggggttaaattcttactttcaaagacagagttgataggatatgtaagtgcaaccaaaatttctacctactggggagtgtttttatctgtcacctattcttggcaccccatgattcactgcataaaaatcatgtagttttgattgcttgttgttgctagaattttctgtcacatgtgttgggcatatatgtattgtatttgttataattccaatcaccaacccgcttaatccaaacctttaccccaatatgccatacatctacagccatagccacaaccacaaaacccaccagaatcagcatttctctctgtcttgcacaggatcatatgactatgttgccactcttaatgctggagctttggtccaattagtttatttaaaagagaacttttctcaactgaacatacagatacaattctattaatataaagtcattgtaatttattacatcattataactattcctatattaatatccaatcataaaatcatatattgtatcatattttctaagttcaaggtcttgtgtgaatgaaagaggatatagtttgattcaaagtgtgggaaataatttaacaaagacttggttcatgagatgctgtctggcaacattggacctttggaaaagaaggggcctgttgaaatggagtatattagcctgtttatgtgcccaactaccatctttctgaatgataccctaagaattcattaaccaaattctacatgccacaaggaaaatatgttgggagcaaattcatagtacatattcagatctgatttttctggacaaccagtcttttatttatgtgtataactttgaatacaaccaaatgtattaaatgagctgacattgtagaataatttgttatttccgtatgaaaaatactagatttttctttaaaaaaaaaaaaaaggaaacttttaaaattgagtacactgtaagagggagcagatggggcaggtggattgcctcctgcagggttagtcagtgttccatagagagcagggcctttgggggtgagaggtattcctacattcaaatgatgaagtttctttttgtttggctctctggtatataatttgtacctaggaaagaagcagttagccctggtgtgcagctaggatcatggggtgggtgttcggccgtttgcagtttgatgctgttccagactattcttatatccatcatgattttaagggcattctggggatttgtatggaagcagactaaccgaaaatacgtctcagtagccttcaagatggtgggtaaacacagttgctgccaagccccagaacctgagctagatccccaggttccacatagtggacgaagagcaaggactcattccttgcaagctgtctctgaccaccactcgagcaccatggcactgtagatgagtatacataagccatgagttcacaccagtagacaactgaaggctacagagacagctcagatgttgatagcatctgttgctcttgcagaactcaggctgttcctagtacccatagtggattataaccattaataactttagtaccaagagatctgacaccctcttctgacctctacaggcaccaggcacacacttgcaggcaaacagaactcacagcccaatctgaaaagacagttcaaactcatcacttgcacagagtgagcagagactaggtccatcctggaaaactggttgacctaatttgagaggggaggggagtgaagaaaagaagataagggtaatgctggtatttataaggtattttctcttctcattaaatttttgattttcttcctggaaccctattccagaagtgaaaagggttagattagtcattactctttttggttataagttagtgaagtttggggttttttggtttttacttttgcttttcattttgttttgttttgtttttttcaacaaggaaaatgtaacttcccttttattttctaagtcaccccttaaaagtgtatagttttatttagatagtaatgcatctacattgatctctttgaatggaagtgttaattggcataagatactattttaattttatctataaatatgagattgtttcaacttgtaattgttataaataaaaactccaatagcatctgggggagccattttagttctgggaatctgccgagactagtctgcgcaggtgagagtgtggactacagaagctaacagcttctgggagaggcagaagccacagagcttctgaggcagaccgagtttcaggctccagacatccgggcaccttccctaccaggggagaggtgtacactctgctccggagggctttgccgcagcacctgggggagccatcttagttagtctgcgcaggtaagagtgtggactacagaagctacacagattctgggacaagccctgtttcaggccttcatcttctgccaggaggcaggtccgaataccagatatctgtccaccttccctgcaagaggagagcttccctgcagagagtgctctaaccactgaaactcaggagagagctagtcttccaggtctgctgataaaggctaacggaatcatacgaggaacaagctttaaccagagacaactataacaattaactccagagattaccagatggcaaaaggcaaacataagaatcttactaacagaagccaagaccactcaccatcataagaacccagcactcccacctcagcaagtcctgggcacccaacagacccaaaaagctagacccggatttaaagcatatctcatgatgatggtagaggacatcaagaaggactttaataactcacttaaagaaatacaggagaacactcctaaacaggtagaagagcttaaagaaacacaggaaaacacaaccaaacaggtagaagtccttaaagaaaaacaggaaaacacatccaaacaggtgatggaaatgaataaaaccatccaagacctaaaaagggaagtagacacaataaagaaaacccagagtgaggcaacgctggagatagaaaccctaggaaagaaatctggaaccatagatgcgagcatcagcaacagaatacaagagttggaagagagaatctcaggtgcagaaggtgccatagagaacatcagcacaataatcaaagaaaatgcaaacagatccttactcaaaacatccaggaaatccaggacacaatgagtagaccaaacctgtgggcaataggagtagatgagaatgaagatttttcaactcaaaggaccggcaaatatcttcaacaaaattatagaagaaaacttcccaaacttaaagaaagagatgcccatgaacatacaagaaacctacagaactccaaatagactggaccagaaaagaaattcctcccaacacataataatcagaacagcaaatgcactaaataaagatagaatattaaaagcagtaacaaaaaaaggtcaagtaacatataaagtcaggcctatcagaattatatcagatttttcaccagagactatgaaagccagaagatcctggagagatgttatacagacactaagagaacacaaatgccagcccaggctactatacccagctaaactttcaattaccatagatggacaaaccaaagtattccacgacaaaaccaaattcacacattctttccacgattggagcccttcaaaggataataacagaaaaaaaaaattacaaggatggaaaccatgccctagaaaaagcaagaaagtaatccctcaaaaaaccaaaaagaaaacagccacaagaacaaaatgccaactaacaacaaaaataatacgaagcaacaattacttttccttaatatctcttaatatcaatggactcaattccccaataaagaaacatagactaactggctacacaaataggacccaacattttgctgcttacaagaaacccatctcagggaaaaaagcagacactacctccgagtgaaaggctggaaaacaattttccaagcaaatggtctgaagaaacaagctggagtagccattctaatatctaataaaatcgacttccaacccaaagttatcaaaaaagacaagaaggggcacttcattctcatcaaaggtaaaatcttccaagaggaactctcatttctgaatatctatgctacaaatgcaagggcagccatattcattaaagagaccttagtaaagcacaaagcacatattgcacctcacacaataatagtgggaggcttcagcacacctctttcatcaatggacagatcatggaaacagaaactaaacagggacacagtgaaactaacagaagttatgaaacaaatggacttaacagatatctacagaacattttatcctaaaacaaaaggatatgccttcttctcagcacctcaccggaccttctccaaaattgaccatataattggtcacaaaacaggcctcaaaagatacaaaaatattgaaattgtcccatgcatcctatcagaccaccatggactaaaggttgatcttcaataacaacataaataatggaaagccaacattcacgtggaaaatgaacaacactcttctcaatgataccttggtcaaggaaggaataaagaaagaaattaaagactttttagagtttgatgaaaatgaagccacaacatacccaaagttatgggacacaatgaaagcatttctaagagaaaactcatagctctgagttcctccaaagagaaactacagagagcacacactagcagcttgacaacacacctaaaagctctagaacaaagggaaccaaattcagccaagaggagtagatggcaggaaaaaatcaaactcaggggcgaaatcaaccaagtggaaacaagaagaactattcaaagaatcaaccaatcaagggagctggttctttgagaaaatcaacaagatagataaacccttagccagactcactagagggcaaagggacagcatcctaattaacaaaatcagacatgaaaagggagacataacaacagatcctgaagaaatccaaaacaccatcaggtccttctacaaaaggctatactcaacaaaactggtaaacctggatgaaatggacaaatttctagacagataccaggtaccaaagttaaatcaggatcatgttaatgatctaaacagtcctatatcccctaaagaaatagaagcagtcattaatagtctcccaactaaaaaaagcccaggaacaaatgggtttagtgcagagttctatcagatcttcaaagaagatctaattccagttcttcacaaactattccgcaaaatagaacaagaaggtactctacccaactcattctatgaagccacaattactctgacacctaaaccacagaaagacccaacaaagatagagaacttcagacaaatatcccttatgtatatagatgcaaaaatcctcaataaaattctcgctaaccgaatccaagaacacttcaaaacaatcatccatcctgaccaaataggtttcattcaaaggatgcagggatggtttaatatacgaaaatccatcaaggtaatccattatataaacaaactcaaagacaaaagccatatgatcatctcagtagatgccaagaaagcaattgacaaaatccaacacccattcatgataaatgtcttggaaagatcaggaattcaaggcccatacctaaatataataaaagcaatctacagcaaaccagtagccaaaatcaaagtaaatggtaagaagctggaagcaatcctactaaaatcagggactagacaaggctgcccactttctctctgcctattcaacattgtacttgaggtccttgccagagcaattcgacaacaaaaggagatcaaggggatacaaattggaaaggaagaagtcacattatcactttttgcaaatgatatgatagtatatataagtgaccctaaaaattccaccagagaactcctaaagcaataaacagcttcagtgaagtagctggatataaaattaactcaaacaagtcaatggcctttctctacacaaaggataaacaggttgagagagaaattagggaaacaacatccttctcaatagtcacaaataatataaactaccttgttttgagtctaactaaggaagtgaaagatctgtatggtaagaacttccagtctctgaagaaagaaattaaagaagatctcagaagatggaaagatctcccatgctcatggaagagcaggatcaatatagtaaaaatggctatcttgccaaaagcaatctaaagattcaatgcaatctccattaaaattccaactcaattcttcaacgaattagaaagggcaatctgcaaattcatctggaataacaaataggatagcaaaaactcttcttaaggataaaagaacctcttgtgggatcaccatgccgcacctaaaactgtactacagagcaattgtgataaaaactgcatggtactggaataggaacagacaagtagaccaatggaacagaattgaagacccagagatgaacccacacacctatggtcacttgatctttgacaagggagctaaaaccatccagtggaaaaaagacagcattttcaacaaatgctgcttgcacaactggtggttatcatgtagaagaatgcaaattgatccattcctatctccttgtactaaggtcaaatctaagtggatcagggaactccacataaaaccagagacgctgaaacttatagaggagaaagtggggaaaagccttgaagatatggactaaggggaaaaattcctgaatagaacagcaatggcttgtgcagtaagatcaagaattgacaaatgggacctcataaaattgcaaagcttctgtaaggcaaaagacaccgtcaataagataaaaaggccaccaacagattgggaaaggatctttatctatcctaaatctgatagggaactaatatccaacatatatataaagaactcaggaagttggactccagaaaatcaaataaccccattaaaaaatggggctcagagctgaacaaagaattctcacctgaggaatgccgaatggctgaaaagcacctgaaaaaatgttcagcatccttaatcatcagggaaatgcaaatcaaaacaaccttgagatttcacctcacaacagtcagaatgggtaagatcaaaaattcaggtgacagcagatgctggcgaggatttggagaaagaggaacactcctccattcttggtgggattgcaagctcgtacaaccactctggaaatcagtctggtggttcctcagaaaattggacatagtactactggaggatcccgcaatacctctcctgggcatatgaagatgttccaaccagtaagaaggacacatgctccactatgttcatagcagccttatttataatagccagaaggtggaaagaacccagatgcccctcaacagaggaatggatacagaaaatgtggtacatttacacaatggagtactactcagctattaaaaagaatgaattcatgaaattcctaggcaaatggatggacctggaggcatcatcctgagtgaggtaacccaatcacaaaagaattcacatgatatgtactcactggtaagtggatattagcccagaaacttagaatacccaagatataagataaaatttgcaaaacacatgaaactcaagaagaatgaggaccaaagtgtggacactttgcactttcttagaattgggaacaaaacacccatggaaggagttacagagacaaagtttggaggtgagacgaaagggtggaccatctagagactgccatacctggggatccatcccataatcagcctccaaatgctgacaccattgcacacactggcaagattttgctgaaaggaacctgatatagctgtctcttgtgaggctattcttcggcctagcaaacacagaagtggatgctcacagtccgctattggatggatcacagggccacaatggaagagctagagaaagtacccaatttgctaaaggggtctgcaaccctataggtggaacaacagtatgaactaaccagtacccctgagctcttgactctagctgcatatgtgtcaaaagatggcctagtctgccatcagtggaaagagaggcctgtttgttttgcaaactttatatgccccagtacaggggaacgccagcgccaagaagtgggagtgggttggtaggtgagtgaaggaggggagcctatggggtacttttgatatagcattggaaatgtaaattaagaaaatacctaattaaaataaaataaaaattaaaaaagaaaatggactaaatatcttaaactgttaaaaaaaaaaactctccacatgtcaacacaaatccaactagtcccgttaaatatagccatatagtattcattagtattgttctgatataattagcattatatcttttataaagccctttttctactagtgggtactcaagttctttgatttccccaccctccctaagaaaaggctgctttgaaacaaaccctcaaaaactggtgtgtactctgtttctgttacttggataggttcttccaactatgtgggttttggctgctttacctctttgtcttcctttactgatgtcagaagtatgtgtaatacctcatggtgatgatataagttcagtgggataatggaataaaaaccccaggtgttagaagtggcctgatctggagacactctctaggaagctagaatggagttgttgaggccaaagttgtctgccattcagatttgatcacagtgttatgtaaatctgtactttcaggacaacaaaacaaataaacaaaaacttgtttttaaagaaaaaccctggtttgtaaagctttgtggccttttgacatgtgtgtggtcatcttgtactacatattggcacatccttttcgggttttgctttgactttgtacttccctagaggtgaattgaaaagattcattgtagaactttttccattaactctggggataactacagagcaaaaaattgtcctttgggcagaaatgtcaatccatgcctctcttctgagcatttggaaactgaagcgcccagaagccgatttaataggaggattgaaaagcaaaatgtatacacatcttcaccctttctaagggaggagaagacaagtgaaaagtatattctcagaacttgatgatgcagagagaataagatggttgctgcagagaggccatgaggcttggagtctttaaaagatgtgagtgctaagctcatgagacagcctgatccattcttagtaatgatacatctttttgtactttgtgccatgaaattctccctttatatgacagtttgtgcaaaaggagcttaagatcggagggtagggtagtgtttaataggctttgccatagcagctgcataaaaaggaaattcgtttgctctaacttctagttctgggtcttcatgactttgtttttcttgtgtattagagcttctctaattttccattctttaaggtcattatagtcttaatgaaataataagtggccactactacggacttgtgccggatgtttgtggctgctctttacattacgcccacaaggtgcttgtcctcgccatgctgcaagatgtagttgtcctcctctgtaccatgatgtccataagagatgtgtgatgcaggaacaaatgaagtccttgtgttcttggtgcatcctaggcagccggttattagcttatcattatcatcatcaatagcatgtttctatcaagtgagttttgtagggttttttacttgatacatatataatgcagtatctgtttccctagggcataatccctaagcaaaataaaaaccacaattgagaatataccatgattctaaaagtgtatgtttaaagacatccttttttccatggttaaatcatttgccaacatatagaacatggctcaaaataattacattttagcatgctaaatgaggacagtctgatttggttagacttgcatctgggatgctcagctcacataaggagtgctgttcctagctcatgacatagtgctcatccaatgcctttgtcacaccttcagaatacatgttttgttggagattatgggaaagtttaggatggtggcctttgacgtttattccagactcatttgcttggcatgtggcaattggttaaacgtccgggttagcccttaaaaaccttcttgccccatgttcggtcacaggaagactaaaagattgatagttggacaggatctctgtaaatgtgagtgtatgtgcctgtgtgcttacagcagcctagaaagatgtctttgctagcttcatcacaggtatagccctgtctctatgaagaaagccttgggaaaaccagcctgcctcccagttcttgcatgcagcagcttttaaccattttttatagcagttcaagaaatcctgctttcaaatgaaatctttataggtacttctaatgcctagagctgataatacggtattttattactatagctatagtttatacacttatttacaaccttattataaaataacaatgaagcttattttcatgaatatagcatgtaataagtggggtgaaggatggcggctctgatcttctttcagcctcagtccccatatttatgcatttggtggtggtggtgtaataatcctgattttgctggtaagtaatgtcaaatgaccccaggttgtcttttaacagcttgtctcacagtcacaagatactcatccatcagtctgatctatatgattaagaccaaaataagtttctgcttcaaagctgaataattgacagtatctaataaatcataatgtagagtttgagacaaacacctcaaacgtatcatattaagggacaatataaaataatctgatagcccctaagcttcatccctccaccttcttcctgtagctcagctcatcctttacagtgttcaccttgccccttgcccatctgcagctgtgccctcactgcctgcactcatagtgtgcacactacagcccttcccattctcctgcccatgagcggcagtcttaatttgtcgggacctgtggtgggggttaatttctttgttttccctgtgaagtcctgtactcctccttccttcctcactgaagtgcctcaactgattgctgtctgtgtaatccatgctgtattacagtctaagctgtgtcatagctgcccatacccccattttctttctcggctgtgagccccagaaagcacatgtggtgcatgagtggttcaagcccatcagcagatgcctgagggtgagagctgggcagttcctcagttaatgccagtggcctgatatattgaattgaactgtgctcagcagccatgttctcagccttcgctctcagggttttcacgctggaagaggccctaacatagcctggaatttacagaagagagaacttacctaaaaagctaagtaagaagtgttcccctcgcagcctccagggcccatttggaggttgtgcatccagttacagcttacaaaccttgttcccaggtgagcagagaccatctaaatggcaggaagttattcctttgtatttctctaccagcagtacagtgtgtgcagtatttgggcagcacatgttgacgtgaactcgttcagcaagtaaggagactgtgaatgtgctgatctctgtgccagcctattggtttgtcatctctctcttggtcttctttgcagggcactaatacagggttgatttttgttagatattagttatttgccagacttcttagccagacttacctgaaaaagctgggcttccctgtggcagtatcaagaggatacttagattaataggataggtagtatttgaaggaatatccagtttatgacaggcctttaactaataaacaactctaaattggaaattcttcagttcaaattttataaagtgagtttttgtcaaggaaagattaatgggactcgaaatttcttgacttttgctgttttgaagcccgtttttgcttctgttgatgtagacaggtttatatttgaaaaccaaagtatatctcattaacattttctagttgaacctgaaaacataaaattttcaagccagtttgtactctaccaagaatgccaattaaagtctgtataacaggttttcttcttgcccacctctctaccttccccacggggtctctgctgtctgctttatgagtctgtcttaaaattaagaggaaagggggaaaaaaaaaagattttctgagcaaagcactagtggcgccaaggagcaactcctgtttacataaggacaagagagccattccttcctgactcagttaagactgtactgaatggcaagtcctttccgccacccaggtcattcccttgaatacattaatgcatcctcactgtagatggagtggcttcactgtaccagggacacagttattaagatggacaatggcaaagacttcatgttaacttttattgtcaggaaagccacagcagctgccacactccggtgtcagcttttgcttagattcatgaaaagtttcccccatgaagaagacatcacacagcagtgctgcaacagagtattgtcacacatgatagccaactctagtgaggtttgtcatcctctccctgctgtgggtggatcaagccctctgggcaacagtacatgatcctcccaaagttcattcattcacttcttgcttaggggtggcaggagtctcctagccttgggagggaagggggtaagctagtcattatttaagtgctggacataattggtttattatttgttccaaggggacagttgtaaagtaattacacatggttttgcgtctaaatccaggcctgctcagtcctctgaagccctcgagtatgtatagcacttccaagtggtggcaggtggcttgtctccttgctcaataaggcttccatcctgaggagcgcaggtactttgcaactgtttctatcttcagtgtactttgttatagtatagtgcattttatatggttagggccttccttctctctgaagttcacgggctcacattttagtcatatcttgatgtgcataacagacactgcatttgcctttacgtgaagggcatcccgggggaaggctctctactgatcacatgaacacagacatatggttatgctggggagtagaaacaacttgggacagcatcttcacacagccatattttgtcatagttgaatctacctccattttgacaatatacaggtttttttgttgatgatgataatagcggtggtagtagtaatggtgattgcttgtttgcttgcttcttttgaggctttctatgtcctttactgaagtaagttcttctagcaagattttactctctcacaccttgtattagcttctttccctgtggagacagtctgtgtgcatattctcccaagcagcagagtgaaagggtgtggacagaagcgtgcatccatcacggctgagacgcagcatggccccggcccaagcagcttctctgtgttctggtgctggagtggctggggatgatgagacaagccctgccgtagcagaagaagcatggcagcagctggagagaggcacatttggcccatgatggcagcaagatggcgcccaggaagccctactctcgggtgtggagagagccaaatgacgaaggttggatgtgcgatggtgtcattaagagttttctggagcaacagagccattaaatccgaagccaaatgagctcgtatgttatgtgtgggggaaatcctctccctgtgcttatgacagtagtctcctgttaggaagctttcctctcgtacagacattaaaggggcaaatgctgaatctcagcttaatgtcagctttcaaaacaggcacagttaagaccagggcttaaacaataatgggaacccactctttcctccaggaaatgaagaaatctgctgctaagcccagacttttctgtgactttgcttcccttctgagactgtggagtgagtcagggggactcttaagaaaccttgtgttttttatatgacaaagtgctttctggaaaagagccaagcctctcgaaaattttgacatgacaagaggtgcagccttaatggtagtagcagaggaaagtgcagccaaagaccagcagcactgaaaggaaggctgcttgcaaaggaaagcaagcacactgtgtttcctgcactgtctcaggttgggcatggtggctcctgacagcactgtggtgaaaaagagtctgatttgaggggctctacctaaaaaaactgtcagggattgactagtgatgtctgtcactggcctaagcatcaaaacagctgacatttgaactgcgcttgctatgacacaccacaagtacgcatgcatatctgtttaccatgtaattattggctcctgaaccaggaacaaaaagaatggagtagataagaaaggaaagagaaagtccaaaagcattgatgtttgttcctagagctataagtataggaaaatgaaaaaccttacacaaggaatatttattttgttacttcttgtgctgatgtggcatattgtcagagaacatattatttcccagtcgtttcctgtgacccgagaccagtgcaactgtagctggtattgaagggctgtaaaaagtaatcagagtaaaaacagctgttgctagagcatcctgtgtggaccgtcaaacctgccattttgttttcagtatgagaatatattaccattctgtggtgctcagaatttgtaaaacagtgaaagatatcaaccctctgtgctattatgatagtttcatgggcagaagccacagtttacaagtagggaaatgacttcagtcaaatgacccatcttctaaatactgcaacaggataggctccatttcttaaatatttttttttcttcaatcaaaatactggtactcatagtgaatataaaaagtggtgaagcttaatgctatttgacagacctcagtattataattgatttaccaccatgtttaaaagctttgatgagagccctcatgctttatttcattatgtatgggagtaatgataattaacttggtaattattcaatttagatagccatactacttattcataccttaaactggaatttcagtccagagcagcacatgacatgttccccttttggggcttttccttccaaattcacactggggttattagccatctctctattgatcctttcaagcagataagcctcaaatgactattttataacctgagccacagccacaaccattatacatctcttaccaagttgtatgggctttctaccagttaacttttgaacagtaatgaatccacaaatatcctggcttattatgttggctccaagttctaattcatccttcatggaagccactcctgcagtttccagaagccctttagcttttatctaggtgttcttagcagcagcccacagtacatagagaatccttctggcccctcttctctgtccctgtctatgaacaggctacagagccataggcatcaattttgtcattatcaagccatgtaaatcttccttccttccatgttgctatgataaaatacctgagcaaagcagcttgtgggatgaagtttattttgcttgcagtctcagagagacagtcttggtgctgggggcagttttggcagcaggcagagaaggcacagtgtcatgaacaggaagctgccctgccggggaggtagcatcctatccccgaggaaagagtaagccaggaagtatagaaacgctgtaagccctcagagcctgttctagtgatccacttcctccaatgaaattccacctcataaggatgctacaatcttccaaaacagaccagctagggaccaagtgttcgaacacatgaacctaagggacacatttcacattaaaccggagcaccgcctagagtgatctcaacaggaagccatcattagtactcttctatttctttgttgtttctcagtgccctttggtggttatagctcctggtcagggctggggaggaatcagccttaccacataaacacagagaaatggcagccaacctttttaattaaaactggcacttctgggcctcctactgaagactgccagcctaactttaccaaataacatttatgaccctgaagatatagaaactcaatgaaagaggctgaaaaccagtttctagcatgtttgaatactggcttaatggcaatagaactttaactgtgtagtgtttattattctcaaaatacccaacttattttaagcagacttctgctagtatgaaagcaaattaaagcagtttaccatcaattctactgagtcccctcactgcctggccaccagcagtgggcggatctgtgccaagtggaattacttcaagtacaattccatttattcatagggaggactgctgctccccatgagaacttagttgaggaaagaaaaagcatataggtttatgctaattagataccccatgctggagattggatttttacaggagcacagcctttcactccttctatccaacacatgtgcaataaccatcttttgacagcactcagacactttaggcaccttcaggttataaaggagtcaccagttctagggttgtattgtaatacaggacttggctgtttgaaagttgatgtctgcttctctttggatttaaggagaactaatagaatcccagaacagagaaatatattcattgaaatattctttgtgtcaatcatcaatggtggaaactgataaagaagctgcactgttgaaagattaagcaactggtccaagctgctgtaataatgaagaggtagagctcagattcggactttttgttttgggatgttgggccctgtgtttttgccatcacagtaaatgactaaaggatgaacaatagtttttctaaaaccaaatcagatttgatcatgctgctgtgttgggaaactgttctcactatcgtttcagcttgtcttcctagtactcttggccactcatccttccagacacacctccccacacatatacactggctgatgcaggtcactgcaatatggagaaagtggctttaaagatgtgccatctactagagcttataattagacatgactggtcacccaggtaacttgacattctgatgactgtaaaaagttctgtctggggttgaggaaacctacaccacagacactgtgttgagtcaaagacaagttattgtgaggctgagatctgtggtctaaatacagcacacagggaggaagggctgctggaccaatgtgtcttgagagcctatggagggagcttgactcctttaggactctgaagggaagcagaatatgagaaagcacagtggagagagctcaggcagaggtgatgtcttctcagacccagtaggctataatcaatcagtcctttagactgaattccaaaatagggagaaagtcttaaggattagcgtgagaactggaagtcagatttgtcattttgaagggtcaatttgattatacttttgttcgtaaaggtgaaggatggggaatagaaaccaggagactgtttaggagactagtgagactccccagggagctgggcatggaggctcagagtagggtaaagactatagagatgaggacaagagggtccattccagatctaattgagactttaacttacaatagtgagagatagattggatgctgataacatgggaggaggatttatcaaatagagctctggttttgtcgtcccaagtgctgcaatgggcaaaaaagctcaagaagaaacaggaggaaattgagagttcagttgtaaatgtgcagtgcctataaaacctttgttgtgggtagtggtaggagtccctgtctgagcaccaactagagatccagactgataacagcattcagtcatgctaggagtggaactacctgctgatagagtacagacaggcaattacagagacaaccaaacagcctgtgagcctgaggacatcaacaggtagagtaagccagaactgggaggaagagcaggcaggtgcatactacagaagcaggaggtaaatttacctggtcatcagttctataatgcctgctaaaaatcatttgatttttggtctctgactttaactggagccattctgttgaatagttgcatggcaacaatccaccatgatgtgggccaaagagaatgggttgaagcagaagcagcctcgggaaggacagaattttttcttagagctgtgccactagccacacatgattgtcaggctccaaagttattaaaattaaataagattttaaatttctttaaggcaaattttagatgccatcagcaacatatggctatgagtgtgtgttggacagcatagattcagaacgttcccatcattatagaatcttctcttggtaacactgctccagaaaatggagtcatgctggtaaaaatggcccagcagaggaagagccagaagacaccacaagaagtgtgctgcctcctaggattcctaggattggaagggcatcaggtgagagttggatccagctacagggatggccattccttatgataggttctctcaagagaagatgggctcaggtgcaaactgtatgatggcaaaggaagagagttgtctttgaattcgatcaattattatgaaataaggctccccatcattagccagcagcaaaatgggaaagccactactaatctctcagagactggcctgaacatgagcagttgtcataatggggtgtgggggatataggccagatatgcagcagcatagtgggcagttgatagtgtcaattcaagactccatggtgattccagttccacttggtttgtgctttttctccagaaacactcagctggaaagctgtatgaagggacattcagggactggggctctgtgtgatggtgtagattaatactgctgaattgaaacccctggggagatgtaaaactaatggagccgagcatggcgaatctaatgcagacatggattgaggaatgcattgcttggtcctgcagtaatacatcattacacacttatgagggaaccactgagattcacctacgaagtagcctcagtgccaagctgatcactgccctcggagcctgtgcactgtattgttctccattcatagttagccttcttcattttgagattcaacagcagcataaaatgttaagccaatttgtttaatcttgcctgccctctcaaaatgcttaaatccatttatgcagcacaaggaaatgagcttatatgatgcactagaatgtaatgccttcttactacaagtcatgaatctgtagttattcagaaccaaaaaaaaaaaaaaaaaagaaaggaaggaagcatattaggctctcttattatgattacgggattattttgtgggtgtttatagaggcacatgtggctcatctgcttctacactcacatctaagtttcactttagtcagccacaaaattctctgaactatattatcctctaatttattttatcttattttttatttgatattttctttatttatatttcaaatgttatcccctttcctaatttcccctccaaaaaccccttatctccccgcctccctctgctcaccaacccacccactcccacattctagccctggcattcctctacactggggcatagaaccttcacaggttctcccattgatgacggactaggccatcttctgctacatatgcagctagagccatgaataccaccatatgttttctttggttggtgatttagtcccagggagttctgaaggtactggttagttcatattgttgttgttcctcctatggggctacaaacccattcagctccttgggtcctttctctaactcctctattggggaccctatgctctgtcaaatggatggctgtgagcatccactttttttttttttttttttttttttggtttggtttggttttctctgtgcagccctggctgtcctggaactcactctgtagaccaggctagcctaaacttagaaatccacctgcctctgcctctcaagtgctgggattaaaggcgtgtgccaccattgcctggcaacgagcatccacttctgtatttgtcgggcactggcagagcctctcaggagtcagctatatcaggctcctgtcagcaaactcttgttggcatccacaatagtttctgggtttggtggttgtatatgggataaataaaatttcctctaatttttatatttaatttatgaagcagtttgggaaatactaccaactacttgacttcagaatgtactgccaaaaatgactagtgttaccatgtatgtttagtgcagttaatgctaggggtgaatattgttaattgccatttttgcattctcagtccctgctggcttccctgaacatccatttctcaagtactgagactgtctcctcacttccagggactcggcggcagtaaaaggttaatatttcaaatgctcagtttcacagatgcaaggccctctgtacagaatcgttctgttactcaagcccttttttaaagcctcagtgtccaaccttttgaaatggatcgagttcctatggaaacttgtcactgctgcagatagtgcccttatccatgagtcaaaactaaaatcaattcatggaatgattctataattttataacatggcttgggaaatggacattagaaatatgggtagattgtgctccttgactgttatagggcttcgtgctggattgtatctgaaaactaccttgcaaatgtcaccatctgtgctttcacagtgaggccagaataggtaaataggggtttagtgggagcctgtgagtgctttgttggtttttgttttaattccctgtaccatgagcaatagcgtgtgtggaggcaagggatctgagagctacactgaagtgaagtaagcttcagggggtggaggaaggagagaaggctgcttgactcccgggcaagcctggtgattgtgggctatgcagtgatgagaatcatggaacggaggcagttgaggccgagagattggagatcactgcatcaatatagtacatgacagcccaatagaatggtgaggtaaactgagggagaaacagaagtaaaaatcatttcagaggaagaactaataacatcaaaagtatcaaagtttaatgcagcataatgtgctggtagaattgttagtaatgagaacaggcagggaggaaaggtagaaaggagggtggcgtagctcgtgatgatcacctgcttctcctagatttagtcttgagctctggtaaaagctctatggataaaatccaaacagtcacttaagcacgtggagctgatgctcagtgtagagatgtctccagtggagggagtcagccgcactgccagctccagctctggcttcagaagggtaagattgctgtgtgtctgaccttagatccaccggagcctgagccctgggagctggtgactgtggcgagcagtaggagaagccccacggaatgaagacttcaccagaaatcgtgaacagagggactcagagatcggagctttgggaattgcttagaattaggagtaggaagggagatgataaagcagagaagaaagactaagtaggaagaattttacaggtggaggaaatctccaggattttctaagttgttaaactaccagtgcttgaccagtgctaattggttgttttctcttacaaagttgctgagatattaattaaatgtgaagggtttgcgtttgtgctgcagctggatgcatatggaggcaggaaaaggtacttttcagtttgtggttttgttttgtcttggtgtaatgtgtcaggtgtcacacctggtgtctcagggttaacttcagtcttctactccgttccgtgaaacccatgcacgaaagccttgggattaggaattgctatgtctaggcatccagagcagggaagcaagctttcttactacagcagcttcctggggcacacaagagtatctctcagtaacagatcactatatcttagatgaattatctcctgataagcactccatgctcatgatggaaattttaattctcatatgcaaaagtaaatctcttgcctgactctggccacctatccatttgccttccttggaaacagcttctatttccaattgcttttctctctctctctttttttttatgtatttcctgcatatatcagcatatagatgttatatgattttaaattgaacttgtgcacatcatgagcatatgcagaataaataatcatggttgaccagcatccataaactcctatttttaaatgtattttgccagttttttcttccatttcccattaactgtcacccaactattaattcttatggaagctgagagtgggacgggatctggacatagtggacatactggacatagtggacattccatagaaggggaaagcaacaactgaatccaattgcgatgtctgtgttctggatgtatttgttttgtatagaaaggtatctaatgggaatcacaagaggaaatctggtcctccccttgctcatggtgagtatgtgtgatggtgtcctctatagctgcacggcgggtacagccgggcccccttccacctgtgctcttcactgctgctttgtactctttctctgtcctagactcatcctctgtcctatagtttactcccagggattcaggcattcccaggtgacacatttcacctttagagcttccctctgcagaatctattgcccatcacttgtctccaacctcgccagccacactgtctacacagacccttccctccacaaaccttctggttatttgttttttgagaaaatgacccaggttgacttcaaattcttgattctcctaactctgtctcccaaatgccaccaagcccagccttgtctttaaaagacctggtaactcaacctcctttcatacatctattctggctaactttgaagcacacacttcactattcattctgcccctgcctggagaacaggtccttcttctgtttcagccttttaatctctgtaaattttcgtgttttttaaacaaagaaatccgttagttatgttcaactgctgatgaccctgtcttctcagactactttcatgtcttcactatctgaccagaatgccccctacctcacctgatgtcccacaaggcctcctgtttaaaaggatgcccaccatcttatctgagactctgccatcaactccagccaggtttaatccctccttttcagatttccccattgcaagatggaccacatgaaaactgctctgcttcagggaggagaggctggtcaccctctctgtctccaagtgcctgcctggtacatgtgaagactctgtgccaacctaggcctcagccttgactgtttcacctcctggctttttgcttaccattttcctgccatctggctcctgcctgttcctggggaccacaccatggctcttttgtccttttcaactgtcttttccatcatggagctccatgccgacctcacgatggtgcactttgccattgtctctttgtgctcagttctccaactgttccatcttccttccctgtcccttcccacacagctgttgcccaaggctcatgtcttctgtctgctcactcccctccagttttactgggaatttctaatttatggttggagtagcattcttcagctcggttctagctgtccatttagatcatgatggttggaagtcatttccacttagactccctgacaatgtttaaataccctcattctccagctccccagagccttggctgaatgtgaatctgccagtctgtactcttctctgcctgcagaccctgtccagttatcttgtccttacttaccagtgcctctattcttgctcagccattcttcttagtagcctgcttcatctttacatatatgcactactccatgggccagctggtagacctccatgaacgtccacatccatcccagtcattcgtgttggaacaactttttcattgtttagaaaatccagtagcttcttttctcctgtagactaaggtctgagctgtgtgttgtcataagactacatattctagaccctttccacccagcactacctcattcatccccgcctgccccttgacaccctgaaagctagaccttggctcacagaggccttggcacagtagcctctacctcttataccccacccttcaattaggggcattgtaaatcgtcctctcttccaaaggctaggggtgaacactctttctctctcagaacagttgtggcacttagcacttgcattgtttccttaacacgtaggctaccttgtattacatgcagcctcaacaatatataagttagaggggtgaacttaatatcctccctgcccactgcatggtgtccacagctatcaagcccatgtggcgttctctctgtttgacagctcggtattcatgggtggtctcctgattctagtgacagtacctaagcatcctcttttgaacagtgcaaacagatggaaagcagacagaaggcttgactctgccctcttcccaactaccgcttcctccgctctacattgtcaacactctgacacttaaagggcagatcagtctgggtaattttttttatccctcacttgtcactaaaataaatacatttgcagttctttcagctaagggagctctacacatccctttcagtgtatatctggtatatgaatcttgcttgtaaaatgtagtgaaatgaagtacatctaagtgatgtcacactctcaccacagacttagttggtcttatcctaattttttaggatatgttgcagtcctcattgagatatctgacaggtttttaatttttttttaacttaagctgttcatgacttgatagtaaaatcttaaatttaagtataatcaaatcttaaatttgattatagtagagaaaaagcagggataccaggacctatttttatgcataggtaactgaaatttcaccacagttatcctccatcccatctttcctcagcagaggcgtttaaaaattcatgactttgcagtgttgtactgggcaggttccattaggcagaagaatttaataagacttgtgaagtagttatggaaagattatctctgggaagttgtgtttgttaatttttctcagatcttcagtccattgcaaggatcctgtgttagagaaactcagcagcagtctgggagaggtggctcggtcagtaaagttttcatcacttaatcaggagggtctgagttcagttccacttgaaaacaacctgagtgccactggcagcttgtacagataaaccttgtgctgaggtgggaggaacagaagaatccctggagctctctggccagctagtcaagctccccattcagtgagagaccatgtctcaactgaagcaaacacctaacagtgactgctggcctccacaggcactcataaatacacagccagtggaaagttaaaaagctactagagtgccagagctacagccctgtgagtcctgttgttccttttccagtgctccctcttctgaactggaggactccctgcaggaagcatggagggatgaagggaacaatgccccttgaaggccttggaattgaaattgtctctggaaacaactagtgcccagtgtgcactagcgtccggatctgtaacttgtgatcgccccttgtctttcctgttgggctgagtgatgtgctcagccagttcttttgtattttcctctaaatggccagtatggtgggcaacttatcttttttctccaggattctcttctaattttagtaattgttctgtgccccaagatccttctaccatcccagtttattcaagttcctcctgtcttttttctgtctccaaatctgggcagcgattaaagattgagttttgtgagaaaagtgagaaaatattctcttctgtggtaacttagtacagcttaatgggaaggttccagcaggctcttctgctaggggaagtgataaatgctgaagagccctaccaattcagaattaccatttctccaagactcagccactgcagtgccctgacatcattcttggtggatatgacacttggcttctgcttatttctgtgtgaactatctggttgactcagaacctctgagttcttattgcatacagctgctcacgtgttagcgcatactcagaacttttttctgagggcaagcaggggtttagaaggcttactgccataaggttatggatgtatttacagcccacggtcaaaatcactatagtctgagttcactgaacagattccacgcagctttgaaaggtagcctaagggattcttaaagccagtacttacttcctgtttgccagtgatggctttctcatctggatactgtttggccatattccaaaccagacttctgtcggtgcctggcaccgtgtttataaccttattgttaggtcacattttaaagccacatgtacacctctgctgtacacttctaggctgtcagcaagcacatatctcatttatcaactgtcactgtggatggcatgtaatgaattcttaatgatcatttctgggttaatcatatttattggcatgactgaatgaatgaaagaattcatgaaccaaccaaatcctcatattttctctccttggaccaagcatgccaaagtagcagcatggggaaatggaaataagttacaaagccatgggctaagatgactttgaacttgtagcagtttcaactctgtatattgtacacatacacatatttaagaaaaatctagggctgatacattctgtacacttaggcaataatgttcccagttatctaattaaagaattgctttacatggtgttaggtaagaggtggtgctgtagaaagggctgccctctcttcctgagcttttcagatggggacccttgggtgtataaggttatttgtctccatcagtgtcctctggagattcaacttgtgtcctggaaatttttttcactgtagatatctaaaagaatcatgtccccagatactgcatctcttagaaccaagggccattcatatgaactccacttacattttttccccatgtacaaggcaagaatcccatttccataggatgctcagtataaactgccactgtgagtccaacactggggctaagtcattctccagtgtttatttactgtactgttacctgctgtttattaaacagtatcaatattcctgtcattgtaagaggaaaagagagaaaatggctatgatggaggtttccctacctagacagtggtattctgtagctgtaaaacaatgagaacttcagaaaccattgtgtcctgggcaagatgtgctctggaaattggtttcttccaagttgagttaaaatattgacatcaatcatgccctatatcccccaactctacctaatagtgccccttactccagatagcctagtgaatttatctctctcccatttagagataacaaactatgttcatagcccagatatggatcaagaaaactgtggtaagggaattgaaaattaacccagttgtttctttaccccacaccagatgcctgacttcacagatcttttcatctgaggagtaacataacttctgtccaaaggattacttacaaaaccaaacagtaggggtcatcattcttcagagctgcaggtggcctcagttttctaagtgcagatctgggggaggagaaggtctttcagttctcactggtgctggatgaatccaggccataggaccccatgtaggttcagtggtgctagtaagagtgatgactagagttgactttccaaaagaacctgggctgcaaaggcccacagagtcactgtgctgcccaccccaggagccggtgtgtggtcacatgctgttgaacttgactcctttgtccttcctgcccctgtcagctctaggtacccctgatagcattgaatgagaaaggagaaatccgctgcagaattggacaggtttgcccgcagctaatgttctcattgcttagtactgagacccttagtgagtacaaagccaactggattgggggaatggaggggtaggaccatattgctccttacagtatctttggggtttttattctggactgtaaatataaaaagggttgacattgctttctttccctccttaccagtcaccatccttttggggattcagattactgaatttgactctcacatttttttttaaatcagcagattagctagatgctggactttcaaaccctaggtttacagaacagaattctatgtaagtcggcttttattcctctgggtccctaggggactggttccagacgcagacacataccagtgtcctcagataacaagtgtctcacgtaaactgacttggtatttgcatgtgatgtgcacattcctcctgagactttcagtcgctttggactggttgcactatccagtcactgatactgtatgagtactgattagccagaaagactcttcagtgcagggttgtcttttgtttctgagacagagtctccatagccctggctgacctcaaactcatggcagtccttccacccccagcctcccaaatgctggaattatgagtaccaacactttgcttagtcagatacatttttacccccaaaatatctctaaatccccagatgtgaaatactgtctctcttctgtgtacatctattctgggttgtttctcttacgacacccaggctgactctgttgggaaaattgtgtgtactcattatgagtggtggtctgcctgtcacattgactctccattgagctaagtcagtagttctcaaatatgggtctcaacccacttggcaaacctttgtctccacaataatttacattatgatttataactgtagcaaaattacagctatgacatagcaacaaaaattagtttatggttggtgaatcaccataacatgaggaattatgtattaaagggtcacagcattaggaaagttgagaaccactgaaattaagtgccaaaccatgtatagttgagatccatgccccttcccttatgctggcagaggctcttggctatttttgtgttgtgatgatagacagcagcctagaagttaaccttgtgctggtgataggtggtggtgaaggcatcttgcattgttagtttttagcacattacatcacagctgtgtgtgaaaacaaatggaaaacaaagcaggcacctgtaagccgcatttggcctctaatatgtaatgatggaaatttgagtacagctcaaatagaggcatcattaataagatgttagcagttcaagccagaaatgcttgaaattaagtttgtttttcagatcttgcgctattaggaaaagatagtttacattttattgtgaaaattaatatcaggacactaacgtgtaaggtaaaggacaatgacagtttagcaaacagtgactgcattttaaatcctttctttgcattgcattttatagttactttattatgagtggtaagcaatagtaacttacatcatttaagtattggcagtggacatggacttagggttgcattttgaaaaaaaatcagccctgctggccactgggctaacatctaaagaacagtttggtataatttaatgatagcttttgggctgtaccgtaagaataagaggtttcgttccacaaccatgttacatgaaatgtctgacctcatgaaagatgcgttgtaggatcctattaagaaaacagttttctctttagcatcaggcatctcattaattcatattttctccctgcatatccccagtagtatttcatcaatgtctgtagcgctctcatagggtacctctggttaacacacaaggaaaggagcctctttgtgtctgcactcacaatgaatgacttttgtgttccccagagctgagagaattctgactgctggctgtcaccacatgacttcttctgaactatctccgtatagttctttctctgaagttaccatattgtatgtgccatttatattagcagaactaaaaagatggataagtaattgcgtggaaatgtaaagtcctgactcacatcaaagaagattgtaaaacatgaaagtgggagaggcatcagggaggccacagatggccgtcaagctggtaaccgagggtcactgtgtgtgaggggcttctcagaactgcttaagcctcagcttcacccagtgtttccccccccctttgaccaattcattcatccttcacaaaagtctcctaaggaaataatctgacttggtagtgatatttcatgtccatcaccaggtggtgggaagccttgggaaaattagaaacagcctgtatctctttctggtctttttttttccaagggatcaattaagggcttgttgtaagtgtaataagtaaacattgtgagtatattgtcctaaatgctttctaatattgccattaagcatcacctaaaaagggaggggaagtcttgctagctcctgaagtcacagaaaaaaaaaaaaagtgttctcttgtggttttgttcttgggtctcatatttgggactctggctctgccctgtgtcccgcccccagccccttggccatgcactaaggttatgctgtgtcccgcccccagccccttggccatgcactaaggttatgctgtgtcccgcccccagccccttggccatgcactaaggttatgctgtgtcccgcctccagccccttggccatgcactaaggttatgctgtgtcccgcctccagccccttggccatgcactaaggttatgctgtgtcccgcccccagccccttggccatgcactaaggttatgctgtgtcccgcccccagccccttggccatgctctaaggttatggatggggctggaggtcacttgaggagcagcttgtgcttgggaaaggaaggactgaagggtaaacaagatggccaggtatagtggctcatgactttaattccagcactcaagagacaagcagttggatgtctgtcagaatggtctgcataagtgagtttcagaacaacctgagagaccctctctcaaagcaaacaaacaaggaaaaaaaattaaaagaagtagaaaaagcgggtgaattcagtgaaaagttcccaatgatttccataagccaaaaaaaaaaaaatgttttgttattgttttttataaatgtctattttcagaggttgactttgttctaacagttccttctggctcaactggttttggataatggtctccattatcactgtcctgtgttttccagctctgtgctcaacttgctctttatcttgtcattcatcctttcattcaatctttcttaaatccagtaaaattcaattgtttaaatgtccttttcaactaagatagcattttctcacctaaatatcttggaattctgccttttcttatttttgcctaatagaggcattttccttcagtaggcatgaaagcagtcataaaagtcaattgctnnnnnnnnnnnnnnnnnnnnttaattcatccttcacaaaagtctcctaaggaaataatctgacttggtagtgatatttcatgtccatcaccaggtggtgggaagccttgggaaaattagaaacagcctgtatctctttctggtctttttttcccagggatcaattaagggcttattgtaaatgtaataagtaaacattgtgagtatattgtcctaaatgctttctaatattgtcattaagcatcacctaaaaagggaggggaagtcttgctagctcctgaagtcacagaaaaaaagaaaaaaagtgttctcttgtggttttgttcttgggtctcatatttgggactgtggctctgccctgtgtcccgcccccagccccttggccatgcactaaggttatgctgtgtcccgcccccagccccttggccatgcactaaggttatgctgtgtcccgcccccagccccttggccatgcactaaggttatgctgtgtcccgcccccagccccttggccatgcactaaggttatgctgtgtcccgcccccagccccttggccatgcactaaggttatgctgtgtcccgcccccagccccttggccatgcactaaggttatgctgtgtcccgcccccagccccattggccatgcactaaggttatgctgtgtcccgcccccagccccttggccatgcactaaggttatgctgtgtcccgcccccagccccttggccatgcactaaggttatgctgtgtcccgcccccagccccattggccatgcagtaaggttatggatggggctggaggttgcttgaggagcagcttgtgctgggaaaggaaggactgaagggtaaacaagatggccaggtatagtggctcatgtctttaattccagcactcaagagacaagcagttggatctctgccagaatggtctgcataagtgagtttcagaacaacctgagagaccctctctcaaagcaaacaaacaaggaaaaaaaaagtaaaggaagtagaaaaagcgggtgaattcagtgaaaagttcccaatgatttccataagccaaaaaaaatgttttgttattgttttttataaatgtctattttcagaggttgactttgttctaacagtttcttctggctcaactggttttggataatggtctccattatcactgtcctgtgttttccagctctgtgctcaacttgctctttatcttgtcattcatcctttcattcaatctttcttaaatccagtaaaattcaattgtttaaatgtccttttcaactaagatttcattttctcacctaaatatcttggaattctgccttttcttatttttgcctaatagaggcattttccttcagtaggcatgaaagcagtcataaaagtcaattactgattctatgattatatgaagggctactcacaatgcatattggagagatgtctttgaagcccttttcctgaatggaaggtgccagggcttgtgctttatggccttctaatgttggatagtaatctcatttagcatcttccagagtgaaaacagtgcattaggccatcgtaacttgccctgcagatcaatacaaaggcagatctgcaccgttcagatgaattccaggagaaatggacctgagtctacagaggagnnnnnnnnnnnnnnnnnnnnnnnnnnnnnnnnnnnnnnnnnnnnnnnnnnnnnnnnnnnnnnnnnnnnnnnnnnnnnnnnnnnnnnnnnnnnnnnnnnnnnnnnnnnnnnnnnnnnnnnnnnnnnnnnnnnnnnnnnnnnnnnnnnnnnnnnnnnnnnnnnnnnnnnnnnnnnnnnnnnnnnnnnnnnnnnnnnnnnnnnnnnnnnnnnnnnnnnnnnnnnnnnnnnnnnnnnnnnnnnnnnnnnnnnnnnnnnnnnnnnnnnnnnnnnnnnnnnnnnnnnnnnnnnnnnnnnnnnnnnnnnnnnnnnnnnnnnnnnnnnnnnnnnnnnnnnnnnnnnnnnnnnnnnnnnnnnnnnnnnnnnnnnnnnnnnnnnnnnnnnnnnnnnnnnnnnnnnnnnnnnnnnnnnnnnnnnnnnnnnnnnnnnnnnnnnnnnnnnnnnnnnnnnnnnnnnnnnnnnnnnnnnnnnnnnnnnnnnnaacattatgaactaaccagtacccctgagctcttgactctagctgcatatgtatcaaaagatggcctagtcggccatcactggaaagagaggcccattggacacgcagactttgtgtgccccggtacaggggaacgccagggccaaagggggggagtgggtgggtaggggagtgggggtgggtgggtaagggggactttttgggtatagcattggaaatgtaaatgagctaaatacctaataaaaaatggaaaaaaaaaaaaattagagtcttgccataaattggacaacactaagataccgagaaccatgaagcattgaccctttcatctccttaagccttaggatttcaaggtcacctcacacccactctcttacttgttttatgacaacctgagatgaaaatagaaatggtttctttcatcaatgtgcagcccagagcattgacacctagggaagtcatgatggtaaatttaacaactagttcaagatgcaccctgctatcaaaacaaaattttaagaataggttaagtgatctttgtttttttgagcaggtgagaagagacatccatcatccatatgtacagaatgaggcagtgagggaaaatgagagcagacatggcgagatgagagaaaggcgcattgaaaggctgctgcaatggtactagagtctgtaggtcacgtcacacatagggcatgagatgatagtgcccaggatcaaaggggctgcttggcctgcgccctgaaaggccacccgtgttggcttcagggacgtggtatttctgcatcgacagcagctgtcattctctgatacaagctgtcctttcactccctgtgaagatagtctaacctcaggaccccagttctgcccccttgttagaaggaagctttttagtatacagtgtcttccttgcctcttgtacagctccaggtggaccagcccccttcacttagccttcagttaggtccagacatgtaacgtactagacatgtaacaggacagcaacccattaggtctcattccatttccgacactgcaagggtttcccctgtgggataatcataggagtccactccactttcacatgactcacaagcttgggctctcacaggtccctggagcgctgttctgaagactaatagattttactgataagaaaacttccggatgttccttacccttgctgtttctgtcttattcacccattggctgacattaatcttcagtggttcttaaacagttccttgtgggttgacatgagacatttagacttactgccagtatattaagttatatattcttcatggaggtaaaaaagatactaaatcgctctaatataacttctcagttataaaagttactgactaggtttaagtacatcatttaaaaacgagtgtcaattgacatacacttgtgcctctcccatatctgcttgacctgctaactttctaaactccccaatattgaatgacctcttcttgacattaaaccctagttcccattcagtcttgctacacctgacttatatgggactttgtaaacagggaaaagaatgggaatccagtgctcacagtcatctataagatggaacacagggtccccaatggaggaactagagaaagtacccaagagctgaaggggtctgcaaccctataggtagaacaaaaatatgaactaaccagtacccccagagctcgtatctctagctgcatatgtagcagaagatggcctagtcagccatcattggaaagagaggccccttggtattgcaaactttatatgccccagtacaggggaatgccagggccaagaagcaggagtgggtgagtaggggagcagggcgggggtgggggagggtatagggaactttcgggatagcgtttgaaattatataaagaaaatatctaataaaaaataaattaattataaaaaaaaagaatgggaatccaagagtaaatgacaccaaaatatcccaccaatagtcgccgtcttctttttcttcttcttcttcttcttcttcttcttcttcttcttcttcttcttcttcttcttcttcttcttctactactactacctcctcttcttcctcttcctcttcttcctcttcttcctcctcttcttcttcctcctcctcctcttcctcttcctcttcctcttcctcttcttcttcctcttctgctgtgtatgtgtatgtgtatgtccaactctttccctatctggccccaaatttaccgatccctaggagatctgcctgcctctgcattccatgtactgggactaaaagggtacagtaccatacctggcactccaattgctagtttttaaagtgaaggagggctgacttacagatcagcattgcctctattccctgtaacattccactgctttaacctttacttggtaagcaagaattgcaagcattttagcttccccccgccccccaggcctgttgctatgcaaagaacttaatgggattctcatggaacattctgttcacctagtggtagggttattgtgcagtgctttcaccagaccattcatggtgattannnnnnnnnnnnnnnnnnnnatgttctttactggcttgcctcccctggcttgctcagcctgctctcttatagaacccaagactaccagcccagggatggtcccacctacaaggggcctttcccccttgatcactaattgagaaaatgccccacagctggatctcatggaggcatttcctcaactgaagctcctttctctgtgataaccccagctgtgtcaagttgacacaaaactagccagtacactaaccattcctccaccagttagtagaggctattatttaagctggagaaagaacctgagtcatacttaggaaaggctttcctcctcctgcatgcttcacttgaccctttatgactgcataatatgacactcataagatgcatattttctctaatttatgtgctttagaaagctaatgatatcccaacaacaaattaacagtctcaacaggtcacacaattactttacagttgggtacatgggatttgaagagacacaagttgttggaaactcagttctttctgctgatgaactccctagagttgacctcgcccatctcaatctagcagttgagttatacagcatgcttttccacagcccagtttgctcctgttataataataccacttagtgtaaatctccagtactgcataaatatctgaagggagggtactattgtctgggtatcttggaaataacagtaacattaagtagaaaaaatgtaatcaagattaaaaacctgtgttttcttgacacgcctcatcccttgcttgcagccacacttgtatagctgagtatctgccagggttctttaaaggtcttgctagaggtaaagctactgatgttagggtagtgtgtgttgtttgtcacagaatcctctgatgagctcttagcaagcctgcagccttcaacagcaaccacctgagcccttgggacttgtagactgactcgtggatttttctaatgtgataataaagacttgtggagttggactgcgtcattgatagaaaggtgattgtgtcaccgtgcgtgtttctggagtggtgtctgacacaaagtgtcttatttccagtgtgctttctgctgtcgatgaagtggcaacactgaaggtcttggagcattggctccggccactctgcctggtgaggtcatgttgaatcacatttagtgctgtggtgtcctgtttatggaataaaagaaaagcgattattgcaacaaggtcacatatgacacatggtactgtagaggggagaatctggcaggcctgggtttggaaccaagccctatcttttaggtctctggccttgagccttggtttctcttattagtgaattgggtcatgatgtgatgattctagtattaagtacgcctttgtttttcccgaattcaggatcatcatttaggaaagctatgaaattaaactggtaattcaaatagacccactcagtttccagcctgctgtggctctccttactcacagctagtctgttcagagtgtctaacacttcacaactctaggttaagttatgtggaagtgaatggaaaccaagtaatgtcaaaaaaattagagtcttggtccgggacccgccgaacttaggaaattagtctgaacaggtgagagggtgcaccagagaacctgacagcttctggaacaggcggaagcacagaggcactgaggcagcaccctttgtgggccggggacagccagccaccatctggaccagaggacaggtgcccacccggctggggaggcgacctaagccacagcagcagcggtcgccatcttggtccgggacccgccgaacttaggaaattagtctgaacaggtgagagggtgcgccagagaacctgacagcttctggaacaggcagaagcacagaggcactgaggcagcaccctgtgtgggccggggacagccggccacctccggaccagaggacaggtgcccgcccggctggggaggcgactaagccacagcagcagcggnnnnnnnnnnnnnnnnnnnnnnnnnnnnnnnnnnnnnnnnnnnnnnnnnnnnnnnnnnnnnnnnnnnnnnnnnnnnnnnnnnnnnnnnnnnnnnnnnnnnnnnnnnnnnnnnnnnnnnnnnnnnnnnnnnnnnnnnnnnnnnnnnnnnnnnnnnnnnnnnnnnnnnnnnnnnnnnnnnnnnnnnnnnnnnnnnnnnnnnnnnnnnnnnnnnnnnnnnnnnnnnnnnnnnnnnnnnnnnnnnnnnnnnnnnnnnnnnnnnnnnnnnnnnnnnnnnnnnnnnnnnnnnnnnnnnnnnnnnnnnnnnnnnnnnnnnnnnnnnnnnnnnnnnnnnnnnnnnnnnnnnnnnnnnnnnnnnnnnnnnnnnnnnnnnnnnnnnnnnnnnnnnnnnnnnnnnnnnnnnnnnnnnnnnnnnnnnnnnnnnnnnnnnnnnnnnnnnnnnnnnnnnnnnnnnnnnnnnnnnnnnnnnnnnnnnnnnnnnnnnnnnnnnnnnnnnnnnnnnnnnnnnnnnnnnnnnnnnnnnnnnnnnnnnnnnnnnnnnnnnnnnnnnnnnnnnnnnnnnnnnnnnnnnnnnnnnnnnnnnnnnnnnnnnnnnnnnnnnnnnnnnnnnnnnnnnnnnnnnnnnnnnnnnnnnnnnnnnnnnnnnnnnnnnnnnnnnnnnnnnnnnnnnnnnnnnnnnnnnnnnnnnnnnnnnnnnnnnnnnnnnnnnnnnnnnnnnnnnnnnnnnnnnnnnnnnnnnnnnnnnnnnnnnnnnnnnnnnnnnnnnnnnnnnnnnnnnnnnnnnnnnnnnnnnnnnnnnnnnnnnnnnnnnnnnnnnnnnnnnnnnnnnnnnnnnnnnnnnnnnnnnnnnnnnnnnnnnnnnnnnnnnnnnnnnnnnnnnnnnnnnnnnnnnnnnnnnnnnnnnnnnnnnnnnnnnnnnnnnnnnnnnnnnnnnnnnnnnnnnnnnnnnnnnnnnnnnnnnnnnnnnnnnnnnnnnnnnnnnnnnnnnnnnnnnnnnnnnnnnnnnnnnnnnnnnnnnnnnnnnnnnnnnnnnnnnnnnnnnnnnnnnnnnnnnnnnnnnnnnnnnnnnnnnnnnnnnnnnnnnnnnnnnnnnnnnnnnnnnnnnnnnnnnnnnnnnnnnnnnnnnnnnnnnnnnnnnnnnnnnnnnnnnnnnnnnnnnnnnnnnnnnnnnnnnnnnnnnnnnnnnnnnnnnnnnnnnnnnnnnnnnnnnnnnnnnnnnnnnnnnnnnnnnnnnnnnnnnnnnnnnnnnnnnnnnnnnnnnnnnnnnnnnnnnnnnnnnnnnnnnnnnnnnnnnnnnnnnnnnnnnnnnnnnnnnnnnnnnnnnnnnnnnnnnnnnnnnnnnnnnnnnnnnnnnnnnnnnnnnnnnnnnnnnnnnnnnnnnnnnnnnnnnnnnnnnnnnnnnnnnnnnnnnnnnnnnnnnnnnnnnnnnnnnnnnnnnnnnnnnnnnnnnnnnnnnnnnnnnnnnnnnnnnnnnnnnnnnnnnnnnnnnnnnnnnnnnnnnnnnnnnnnnnnnnnnnnnnnnnnnnnnnnnnnnnnnnnnnnnnnnnnnnnnnnnnnnnnnnnnnnnnnnnnnnnnnnnnnnnnnnnnnnnnnnnnnnnnnnnnnnnnnnnnnnnnnnnnnnnnnnnnnnnnnnnnnnnnnnnnnnnnnnnnnnnnnnnnnnnnnnnnnnnnnnnnnnnnnnnnnnnnnnnnnnnnnnnnnnnnnnnnnnnnnnnnnnnnnnnnnnnnnnnnnnnnnnnnnnnnnnnnnnnnnnnnnnnnnnnnnnnnnnnnnnnnnnnnnnnnnnnnnnnnnnnnnnnnnnnnnnnnnnnnnnnnnnnnnnnnnnnnnnnnnnnnnnnnnnnnnnnnnnnnnnnnnnnnnnnnnnnnnnnnnnnnnnnnnnnnnnnnnnnnnnnnnnnnnnnnnnnnnnnnnnnnnnnnnnnnnnnnnnnnnnnnnnnnnnnnnnnnnnnnnnnnnnnnnnnnnnnnnnnnnnnnnnnnnnnnnnnnnnnnnnnnnnnnnnnnnnnnnnnnnnnnnnnnnnnnnnnnnnnnnnnnnnnnnnnnnnnnnnnnnnnnnnnnnnnnnnnnnnnnnnnnnnnnnnnnnnnnnnnnnnnnnnnnnnnnnnnnnnnnnnnnnnnnnnnnnnnnnnnnnnnnnnnnnnnnnnnnnnnnnnnnnnnnnnnnnnnnnnnnnnnnnnnnnnnnnnnnnnnnnnnnnnnnnnnnnnnnnnnnnnnnnnnnnnnnnnnnnnnntcttcttcttcctcttctgctgtgtatgtgtatgtgtatgtccaactctttccctatctggccccaaatttaccgatccctaggagatctgcctgcctctgcattccatgtactgggactaaaagggtacagtaccatacctggcactccaattgctagtttttaaagtgaaggagggctgacttacagatcagcattgcctctattccctgtaacattccactgctttaacctttacttggtaagcaagaattgcaagcattttagcttccccccgccccccaggcctgttgctatgcaaagaacttaatgggattctcatggaacattctgttcacctagtggtagggttattgtgcagtgctttcaccagaccattcatggtgattacaactttagttttttcttggtgagctgagggtttgaagctctacctacaaggtctgattctgtgtttgttgtagagagcaagaagtaggtataggctcagaaggcatggcaggtataggctcaggaggcatagcctgtttagtgatagcaccctctttctgagatttttgggatctagtgcctttacctcatgaagtttgctgtcagtcacccttgagtctgctgctctgtagcttcagctgcatatcctgttctcaagttcacattcctaacaggcatggtgatctgatgaccaggagaggctggaaatagttcgcggtttctccagagtcagtaaagtaaaaaacagctaccccaaagccagccacctgccagctcatgaactccattacaaaatgcaagtgccgtagcctgctctgggctcctagtgtactgtaatgcctcacagtctatgaggtatagtccatgggaggtgagggactttgaagatgcaataagagtgcaggatgacaaaaccaggaccgaaacttaagttatagcatggacagtaggctggtagccaagcagcttttccattgagacttgatcttgtgctaaactgtaaagatcagagtgcctgactacagagagaatgccaagtcaagaccttgaccagtgaagctagctagatcccaaaattacacttcccaaaactaatgtccatagtcctctcatttctaaactatgaacaaaatctccggtattggttatttccaaaatagaagactccaagattatcatgtatggaggaatttgtctaggaaaaatttgtcaaggacactgtattttacctcccctgtaatttggatttgtgttcagctaggcttcaaagtgttcccctcgtattgagcctgaaaaggttctggaaacaggaatatctgttgcttggaaatcccggctcttgcacgggaaaaatacttaatgccggagcaggctgctttgtggctgtgtgccgatgagttcccggtgacatgttgaccggactcttggagctggaggacttggaaatcatcaaccccacccctatcttttccttagcacagttccagagtaggaatgaaccatacatagcagagctcatcacctgctctgaatttcaaacccaggagggcacagacatgtgtgaacctcacgggctctgaaatttataaattgtgcatggccaaccttccccttaaggattctgaactggaagattagaagtggggctcaagcaccccaaacttgcaccaaattctgcagggtctgtctggttctcttcatgacaaggcatgccactgtcacaagctacctgtccaggctacctagaagtctaaactcactgtccgtggaatgcatctaaactcactgtccctaggatgcatctaaactgagcttgggagaaggcagaaaccactccagtaaaagtgctttccatcttgtgacctccaaagcagaaggtcatcctgggggagtcaccgcagcactcacagcaggtgccaaagagccctgagcctgtctccgggctaacaccctccacagtgacagtcagatccccagaatctccttggctgagaagcccatctagtataacagaaagcacaatggcaaatcaagggcagcctgtgggaaggcctctggccacaggtttttattgttccctgacttctctattgtttcttagtggctggatggctgcacacaggtggtcttgctcctcctgtggggcggaggctcatcgagtttgaagctgtcagagcaagtttgtgcccccccccccccagccctacccatcctaggggtctgtttctcactctttctgagagaaatactttgctttacggcattttcccttttttaaaaaagttgaatttaatataagaaatattaccatggattttcatttttcttaataggtatttcccagggctccttttctaaaagtttgagctgtagtctcactgttttgtctacttctgtggcaagttgtataaacagttaattgcttgtaagttaatttgagtgtcacacagagacatggatgatatgaaatgagatccagggaaagttgactggtgtctcctacaacagcagaaagcacaaccctgactggagggagcataccaaatccaaaactactcaggccacccagctggcaggcaacagtgcttcggaagctaacctggaggacgttcttcctctctcccccactgtcctctcattgactttccccatcacaggtcagccctagctcgcctaagtgaaaactcagtcctgaggctgtgcctgactggggacctgctgctatgttagtcctcctgcccacacctaattctactgagtctgaaagcttggggagatgctagctagctcttggtggtctctttttaaatcccattctctgggtaatgattgcttagcaataccgggttgcttgtaaatctactgagacagccagtggctgtccactgctagtcagcctctgtaagaaagcggagattcagaaactggagatggctgtggaacaaaaatatttgagaaaagtgcttgaaatcattttaataagtggaaatgacatactgtcgtaggtctccggggcactgttcctgtttgacagagtgagttcatcagtggctggaactgaaagagctatcagaaaagagcagtgttggttcctgaaccattcactccttttggtaatttacgcagctgtttacagaaggcatttctgcagacccaactatgtgaatgaggaatttctttctccacattaagattaagtgttagcatttccttaaatgaaagcagcagggtttttaatatagcttgcaaagcttctccttcattctttagggaatttcctatgttaatttatgcagtgttaatttatgcagtgttgaaattcaacccaacagcatccagatacagaagatgcaaagcgtatgggacagcctgtgaggtgtagtgtagccctgtcagtcctgggctgcctctaaccaaaggccctggctctagctttcaacgggtcttatcacacagctgtgacagagtaagagcacagaatgtttatcagtttattcatctttttaaaatcccaacttgatgtgtatttgttaatgtctctgacagcagtgaagcggttttgtaccacctctgccaccctttggtagcagctgagtgcagtgtgacagcgggtttatagaccatccccgcagctttcttctgttccctcacgtctccagagagtgacacacaaaccactgagccattacactccgtctgagggactaggagtctaatccatgtagcagggtgtggtactgtgagtacagagagcctgtatcctaacggtctgatctccatttgagccagggtccagctagtcattcttcaggaaagtagagcattgttggcattccactgaaaattactcatctataattgcttaggactgaagagaaaagaatggctaaaagaatccatcagccccccccaccccccacagaaccccttaactctggctttcattgtgttccactagctgcagattatgttacaacacagaaaagaggcgtgttgtcacctggctatgtagtgatccatagtgaaccatggatccagaccaagcagatgccacagtacttaaggctcccattggtgaattcagaaatacatgggacctctctctctctctctctctctctctctctctctctctctctctctcacacacacacacacacacacacacacacacaatgcagagtaaaccagagagtatcacttgggttactttcccctggaacaaggagccctaagtgggctcctagtcccttgtacagataataaagatcagcagagtgaggttgtctgtatattgggcatttacagagcacccacctttgtcattggagacttgcacagatcaagacacaaaaagatgagcctagaagaagtgctatggcactgacaatggcggacagtgtctgacttgggaggttagctgttctatttcatccgcaaacccagcactggttgcagtgcacttgaaaggagccttcatgcagtgtgcgttctcctgtcctctccagcaagtggagctttgcttcttcagctttgtcctgcatttatctagacctgtttttttctaacttgctgttaactaaagcatcgtctttccttccccagcctgcttatctcactagcctgtatgcctcttctttagtgcccctgtcaccataccacttataatcacagaccctagagtaatcacatcaccttccactcttcattgggagggccgtttgtccttccactcttgcttcttcatgttcccactgtctttgtccttaaatcatttgacttttgacctttctttccaaacctgtgacttctttctaatggttactgtaagaatgcctcaatcaaaatcagctcacaaactccaaactgagtttatcttctttgtttgcagagtgtcccttcctatactctgtcactataggtcaacccaaacccctctctcctcttttcttctctgggcttcttatgtctgttttcctggtcactcttgcttggtttgcagtccaatctgctgggtcttcctactccacactcccctccatttagttcactgtactaaggacataggttcagtttcatgagtgccattctcctgtttaaaaagcatttgttggatacccatgtgttttcagtggccagtgccaagcttgtgcatctcgtgtccattctggctctgcctcctcttcctccttaaccatgctggtcttttcttgactcttaactgctgctgctgctgcaccatctgccctacccacagccccaatgtctgtctgtattatgactaccctgagatagtgtgcaatgccttccttccttgtttcagctgcagagaaaagcctttcctggccctgaatgcaacatgaacaaaaaccttcccttgcatgcctcgttccatgagaggattttttttttaaccatgtacgtgtgtatcttaattaaccttagcatatatttagcaaataagtaaaaagtagcaaattattaccatgctgtgttagggttttactttgtgaactgataccatgaccaaggcaactctttttttttttttcattaaatattttcttcgtttacaattcaaatgctatcccaaaagtcccttatacccttccccaaccctgctctccaacccatccactcctgcttcctggccctggtattcccctgtaaggacagcatttaattggggctggcttacaggttcagaggttcattccattatcatcaaggtgggagcatggcagcatccagatagtcacggtgcaggaggagctgagagttgtacatctttatctgaaggctgctaggagaagatttgcttctaggcagctaggaggaggatattaaagcccaagccctagtgacacacctactccaacaaggacacacttcgtagtagtgccactccctgggccaggcatatacaaaccatcacacaagcttagtctttcatatcccaagggtatgtgggatagctttcccatagcccttaacaaaatgcagtgaggactcaatagcttagctggcaagaatacagggactatgaggacaagatgaaaatgcagctacaggcctcacctgtacttttataagtggcttcaaaactaaaagggaaatagctacgtttttattcttaaagatatttaagaatggggggaaagtgcctcctcctgccccagctggctatagttcgctctgatggttgttatctgccattctcattcccattacaacacttggacagtttgagaagaggcctgcttgtagtgttgctgggggctgtatagacttgatatctacattctgcccggagtaagctgtaatctctggatgtgggcttgatagttcatagatgagattcttcctccagagcctttgggtttcactgctacactgtgttcctcctactccacactgtttcaacaaaatgtccctgattccagatgccacagcaccctcctgccattttccaggccatggtcttacccaggccgttcctctcagatgctgatgggtgggtcatttggagattcaggcgggcgggataggtatttcttaagagtattttgagatgggaaagcatatgctttgtccttgggttggaagttgatatttgaaaagcactgaaatcatcctaaacgcttcctgccgtttgtttgccttgccttctggtagtgggacttacactttctgtttctcttgcagagcatgctggagaagggaggctaaagttaccctgagaacatgcaagctccttcaacgttaattccagaggtggaacatttttcttttcctagtatgaaaatgacccatttaaagagaagaccactaaagacagacaggcactggaaaatggactcaactgaatcataacgtgttttgatcaacagtttaaaaagccatgttctagatcagcgatcagtcatcaaagaacactgttaagtgttaatgaaaccacaaaatgaataaaagaggaaggcagtccaccccacctttttgtactctctttccagcttccactgatataaaacgttctcgtcactccaggctccatccagcatttagtgacttccactctgacaaagctgggaggagggacattaaactatttcagatggagagacagcaagaaagcactgggctggggcaacagtgtagacttgccaagactgtggagcctgggtgtgctcttctcattatatagaagctaattcattgtaacttatgatgatctttcaaggaagacagaaaggagagaaaatgtacctcttttactggaataatgtttatgattacaggtaaaataaggcatttttgtcaatataaaggcaaccttggcttgttcaaccaagtagtgaatactgacaacttcactcactatcaataataaatctattttctgact

SEQ ID NO: 304 - DNA, 1379 bp, Mus musculus
cggcgccttctccttgcttcttttttggggtcgtggccttgctcctgccctgcaagagaagcgtccagggctttcacgcgcaagtgtgcgcgtgggtcctgacgtgctcgtaggtccacgctccagactctgcggggacagaagcaggagccatgggcgggaccgctagcacccgccgggtcaccttcgaggcggacgagaacgagaacatcaccgtggtgaagggcatccggctttcagaaaatgtgatcgaccggatgaaggagtcctctccatctggctctaagtctcagcgatattccagcgtttatggtgcttcagtttctgatgaagatttgaaaagaagagtagctgaggagctggcattggagcaagccaaaaaggagtcagaacaccagagacgccttaagcaagcaagggacctagaaagagaaagggctgcagccaatgagcagctgaccagagctgtccttcgggaaagaatatccagtgaagaggagcgcatgaaggcgaagcatctggctcggcagctggaagagaaagaccgagtgatgcggaagcaggatgcattctacaaagagcagctggccagactggaggagaggagctcagagttctacaaagtcaccaccgaggagtatcagaaagctgctgaagaggtggaagccaagttcaacagagcatgctggagaagggaggctaaagttaccctgagaacatgcaagctccttcaacgttaattccagaggtggaacatttttcttttcctagtatgaaaatgacccatttaaagagaagaccactaaagacagacaggcactggaaaatggactcaactgaatcataacgtgttttgatcaacagtttaaaaagccatgttctagatcagcgatcagtcatcaaagaacactgttaagtgttaatgaaaccacaaaatgaataaaagaggaaggcagtccaccccacctttttgtactctctttccagcttccactgatataaaacgttctcgtcactccaggctccatccagcatttagtgacttccactctgacaaagctgggaggagggacattaaactatttcagatggagagacagcaagaaagcactgggctggggcaacagtgtagacttgccaagactgtggagcctgggtgtgctcttctcattatatagaagctaattcattgtaacttatgatgatctttcaaggaagacagaaaggagagaaaatgtacctcttttactggaataatgtttatgattacaggtaaaataaggcatttttgtcaatataaaggcaaccttggcttgttcaaccaagtagtgaatactgacaacttcactcactatcaataataaatctattttctgact

SEQ ID NO: 305 - protein, 195 aa, Mus musculus
MGGTASTRRVTFEADENENITVVKGIRLSENVIDRMKESSPSGSKSQRYSSVYGASVSDEDLKRRVAEELALEQAKKESEHQRRLKQARDLERERAAANEQLTRAVLRERISSEEERMKAKHLARQLEEKDRVMRKQDAFYKEQLARLEERSSEFYKVTTEEYQKAAEEVEAKFNRACWRREAKVTLRTCKLLQR

SEQ ID NO: 306 - DNA, 316639 bp, Homo sapiens
  misc_feature (1)...(316639): n = A, C, G or T/U
catgagagagaacatagctggcggcagagtactagacagaatgcctggagatacggactcttgccaggccctgatgtcaccaggctgtgtggccttgggcaactcactcagcctctctgagtcttggttctttcatgtgtgacataaagaggaaggttagatggttgttaaggttgcttccacttgaaagtcctgtgagtttttgtttttgagacaggatctcaccatgttgcccaggctggagtgcagtggtgctcactgcagcctcgacctcccaggcttaagcgagtatcctgcctcaacctcccaaggctgcaccaccacgcccctcccaattttttttttgtagaaggggggctcgttttgttactcaggctggtctcaaactcctgggctccagcagtcctcctgcttcagcctttcaaagtgctggaattacaggcatgagccactgtgcccagctccattagtttttttttttttttcctgagatgacagagtctggctgttgcccaggctggagtgcagtggcacaatcttggctcactaccgcctccacctcccagattcaagcaattctcctgcctcagcctcctgagtagctgggattacaggtgcgtgccaccacacctggctatttctttttttttttttttgaggtggagtcttactctgtcgcccaggctggagtgcagtggtgcaatctcagtgcaagctcagtgcaagctctgcctccccggttcatgccattctcctgcctcggcctcccaagtagctgagactacaggcatctgccaacacacccagctaatttttttgtatttttagtagagatgggttttcaccatgttagccaggatggtctcgatctcctgacctcgtgatccacccatcttggcctcccaaagtgctgggattacaggcaagagccaccgtgcccagctcacgcctggctaatttttgtattttcaatagaggcggagtttcaccatgttggccaggctgtctcaaactcccgacctcaattgatctgcctgctttggcctcccaaagtgctgggattacaggtgtgagccaccgagcccaggcccagctccttgagttctaataaaagaattgcattgtaccaactcttgttccaggccgaaagttggaatccactatgctttggaacatgtgagtaaaccagagtttcactggagttgagaggctcagggtgtgcccatcttgggtgcctccctgagctgctgcaaaagtggaaccaaacaaggcagcacactcgggtgaggaccagctgtgtagaatgtgtacttagggacatttctacactattaccatcaataaacaggcatttctctgcctgtccaacatcacagcagaaatgcccatataaccttgatgcatttcaagcatttgttatttggaagtaaagaggctaacagcctgcatttcagaaatctctcaagctccatgacaggtagacattgttaaaaggttaggagaatgtccctgtgctctcaaataaaaatggcttgaaaattcatcaaggacagaggagccatcaggagagatgacagatggaatgtttgtgcttgtttaaggcatggagatgagaaatgagtctcttctgactcggtctctgtttttcagagatgatcactctaaatccaacacaaaggaaatcaaaagaccttggaactctggcagggcttgagtttcgaagatgcaggagctgggctgagttttcttcttactccgtgcacacttgtccccactcactgccacccctccttctatgcccttagactcagtatttcagccactgtatgttgatgaatgtaagatgaggagaaaagaaataaggtgtcagagagaaaaaaaagtaaaaatgagaaaagcaaagcagaagaatgtccaggaaaggacagagagtggacttttagaaacctgctgttaatttggtgaggctttactctagaataaactttatgccagaggtaacaaaaaaaatcttcctggggaactgccaagttatgacctgtgtgtaagatttactttagctatcgagcattaagtgatgtctgttaaactgaacggtcaccagagcccatcctaagacacggcatggcatagcatatacaatttaccatgaacaaggacttagtagcaaagtgtattcatcctttcttacactgttaataaagacataccgaagagtgggtaatttataaaggaaagaggtttaattgactcacagttcagcatggctggggaggcctcaggaaacttacaatcatggtggaaggggaagtaaacacatccttcttggatggcagcagcaagaagaattgccgagctaaaggggaaaaagcaccttataagaccatcagacctcctgagaactcactcactatcatgagaatagtatgggggaaactgaccccatgattcaattatctccacctggtcccacccttgacacgtggggattattacaattcaagatgagatttggatggggacacagccaaaccttatcacaaaggtactattagttgaaagccaaagatagatggagtggtttctgaaacatggggggatctctgccttatgatttcactagacacacgggcagtacagtgaatcagttctacctgatcaatgcactaaatcacttgatcattatggctactaaagggagactatgtgattaatgccatagctgtgggtattttcaaagtcgcatagttatactgtacttgtaaatgccttctaattattgatgacttgttttatgccattttgagtttttaatcttttcaagcgtgctgctcaaaattcttgtttcaagatatgtcacataagcacatgtgcatgcatccgcatgcatgctctctctcacacacacacacacacacacacaatactgttttaggacttcatttttttatatgattctacaaacaataattggtggaaaaagttttaaagctgatgcgctattatggcttgtcaaatatgtcttagtccatattttcagattgtctctgtattgattgcactacacatgaggcactttttggtgattttaattggtttgctataactatggcaactatatgtcctagattttgcaggataatcctgatttcaaggactgatttcattgtctctttaagttcacaaataatagagcaattgcttcaatttttagctcagaaaacaccatcattagatctatattctatttcagcacaggtcatagaatccaagtgctctactgtgcagctagcatgctactcagaattgctggggagggagggggctgtgatgaacagcacaatgattagcttttctagctggggaccaagagtgggtctctctcctccctctccctcattatcccatgtcacgttctttctatttttacctttgcttctcatccatatctttctacattcccaccaagtagagcagggacagtcaagtggtgtgtgaaggagtagcagaagtgaggtcgccaggattaggccttttcctactttttgtttaaaggtgcgattgaaaaattggcgtacatagagcaaaccttctgtaattttgtctgtttgagtcatttgaaagtttatttttattcatttatttattctgagacagggtctcactctgtcacccaggctggagtgcagtgggacgatcatggctcactgcagcctagacctcctgggctcaagtgatccttggacttcagcttgctcagtaggtgagatgacaggtgcacatcaccactgagtaaattttgtattttttgtagagatggggtcttgccagtttgcccaggctggtctggaagttgcccaggctggtcgtgaactcctgggctcaagtgatcctcccatttcagcctcccaaagtgttgggattacaggtgtgagcagctgcacctggctgatttggaagtttaggtatatatatatttttctttttaggggaaggagatcattagggatgactgaatttttactttctccctctctccctcttttccttctttctcttttttccagcattcattgcaaagatttgacgtggtggaaaagggaaaaagaacaaaggagttggaaggtaatattgcttagtggtcaagctaagatttgtgaaaaaccaaattactgctcagttctcagctctgtatcaaagtaaactgctgacattcaatacctagagtgcttgtttcctgggtggagactgaagaaatatgttgcattattgttattgatatttgggaagtctcatataatgaggaagatcctctggtaacgctgtatgtgccccagaacctaggaagcattgcacgactgggcctccagaagcccagcagcctgggcagagccggccattataaagacttcagttggaaggcctttctgaatcctaggcatccctagaagcttctggagtcctgggtcttcacatcagtgctctgtatttgtgagactaaactattttttttttttttttgagacagagtctaactctgttgcccaggctggagtgcagtggtgcaatttcagctcactgcaatctctgcctcccaggttcaagcgattctcatgcctcagcctcccgagtagctgtgattacaggtgcctgccaccagacctggctaatttttgtatttttagtagagacagcgttttaccatgtttgccaggctggtcttgaactcctgatctcaggttatctgtccacctcagcctcccaaagtgctgggattacacgtgtgagccaccgtgcctggccaagactaaactaatttttaagggcttgctttatgctagtctcccttttaactggcttgtatttcactattacaaagctgctcacagtttttttttcttctttttttctttttccttttttttccaaaaaaaatatttggactttaaaaaatgataatttctatcatgtttaactaactatacattcttttttaaaaagtctttctcaagctatcttaataactatacattctttaacagctttacttatttatttagagacagggtcttgctctgttgcccaggctggagagcaggggcgcatttatagctcacggtggcctccaagtcctgggttcaagtgatcttcccacgtcagcttccagaataaataggactatatgtgcataccactatgcctagctaatacttttaacggtgttattaatatgtaatttacatgtcataaagttcatccatttgaagtgtacatttcaataaatttcagcatacttatagcattgtgcaaccatcacaatctaattttaggcatttttatcactcctccaaaagaaactatgtaccaattagaagttaagaaactatgtaacaattagaagttactctacatctcacctcctcctaccctctccaagcctaatcttcttttgttttccatggacttgcctattctgaacatttcaaccgccttttgtgtctggcttctttcacttggcataatgtctttgaggttcatccatattgtagtatatatcagtactttcttcctttttattccccattaatattccattttctggatatattacattttgtttttccattcatcaattaatgaacatttgaattgtttttcatactattataagtggaattgctctcctcatttcatttttggcttgttaattgccagtgtatagaaatacagtttttgtgtgtgtgtgtgtgatggagtctcactctccctccggggctggagtgcagtgacgcgatctccgctcactgcaacctccgcccgccatgttcaagcgattttcctgcctcagccttctgagtagctgggattacaggtgcccaccaccacgcctggctaattcttgtatttttagtagaggcggggtttcactatgttggccaggctggtctcaaactcctgacctcaggtgatctgcccgacttggcctcccaaagtgctgagattacaggtgtgagccacagcgcccggctacaattgatttttatatgttgatcttgtatcctgcaaacttgctgagtttttttattagttctaattagttttgcagtggattctgtaagatttttctatttgtaagatcatgttatcttcgaatagaggtagttttacttcttcctttccagtctggatgccttttatttttcttgcagtttcttattccacctatctttagtttgccatgattcttcatggtacagactcagtgttataacttctcttcttgctatctttttgtatgctctgaattttcaagtttaaatttgagaaagtgaatacagagatacagaaaacggagaaaaacatggagaatctgagtagctgaagtattagctattatttttcttagggcaaagctttgcattctagctcataggtgtctggctagtaaatgctgcctttggattagatgactattaataagctgtagccagaaagaaagggaggccacaagttctgggtagctcaagaagggattgtataggcatgactggcctagaaattgacatggatagaacagtattgttagagaaggcattttgttttaaagaatacattgaattttttttaaactcagaaggcatctttgtaatgttggttaaaatgcattaggatgtctaaaacatttttggattgtctgtttgattagaccacttatatgtgtttgaatcataaaacatgaaggcactccactaccttctcatgcttggcattcatcatctttaatatatttggttgaaagaactctacttaatattctaactggagatatatatatatatatttaagacaactagtggtttcttcatctctctattctctccaaggaacgctttctttgtacttggttattttcgtaagtgcttgttgagcatgtgtgttatatagaacctccgatatgccctatatattggggtaataagtgagagtgtgtttgtggaggggagggtccccaaaaaatgaaagtcataattccttggagctttagttcccagtagaagaaagagttaggctgggcatggtggctcatgcctgtaatcccagcactttgggaggctaaggcagaaaggttgcttgagctcaggagtttgagaccagcctgggcagcatagtgagaccacagctaggtgtggtggcacacacctgtagtcacagctactggggaggctgaactgggagggattgcttgaacctgggaggttggggctgcagtgagtcgtgattgggccactgcattctagcctaggcaacaaagcaagaccctctctctctcaaaaaaaaaaaaaaaaaaaaagaaggaaacttgagaacaagtacaaagtagcacgtagtctcataactgcaaagtaacatagtacaattttaaaagaatataatgatgagatgtaatcaacactctgctactgaccagggatatagagattaaaaagacatagtttctgctctaaagattcatacagtaaggttgggagcggtggctcacgcctataatcccagcactttgggaggctgaggtgggaggatcatgaggtcaggagatggagaccatcctggccaacatggtgaaaccccatctctactaaaaatacaaaaaaattagctgggtgtggtgacacgcacctgtagtcccagctactccggaggctgaggcaggagaattgcttgaacctgggaggcggaggttgcagtgagccaagattgcgccactgaactccagcctggcgacagagcgagactctgtctcagaaaaataaaagatacatacagtaatagatcagcacataattggattcatacagtaatagatcagcacataattgaagctcaaaaatgcgactgcattgtagatgcctttggcataagagaatgccatggtgtgttgtggcctgctgcttttaatgttgagagggattaattgaagaatagtaccatcattaacctaatttctattgagaatcatctgcctctgtaaaactaaggtcatatggctaaacttatgtgtaacagtgtgtttagcaaaaaagaaatatgtagatgaataacctaataactatgtactggtctcgtagaggtgaaatgttgaactattaataggaactttccacaatagatcatctcaacttttctgatgtagttttaattcctccactaatttatgccatctttggcaatcacttaacttttctctgcctaaccctattatggcctaacttatgtaactgaactagtagtagaaggagacacaaaagtggaaagtaaattctctacatacttggtgcaaataatttattctatgaagaaatgtattttctcatagacaggtttgaaaaccatagtacttaaaattttactttacaaaaagaaaaaaatacagatactagttcatgagacaagagacatggaccaaacacacgtttacgttttttatttttttattttatggctactactaaaatgccaccattcatgtactgcataacagtgtttcagtcaaagaagaacctcatttctggcagtggaatcataagattataatggagctggaaaattcctgtctcctagtatttactatactatgctttttatctttaggttaaagtgcattctttctacctatataaaaaagttaactgtaaaacagcctcaggcaggtccttcaggaggtgttacagaaggtgctgttatcataggagatagctccatacgtgttattgcctctgaagacctttcagtgggacaagatgtgaaggtggaagacagtgatattgatgatcctgaccccgtgtaggtctaggctaatgtgtgtgtgtttgtcttaatttttaacaaaaatgtttaaaaagtaaaaagtaaataatttcaaaaatagaaaaagcttatagactaagtatataaagaaagaaatatttttgtacagctatatagtgtgtttgtgttttaagctaagtgttattaaagagtcaaaaagtcacaaaaaaagaagtttataagtttaaaaagttacagtaagctaaggtcaatttattcttgaagaatgaaaatatatgaaaataaatttagtgttgcctaagtgcacagtgttgataaaaggtacagtactgcatagttgcgtcccaggccttcacattcaactccccactcactcactgactcactcagggcaacttccagtcctgtaagctccattcatggtaagtgccctatagaagcataccattttttatctttgattttttttttaatggaatgcttcagaaattcatgtgtcaaccttgctcaggggctgtgctaatctctgtattgttcaaattgtcctagatgtgttgccaaagcaatcacttttacactgtttttgctgtagcttttctatgtttacatatatttgtacacacaaataccactgtgttacaattgcctacagtatttagtacagtgacatgctgtacatctttgcagcctgggagcaataggttacaccaagtagcccaggtgtgtagtaggctacaccatctgggtttgtgtaagtacactctatgatgtttgcacaaccacagatatcacagggtcacctaacgaggcatttctcagaagtagtcttcattaagctaccctacgactgtaatgaaacgctaagttttgagccaggaatttgtgtatagaacactaggaatggcttcattagtatcatgcatctttttcattaaactgtgagtccctttgagagaaagattgtgtctctgaacttagtggcctaaatttctagaattatgtcttcaaaaagttgcccagttaggcgtctctggggagtcaaaaccacaactcccagaatgccgtgctcccttagcgcgctcaggcgcggggagagaatgtcccatcacccaccgcgccagatcgagaccacagttcccactacacccagggactccgcggaaagctatcaaacaccacctgttgccatagcatccgggtcgggtgaaccaatccgggcgccctcgccgaacagaggcgggcagttcgcatcgccgaccaacctgaggcgtttttgttgtggcgcgtgaccggaggaggcgggagctcaggaccggcgccttctccttgcttctgggggtcgtggccttgctcccgctgtgcgggaaaagaatccaggcccttccacgcgcgtgtgggtgcgggggccccgaagtgctcgtggttccccgctaggtctccgctggggcaggaaccggaatcatgggtgggaccaccagcacccgccgggtcaccttcgaggcggacgagaatgagaacatcaccgtggtgaagggcatccgggtgagtgcccgtggacgggcggagggccagtggttggactcggaccccaaggccccatcttctccggacccgctcagcctgggtttctcccgtcctggaccctagcgtattaaggccagaagcccaggtgtctgggaagaagcctagagtttcaagacgtgggacattcattcagagatagttcctggttgtgccaagtgctaggcactgctggggcgggcggggaatgccaggttgaattataccctgcaagggctcacagtctactcgtaactgtactgctcccttgttgcaggaccgtatttgaaacccatacctcggtgtacttgtctgtgaaatggttttcctgggttcaggacccaaaccctgcttttccactgtgcacaccctgtctcccagggtgaattggcattttaaggattgcctttgctttgtgtcatttagtgctctccctctgataacaccccctcctcccacccactccccacaccctgtcatcctccctcccagccccacagtcttttctgacctgcctggggcggcttctggcttctccctgcttcactttcacttgatatctcctctttcccaggcgcctcctctgtgacctgctgcgccgaagttttggattaggcccagttgcttcaggactagtgtctgccagtctgataggggctgagatgggtttgcagtttttcataccagtagaagtaatgtagtcatttctgaccaacgttgtagagcactttttttttaatgccctttgcatgcacctgatacataaactgaaaacctggtttttctctagggtgtcagtataccagcactaacttcattaacacactctccgctgcgcctgaatttggagcctcacatttttggacgtatgatgcctgaacctagtaaataaagcaattttgacttcagaaagttttataataatttatatatttttttctgttatcaaccagcgtaaataaattacatttgtaaattatttttaacagttgttaccaggaaataaaacttcttaaatatttaaaatgtttaaaaactttttcttctgaaactgttaccttgagaataatttattaaacttttcttcatagaaactcagactgtcgaactcagtttttggtctgtgaccagtatttctttatatcatgctaattaatggtagtactacattttgtaataaaatatctgaggctgtattctttgagttattgtgtttcagttagtactctttggagtaaaaaattactgtaaactttaagttttatgcagagattttaagactcttgccattaggctttcagtacgcaactcagagtgaaaaataattaaaagacaaagcaaaataagttttgagtgagaagacattggttagaaaaaaatgtataaatccatattctcgtgctttagtacagacacagtgctaacagcaaacaaaatcgaaagagaatgtggccacagcacagagattcatatcaagtattagataaggttggatggaataactgtgacagcagggataggtattctattaaaatggaaaaattgtctaaaaaacctttttaagatttttgttttttaaaaagaaatgtcctttggtcatataacttgacagcattcctcatttttttcctttcttatatagtacattttacctgtattgctaacagttcaagcatgatcatttttacctctatgcttttcttcagaatatacccttcacctggaatgcccttgcgctggtctccattgcttcaaatcctccttttacatgaatgttttgcaatctctctgagcttcagttttcccatctgcaaaataatgcaactgagtacatccctcagatctctaatattttccagtcctgaaatcctgtgagtctggtggcactgtaagtttcttgtagccatacttagcccattgcagtttcctctagaagtgacatccattgaagtattgagtacacagaggtcattctgatttctttgagctcatgatcaaaagagtatcaacttgaaattaaacagacctcagtttaaatctcaggttagatatttattacttaacctgattgcctgtgtgatttttgtctgggtcttttgtagatgtttttcagttgatcttagtatttttcttggcttgaattaagcagacatcagtttaaatcgcaggttagttatttattagcctgtggcctttgacaattgacttcttttatttccttatccataaacggtaataccatcacttcccttgattggttattgtaagaagatgaggtaaggtatgtaaagcacctggcacattgtagattttcattaaaaaggcagccattattatgatagggttcctttcacatgcaaagttttaagattctttgaaagtgctgtgctgtgtagtggaaagagcatgtgccttggaaccaagcagacctgggttggattctatctctgcctctcactagcggtgtcgctctggacaagtcacttttcattgtgtttccgtatttagtatttctggacaaagcctactttgagaatttgacataatgtatatctagcacagtgtcttgtactttgacagtgtttgcacttgtgaataatagctgttattagagctgttcaaaagaatggatatgtgaacttaagtgaacttcaaattttaataaaaataagagcatgttgtgccccaacaggtgtacctaaaagggtatggactgggaaatgggagtcttacattctgccctaattgagggtgtttttttgtctaggtctgttgtagatggtttttatttctttatatttttcttggctttaaatagtcactttgttcccttctgagacatggggaaggataagaaaccgcattctcagtatgtccataagccattgtttttagcttagtttgttagaacatggtgccgatgaggcaccaaacttcagttttgaactgcagttaggttagttcagcttggctgaagaaaacgttccaactttgaccagttgtctagcatttatgtcattggttgtaagaaatgaaagtttaccaagcttactaattcaacagaggcagtcactgctggaaagctaattctgtgttctgttacactgttaaagatagtacagacggtctcctgttaggatggttcgacttaggattttttgacagtggtgtggaagtgacaagcgttcagtaaactcagcttctggcattaccttcagcaaaatccgttgtaaaccaaggagcatctataatttcatcttcctttatttttttcatataatgacttgggttcattcccttaatataaatatgttggcaattatgaggtttttttgagttggagtctccctgtgttgcccaagctggtctcaactcctgggctcaagctatcctcctgccccagcctctgggactacgggcatgtgccgctccaccaggctcagtcatcatttatcttaatgtataaagaataacatttagtgaacaacataaggcttttggtaactatgctgaatatttatttatttatttgagacgagtcttgctctgtcacccaggctggagggcagtggcatgatctcagcttgctgcaacctctgcctcccaggttcaagtgattctcctgcttcagcctcctgagtagccaggattataggcctgtgccaccatgccctgctaacttttttgtatgtttagtagaggggggtttcaccatgttggccaggctggtctcaaactcctgacctcaagtgatctacccacctcagcctcccaaagtgctgggattacaggtgtgagcctccacacctggctgaatttattaatagattgtgtttctctatattgttgaggtccttaatagcaatgaaaggacctacttcaaattttaagtttaaaatttcttctcacctaccaggtgttatttttcatggtatttgtagggtcttgttttttccctttatccttagcaactgatagcttttcttccctcttctgtaaaagtaacctatatttttacacctgattccaactttgaatctgaaactactcttatggattggatgagaggtcactcttttgccttgccctcttctcaaggctaaaataaattcctagagaggaaagaccaagcattttcattactcatattacatgtggttgataggatttttgtgagcacctgctgtgcctgcttggaaagtgtgcttacaactctatctttcgcaagtttatctgaaacatcaaagctgtgagtgaactcttctggagcaaatgtcaacttcaatgagtatcattttcaaagatatatttatcatgctttccagacataaacgaatgtccgcagctgggctttaaagttgcaagctgaaattcacaggagccagttatggcagtatggatacttaatatggaacgtaactcatgctttgggaagtgttggcagttgagagaccgtaaatgaagagattacttaatatgcggtattactgaggattctgaagagagtatgttatcagagactacaaattcggtcagcccttgggagtgttgaggaatgttgtgcaaatttagttaagtagtggatgattagtttctttcagctttagattctatgaagtttttggctaccatcttaagttatctaggattttataaaggtagggataatggtttctactaatgacaaatgtaaagaaacacagacataagctaagcattacatatttcatatatatctatcaacatatatatgggttccctctccccctttctcttaactaactatttgggagtaatttctcccaaataataatggcagtttttggagcctatgtcttaaaaaggtaattgtgaagcaaactaatactcacacagaaaatgacctatgctaagtggaaggaggatcaagagagaaaaaatgggtctgagttcttgaatcaatttgctaggacacatctggaagaagataagataaactaatggaggcaggaggctgatttatttgtctcatgtggctcataactttacctcttagaagggccactgaagaattcctctttttttactctgttacctgggagtagaaatactttctctttgtccaactcacccagtctcctgtttctgagaaaattctttcttttggattggtgggtagtgtttctggcacggattttggataagaccaaacaaggtgggtaggaagagatgagtgggaagactgtaggagatgacacatggcctttccccctctgtggagcacattggtgtggtgagtaccacaaatttaaacttggcaagctctgtttgcttaaatttgtctttaggagcaatagagaatagggtggacagtcaagttcagtgggctgaatatcggcagacctgcttcttttgattgccccttatattagaatggtggctcttttagttcatagagcactgtggatctgtaagctgtggattctggccagaaccatgcaataagcagacagttttgcatacagttgagtaattgacccacggactactcagtctgtggacctcagggtgtaattcccagtatcaatgtgtgtggggattatttcactattctttgctacaaataatttctgtaaattgcccttggtatttgccttgatgcagattccagagatgtctggaaagcaagtataataggtataggtcattgtacaggaaaaggctttgcttaaacaagtgcccggttcaggaaaagatatgtttcctgaagaagatactttttttttttttttttttttttttgagatagaatctcattctcttgcccatgctggagtgcagtggtgcgatctcggctcattgcaacctccaccttctgggttcaagcgattttcctacttcagcttcccaagtagctgggactacaggcacccaccaccatacctggctaattttttatatttttagtagagatggggtttcaccgtgttagccaggatggccttgatcttctgacctcatgatctgcctgccttggcctcccaaagtgctgggattataggcgtgagccaccacacctgaccgcaagatacttcttacacagaggctgccatcgcagaagcttgtgttgtactatcgacccccattttgggtcattttttatcagaaagatgagttgttctgcagctacagattgcgtgtataatcctggccagcatctctaaagcttgtcagctgcttcacgagtgagtacccctgttcacagaggagatcaggtgagtgtgcaggtctgaacttactactgcaatgggaaggtcagctcagagagcattaactttggatacagatgataacacaacaaaactattacctcatatctacgtcgctatgagcagactgggaatagggtaatagtgcttggagttggcagaggtgcaacagtagatggccatgggtgctgctttggaagggcctaaggatacagttgttgaatgattttaagaacaagagaaaggtggagtctcaataaggcagccgtacaatatgtttatcaagccttcaataggtttagtatatactcctttggcgcatgcttacaagtttactgaactataaccaaacatcccactgggaaatgttttgaattgatgtgagaatttgacattaagtagcaacttgggacatcagagaggcctcaaaaagaaaaaaaagttaacaagaaattagtgattaggttgaaagagacattctactcctactacctagagagcatagatagagaaaaataagcaccttctatacccataccaggacttaggcagctgctgcttgcaatagctgtaggcctggtcctcatgcaccttacagagaacgagtcagtacaagctcagacccagttgataaaaatgaaccaaaatgaattaaaaaagtccctgtggttggagctatatgggtaatagctttaccaaatatttgtgtagccaattgtagtttatggtgcaaaacactaaaatccctccacagaatctctggggtaaacattattttcatttttttcagatgaaaatagtaacttttcagatgaaagcttatagctaacacttgatttttgagatttatatatattatatatcagttaaaatagctttaagattctaaaaatgtaagcttattttttcctctttaagaggaagtgatatttttattacatgcatgggattgaaggggtgtgttattaaaagtagagcattggactagagattggggaattactgcttctggtcttgatgctgccagtaactgaatattactcagggtctcttttttttctcaagtataaattgagtcagtcttacggggatttttctaggatgtgtctcagtttctcagtttctcagatgggtttcagcaacattcccagtggctgtcagttgttagaaggatgcagctggctctggcattttcaaatagaaagtcttcttgtcttccaagaagggagtcgtagttttttccttcaaagagcacacacagcatttgatctgtagcctttcccttttccatcttatttccattctggtttgggccctgagatacaagtaacagttgaggtatagactatttagttcactgatgtatcacagggccttgattagtgcctggcctgggagacatttgttgaatgaatgacttaatatataggagcttgcaatctagtggaaaggcagaaaggtgaatgtggaaaggctaattcctgttctttcattgagactgtattggaagtttgagaaaggaacagcaggcacaaggaatggtagctttaggtaggcagggttggaatggagtggacaactgttttggtcagtgaaggcttggatgtttagactgcgtcttgaaaggtgactccctcccaatggtacaggagagagggcaatgtaggcgtgtgtaaaggcaaggagatgggcgtagaacaggatatgtaatattaaggaagaaaactgtagaatttgaggttggagagttaggccatcaccaaatgatgaagtcttgaatgctgtacaaagaatttgaatttttctgtaaacagacagtagctattgaagaatttgaagtagggagttaccattatcacatttgcattttaagcggatggtacaggaattagggcaggagaaatgggatgagagaagagaggaattcattaaatatttagggattgatgaagtcagagctaagaatgagagagaaagaagagttaagaacaagccctatgtttgaatttaggaagctgggtgttggtggtgtcattaatgaggtaaggaaggcaggagaaagaggagatatgcggcaaacgtgagatcaattttggacactttgggtgtgaggtgcttctggtttgccagaaggaaggtgttcattaggcaattcagtgtggagaccgggcttctgagagataggtcttaagctcgagtgaatgcatttattaatggaatttattagtttatcaacaacagttagaaatcaagagattggatgagagtgccagtacaagggcacatagaatgagaagggcccttcagcattgaagtgcaggcaggagaggggaagctgcaaaagagataaaatgtggccagagtcctaggagaaccaggacagcaggatgtcagaaaagccaagggagggctttccagaagacgggagtggccagaggtgttagatgctaaagggaagccatataaataaggcattttataaatataaaatatttatttacataaatatcaaaagttatttatttggtcattggtgacttctaccagagaatgttcactgttgcactgagggtaaaagccagagagtggtgagttcaggaagtggaaatgggaaggagacccttgatacaggaggaggatcactcagttacttgaaatggaaatcctggggtcttccttgatgacttctgctttactcccacatctactcagatactgggtagtgatgctgagggatgtttgagtgggatcttttttttttttttttgagacggagtctcactctgttgcccaggctgtggcgcgatctcactgcaagctctgcctcccgggttcacgccattctcctgcctcagcctcctgagtagctgggactacaggcgcccgccaccacgcccagctaattttttgtatttttagtagagatggggtttcaccatgttagccaggatggtctcgatctcctgacctcgtgatccgcccacctcggcctcctaaagtgcagggattacagatgcgagccaccatgcctggccttgagtgggatcttgagactcagactttttgggtttgaatccttcctctgctactgataaagtatctgatccagggccagttatttaatccggctatgcttcagttttttcacctataaaatagagatacaaaagtatctatctcataggcctgtgaaggagtaaataagtgaagtgcctagcttagtgtagcgcctggcacataataagcactcagtgaatgttagtattttaaatcctaaataccttttaagtgtgttctcccctggattaccataatagctttttttttttaaagtttattaaagtaaattgttgtagagtaatttacatgccatgaaattcatccattttaagtttacattccaacactttttttttttttttctagatagggtcttgctctgttgcccaagctggagcacagtggcatgatcatggctcattgcagccttgacctcctgggctcaagtgatcctccctcctcagcctcccgagtagcaattcaacacttgatgaatttactgagttgtgcaaacatcactacaatgcaattttagaatatttttatcaccccaataagatctcttgtgcctgtttacagttaatccctattcccaccccagctctaggcaactacttaatctactctatagggatgctttttctgggtgtttcatataaatagaatcattcaatatgtggcccttgtgtttgcttctttcacttagcttaatgatttttaggtctatctgtacggtagcacatgtcataacttcactgctctttattgctgagttgtatagtgttgtatggatatgtaagattttgtttatccattcaccgtagatagacatgtgtttgtttccacccttgctcttatgaataatgctgctatgaacattcctgtgcaagtctttgtgtggacatatgcttaatagcttcttaattggtcctttagcctccttcagggatcctgcttctgttcttgtccccctccaatctgttctctacattgtagccagagtgattttcctaaagtgtaaatctgatcgtgccattcccctgcttaaaatccttcagtagtgctcaggtaccctcagggtcaagttcaaactgtttcaattgaagagttcactaagaatcttcaaaatttggaatctctaccttccctccccaccttctctttcactatgccctctctctattttcttgcttcagccatttattcatgttgtttcattcattcatttaacattcattcattgaattaactaggcttagtgaggctctgggagtatagcgataggacagccaaatccttgctttcagggagctttctttctagtgaaaggcagatggtaaacaagcaagtctcaggtagtggttaagtgctgtaaagaaaataaaaaaggatgacgcgatagtaactgtgggaatgatgactctcaaatccgcaaggctgtgtgttcctcagagcctctgctctattgccagctgcctacttgatatctccacttggatgtctaacggtggcaaattctggttttcatctgtactttaatgtgatttttctcacccaggagcactttcatcctactgcatctcttcctatcttttactcctccttaccttgtaaatcttccctaatcctctgttccagccctgccttcaaagcctggctacatgtgctgcccattgtgttttctgtatacttgcattacatgctgactcactcaggtagcactcttcatgttgtatttaaatgcctgatggttgtttattctgttatgctttaagcacttgataattttgaatactcagagtctagcctagtttctggcacatagttgatccatcatgaaatctgttgaaagagcgattgtatgtggttagctttgaacaggagggagggagggaggggagagggaaggaacactttccttcgggactagagggagggaaggagctaaggcccattaatgcatgaataagtgtgtaggattaggggaggaaagttgaagtttatatagcatacatttccccagagattacaattttgtgcatagtataaaatgaagagtgtagttatttataatgaacaattagcagtgcattagaaaaaataaaggagtagtgctgtggggtgcatctcgaaatcttaaaattattcttccttctggttttatggctgttagatttaacctaatttctttagggcattcgtcatatgtatggatatggatgactaaattacttggatgttattgcactggtttttgatcttgctgttttataattgattttattttgatgttgcttttccagctttcggaaaatgtgattgatcgaatgaaggaatcctctccatctggttcgaagtctcagcggtattctggtgcttatggtgcctcaggtattgctgaattttaattttagggtttttaggagataaattataagtggaaaaagttgactcaatagtcaagttctctagcattctgtctttcgttatttagatgtttagcttttaataaggaatattagaaatcagtattggggtttcttttaaaatgttttgtactaagaatgaaactattttcaaacagtctttgaaaattttgttttctcttcccactcttgaatcctctactaggctttggaaagttacttcatatctttttgtgtaaaatggattgcttatagggatattagagatttaggaataaatatttatttaaaaaatcgaacttagaaaatattgatttgctattttcaaattgtgaagtattccaaatgattttattttctaataaatttcttctaagtttataaaaggtttagtttgtcacagtcagtcttagttattgatggaaatgtggtggtaaataaaatccataaagaattattaagcctaattttatctgtaggtcctgctggataagagacttaatgctgtttcttctcccttttctctctcctgccacactcatctgtttatccagtattttactaagcaccagctatgtgtccagcactgttcttgatactgcccagttgatggatagatacgctatttattgtgaaatggcaacaagaaaataattgggatgattaattttggactaagtgagattttcctgtacttattagaaagggggaaatctggctatagactgtgaaattgagaaagacgagatcctgcccaaatgccattcacttgggccaattgtgaccccccccgccccgccccttactaatcattaagtcagtaaacatgaattgagcttctgatacgtttagaggaaagggtaccaagatgaataagaatgacttcttgcccctttgaagcttcttgtttagtaggagagttgaggattcacagttaattaacgctagatagaaagtgagcatgccttccttgttagaaacccttgttttggcttctggaccacactcttggttttcctttcaccctacttgcaaccctcagtccagggttctttgttgatttctactaagtaatcttgtcccaatatacggttttgaaatcgttatctagatgcctgtgactcccaaaattatatctctagccctgacctttccctgaaattccagacattataatagacaactgcctacttaaaatctccccttacagattcctcaacttgacatatcccaaatcaacctttattttcacccccagacttgcttttcttctctgtctttcccactaaatggcacaggtagtcaggtccccaattggggattcatccttgttttcttttttccttacaccttacatcagactgttagctagtcttgtcaactccatctctaaaacatgtctaaatatgttccttttgcatctgtctcctctgctatatctccaatccagatagataactgtcgtcttctgtggaagtctcttaactggctccctgcttcactctttccccctgtgctgtgcacacagaagtcctcacaatcttttgaagaaaagcaaatcaggtcaagtcatgtcccagtggtggctctccatggtacacagaatatagtctgagctgcttccctgggcttccatcatatatcatgactggtccctctctgccttccaacatcatcacattattcatcatctcctatcacctttcctctacttattcactgtgactgctatcttcactagaagagaagctccagggaccttattcctcatttgtttgttcacagctgaattcttagctcctaggatagtgtaacctgcttcttagtaagtgcttattatcgtttgttgaattaatttaagggcattatccattttaaaagtagctacttttgttcattctggagagttctatacatttaattcaggtgacatatattgaatgtttctattatgtaaataaataagccacgtttttatttttttttttcttttgagatggagtctcgctgtctcccaggctggagtgcagtggcgtgatcttggctcactgcaagctccgcctcctgggttcatgccattctcctgcctcagtctcctgagtagctgggactacaggctcccaccaccacgcccggctaattttttatatttttagtagagacggggtttcaccgtgttagccaggatggtctaaatctcctgacctcgtgatccgcccgcctcgacctcccaaagtgctgggattacaggcgtgagccaccgtgcccggccaagccaggtattttgaaaagatgcaaaaataggaaaaagttttttttgacagataaactacatatataacaagactgtaagggaggtagaaacatagtataaaagaaacctaggagatactgaaaataagtttatcaaatattttggcttaagaagatgccttgtcgtgcagaaacaaatggctgtccagtttattaaaatgcccaacaactgcacttccagtcactcgggtcttgcatataaataccactgcatacagtgagcacatctagctgatgataaatatacctttgcttcctcctcttcctcaaaatggtgaatctgttcttatctacatgtatgaacttaaaatacggaaaatgttaagggagcaaatggtttgtaactttgtaagtacttatgacgtgtatctttttgcttatgaatattctgtgctataaccattgtttctgtagtttaattaaaacattttcttggtgttaaaaaaagaatgatgatatatggatacatttaaaattggaatttgttctaaagtatgatttgttgtaggtagattttttttcctacctcctgtgttacggagttagcgtgatgatcatgatgattcaatatactgaagtaatgatagatgacacttaaaatttattacattgtaggtactctgctaaatcctgtgtacgtcttatctcatttcatccttataaccctatgaagaaggacctgtgataacccattttatgtagaaagaaactgagacttgaagtgattaattattttgcccaaagtcacacagctggtgagcaatggagatgagagttacattcaagtttgtctgactccagagcaaatgctgttaaccactttgtcttattttaatttgaatgacatcttgctttagaaaggacgtgatagaaactagttggaatgaaggagctgctttttagtgatgttctgcttgaactaaggaaagaacccgttgtctataagtaattgttggttgttctagctttttcccatattggcctgagtggaaggagagaaaatgttttctctcttgggttgttttgatatttcgagagagtggggatgggtcgggaggttttctatgagtgcctgtggtgtgtctggcccgaagagcatgccactgatgtgaagagttctggctttgctgagggacccatcccttctcactccccatttgaaatgactgatgaactctttggtccatgaccagctgtgaccagcctgggcactgaaagctcttagaatgccatcttgtgggccaggcttggtggctcatgcctgtaatcccatcactttgagaggctgaggtgggaggatcacctgaggtcaggagtttgagaccagcctgcctaacatggtgaatccctatctctactaaaaatacaaaaaatagctgggcgtggtggcacatgcctgtaatcccagctactcaggatactgaggcatgagaatcgattgaacctgggaggcggaagttgcagtaagccgagattgtgccactgcacttcagcctgggcaacagagtgagactccatctcaaaaaaaaaaaaaaaagtatgccatcttgtgttttagtggtcaggctagaactacactttccaaatggtagccactagtcacatgtggctcttaaaagttaagtgaaaattaagtcgatcaaatgaaaactttagctctgaagttgcactcttcacattttatgctcagtaaccgcatgtggcttttgactaccatattggaaagtgtagatatagggcatttctattattgcagacagttctgttgcatagctctgatctggaacacaccagtgctttttattttctatctgcaccatgatgtgaaaaagactcaacaaggctcataggacaggttctttgagtacatgatttctctcaccctttccaacctaacccaagaaaagaactaaaatttggcatgctattttgaaatgatcttgctttaggttaagaatgcaattcaactatgtgtaaattaacaaagatttattcttcttagaattaaaaaaataggcttataaaagcatgaagcttgaacatttatgttttgttctgagtttgtctcatttaggagttttagttagtactcaataatagatttcttaggatttaaaatttagatgtgttatgaaataatttttcaagcctacaaaaatgtattgataaaaatgtcactcgccttttttacatttttcagtgtgaagtaaattatatattaaatgtgagttaaattttaagtatttattaaaaagccttctttctcacaggactcttagtcataccagccctaggctattcatatgtgtgaatatagggcagtgtatttgatgaactgagagccctaggatttctgtatataggaactcaattttgtcataaaaatagttttgagaatacattttatactataagaaagtgggttcctctgaagactttactgaaacttttttttcataaaaaatataatttttttgctaaaccttgaaccagatcagtggctcgttgcagtaagtattcgcatgtaaagctgtttgggcaaaataatatactgtgtgacacacagcagattgtaatgccactttaataaatgaatgtgctctcaataacttaactgtgtccttgctgcctcaatttttttgctgcgttatctcaactatattggtttgcttttataccagataatttttttcttaggctgacataaggagatgtcattgcatatagttataaacttaccttttcattaacatcttgcatcttttgattttaaaaaatcaattttgggtgctgattgtttcctttcaacctgatcttttagtttttctggcttataatgaggtcagacctctcatggttgaccctacctaccgctgaagaatctgtccccaaatcaatatgaagaaacagacaggaaatgatattaggagatgttttgttgttttcgtaagctactggcaaccagataaaaatgatgaatctggaaaaaaacaagacaaatgacctaacttttattatcatcctcactgtagaagtttctctgtaaatttctcgtcattgtgaaaaataagaaagatttgccagtttgtgttaagtatatcactgagatcactaagtatttggcagccttaacaaattgcaggaaaccaatttgagcaggaaataacacagcctaaactaaacagccaattttgggaaacagattcatgtataagttctgtgtatttttctcccagaatctggccctcctagttatttttaaacagctctttaaggctcatttagacataacactgtagggagagttcagagaaaataagcttattcctttgactcgagttacaagaactgaacatctaggtttccaacttttaatatgtgaaactttgtggatgccagtgtctcaactgtgtactttttttgtgggctgtaatggttgatttgcctgactgttcctaatagtaagaaacctaattgctattgaattaaaggcattaaatctaattctctaagtcagcatattctgctctgaaaaagaaatctgccaacagtctagggttgaagaactcatggttggttccatcagtcaacaagtgttagcatggccgccatctttgaccttcaaggaattactagtttggtcaaagcatatttaatgttacagtgtagtgaatgagtactagtttagtcgcctcctctgttaatatttttgagaaggtgaatcaacatgtgagtgagatagaatgtataagaggtatggaaagtgctttaggaatttagagaaagagtgtcaggagctttggcaggcaggcctggcatcaggggaagtgaacttgagccaaacttgaggctaagagggatgggaggggggttagagtagaaggtaatcctggtagagttagcacacagaccagattaattcagataaaggtttcttgtagggtctcatgggtgggtaggttgaagtcaatgagtttaattctatcctatagggcctgggcagcttcagagctgttctatctcattttaggatgcaagtctggaaagttacattagttgtgccttcagatatacccagatattagtaacatttttattcgtaaagatatagtgctggttttcttattgatatttttatatccaataaacaaatccgagtggtaagaatatgtattttccaccatagtactaaataaaaccattttcatcttcagttaagtaaagaagcagccccataagcatttttgtttgtccgtaattggccctattgcagaaagaaagaaagaaagttgccctcaaatgcgtgagacagcatggcaggctagggtgtaacagatgagttctgagcagggaaggtgaatgaagcaagtggatccttggaaagataaggtaaagaaaggatgttagttggaaactagcaatcaggaaggtcagctgctgcctggtctaggtagagtggcagggcagaggagggcttggctggatatggtaactactgctccatggatgggtagtgacagtccttgactcacgcttcagtccttttctccccaggcctaggacaccttttctctgtgctacttgattcatctctatgttggatttatttttgagaatccagaaaacctttaggctgactttattttaaaattgagaggagggcatagaaaacttcctttcttgtcattagcaatgtgttttgtattccgtggtattttagaatggtcaaaagggagtcacacaaagaaagtgctgcagtgggagagagaatgaactagagataaagcttggtaggttctgaaacatcagtgagttacatcttccgatcgttttctgtgactaggaacttccacccattgatttcctagttaacggattaaccactggcttcagctgctttatattatgtcttcagaggtccctgcccttgttactgcagggactttgcattggtgcttctaggtggtatgaaatcaagtgggccggacactccctacttgcccctaagttactagaaagaagcaactgttttcttaggtaggttgtataatgtagattagaaatatagtaatgtcgtggagtcacagtactcaggagctggaagttaactcgggagttatgacctagtaatttcaatgacagcagagaaaaaagacgctgttttaaagaagctccccatttttgctgctgtagattctggacactaactttaaatggaattatgggatagtggattgtattttctcacagaacaagtgttgttatttgtcataaccaagcaaatcatgggtgtcaccaaaactatattaagaaaactagataaaacagtgatataaattttgtaatcatgcttcaagatttgtgaaataaaatacggcattggttagtcaagcaaaactaatagaatataaagcataggacatatacttagcaatactatttttgatttaaatttcatacatttgttgtaaacaatattaacaatatttttgcctttcttggaatttgacagatttgagagcatcatctggatggcccaaatctcttataataagttgcccaagggagtttcaaatgtacattttcctattgcaagcagagaggttcaaaatcaatccattgactttccagctgtcagccaaatagtaggttattgttgttgatgatcttgtttttccttgttaaaaaaaaaaaaaatttaaaagtaaggtctgacccagcatttcatttctttcctttaccctctcctgcctccctggtttattcagagtcactcctatagtgttctgtattaggccaaatcagtgctaccagggaacagtaagtgcttttaagtcccccttttaaaccttctctgcccccagggctacttgacactttgttgacagctgtcactgtacttgagtattccttgaaaagcctcgggaacccatgtggatcattatagaaggatctccaaactttatcaccgaattgctatggcatgcttatgacaatattctggttctatatgccctgcttcccctgaatgagtggttgattgaaatatgggttttaattagccagcatcaaatgattggagcttgaaattactttcagttacagggtagtcatgataactcacattactataaagatacaaggtgtttgaaacatctgacagattgcagggtgggcaagtacacggctgccagcaaccaacccctgtgtactcactgtgttggcaggacttctttcctttgtcagctgagtgagtgcagctgctttcctcctcacttcatgcacatgcaccttgctcttttctcatagggtttttttttttttttgcttgtccacacccatcattgctatagtcctgcaagggtcactcgcagaccttgtctgtatttgatgagtagcagtagagccttgctctgcatttcccaatttattatgttacgctttgcagtttctcccatccctggtgtcattgccctagtctggccaccattatctttttcctgcattaccctgacagtctcttgcttggggtccctgcctttagtcttgcattccccggtctattctcactgcagccctagtttctttccaaagcatgaaactaatcatgccattcctctgttagaaacttgagccctccaccccaccccggccttcctcttaggatgcagcccaaatctcttacatagccagcaaggtcctgtacaatccatctcctgctcgagtcttctctgggaatctcatgggattgagcccaaatactgcttttgtacaagaccttgctggcagacagacctttgtctgttgtgttgaacttctttgtctagtcatattgaagttcttgtatatcctcagacttatccttttgagtttttttatttttgagttggagttttgctgttgttgcccaggctggagtgcaatgcctcaatcttggctcactgcaacctccacctcccaggttcaagtgattctcctgcctcagcctcccgagtaactgggattacaggctcccgccaccacgcctggctaattttttgtatttttagtagacatggggtttcaccatgttggccaggctggtctcgaactgctgacgtcaggtgatccacccatcttggcctcccaaagtgctgggattacaggcctgagccaccgcacccggcctccttttgggtttttgaccgtgttgttccttctgtctgaatactgttccaccttctagccctgccccactgctatctcacctcttacctgccttttgtctagcaaactcctgctcattgttcagatccctgcctagaaaccacttaccccaggaaacttttcatgacacccagtcctggtgagatgccccacctgtgtgggcctgtggtacctgtgcacgtctctcgtagcacacgtcacgtggttctgccattgcccgttacacacccctctcctccagatcccatagcttctattttctcattggtcctcccaggacctcctcttctggcacttccttcagcactcccccttgctttggtgctgagctctctttgccaaggccgttatagaactgtgtgtgtttgctgcaggtaaacattgacctgttgagaccagataattaggcaaagcaggaaaagaagaagtctcagagggtcgaggagatttccttcaagagccatttcctcattttctcagtgtggactttccaagttgataccattttgaagagtttccttttcttgtgttactaattctctttagtactgatccttgtaatagtatgtacttcattgtgttacaattacatgtttacttgtctgtttttcccatttgattatgagcctttgaaagaagtgtatgttcgcttcccatgttctgtacgctcagccacagtgaccgtattataaagttaggtgcctcataaatgtttgtggaatgcgtgagctaaagcaaatcagataatgaagcctgatatgtacaagtgcctgtgtccactaagaggcaagcaggaaaaggggtctttctcttaggttggttccactgggcatgggtgtgagtgtcttcaccaggctcctgatggtgcttatacaatgccagtttcaggtctcaatcgtagcagacccaaggaagcccttttggaagaggcactttcttgagtaccatctggggaaaagtacgagtctgtggaggagtggctagggagcggggctctggatttggaaacattgatgtggaggttcatgtcctcctcctagttactaatttagtttagaaaggaaatcatctgtgtagacttgacaagttttggtgagtgctgtagtgagttgggattttcccttctcggaccctcccgctctcagttcctgctaccctcctcactttcctcctccattgggtcgaagttaatctgacattagtacctttgtcccctggaattttaggctaggagttttaggtgaggtttggttagggtgtctagaggtaggtccctaacttggaaaacaagttacccctggcttccttttctagtagaacccgctgctctcttcctgttgtcaaaactctgggacacttgagagtggagcttttcttcactctatcttctcctgtgtggcttttctcgtgtctgatctcagcttctcacttgaggatcatgacttattttcttcttgaaagagtggtctttctgccatcattcatttcctcaagcctctgaggcctgctctttgaagtctagggactttggtgtctggaagcccaggaaggttgcggtttggtttggcttctgggtaggggttggaaggaaggtccaatgcttgggccagtcctcccagtgtggggacgactgggagatcagggagctagctcagggagctccccgtgtgctcaaacacacagaagcatctgaggagccctaactaataaagagctaagaaaacctctagaatttgctttagctcatatgggcttttacccagtgcttccttttcacctcatcaccgtgtgctacagtcacagggaatgcgtataatgatgtcggattggcttcatttggtagttacgctaaattcttcagatgcaatttgtttttttgttgacatagtggtcatctcatgactttaaacaataagataaaatattgattgctgtgtgtcagttttgagaatggatctgaggaatgaaatgaaaatcagttattaaaatcaggataaatttgatttaaatcaaaaatattaaagcagcatttaaggtcaacagctcccccaaaaacattgttttgttatgcaaccagctaggttacggattctgaatatcatccttataatcatttaaacaaattattttaacaaaatacctctggcagccctcaattcatttcccttcttgaaacttgtactttttggtgtgatggctcaggcctgtaatcccagcactttgggagaccaaggcaggaggatcccttgagcccaggagatcgagcttggaagtgtactatgtttgcatccctgcactccagcctgggtgacagagtgacaccccatctcaaagaaaaaaaaaaaaaagaaacttgtgcttttagcaagaagagatggctttaactgtgcatgcatacttacagtaaaaaataaggccaatcacctgtttctttttccttggtaggaaaaatgaggccagctaagcagcttttgtttaattttgtgggacagcaaagatactcattgagcacaatatgtttctttaatttttcttaataacatgttgtcttctctgggaatctgatgggattgagcccatacactgcttttgtgaaattttttaaaacttttctaaaaatgttgctttaatattccatctcagaaacttttgagagtgggcattataagattatgggaagttataatcctgttttcatgattctttgacctttgacatattttatttttttaataaatctttaaagaaaattaaatatatgtatgtgtataatgaaaaagtatttttgctcaagcttgataaacatacaaataataaatttttcctctaattattttttcctgtcctattaaacatacctctactgacataggcactatttcataacccgtgttcatcttttttgcaaaaatgacatttacaaaagtgatgacataaaacttgttaaaaatggtgattttaaaaattgttcatgattgattataggactttgagctgaaaccttttttctttttttttctttttttgagacgaggtcttactgtatcaccctagctggagtgctatggtatggtaatggctcactgcagccttgaactgctgggctcaaggagattctcctatctcagcctcctgagtagctgggactacaggcaggtgcccccacactgccaatttttaattttttttgtagagacaggatcttgctatgttgctcaggctggtctcaaactcctggcttcattccatccttctgtctcagcttcacaaagtgctgggattataggcatgagccattgagcctggcctgaactgaaactttttaaggctatgttatattttgattgagaactacctttttctctccatccaagtaaaattcttttagttgaacaaacacctccctattcccagccctgcagcatcatctgtgatgtgcctcaataggtgtaacttgaaccagccgaaccagacccaattgcaaaggccaactgaaatcaccatctgtgctttactggcagtgatgtaatgtgattgcatgctttcagaaatagggctacagaggaaatgaaccccagttcttcacatgggaaatggaaaggtggtagttaaatcaccactgaatagaggagagagagagagagtgagctcatgtggtgtatatttagtgttcaaagggcttttgccatttaatagttgtgtgatcatggacaagttgtctcatttttcttcagaataaagtggggagactaatgccaatttctcatggttgccatggagactaaatgagaaaatatacaggtgctgagtgaaatatagcaggtgatcactaagtatccttttctttttttcttctttaacacagaagcatccagggccataacttcactgccaccttttacctgttccacattgactcttgccaactgaactactttctgtctaccctctttggctttcatttggttttctgtgcccttgttccaacaaacatttatttatttattactggctatgtgccagacactgtactaagtgccagagtttcaaagatgaataggtcagagatgtgactgccgactaactctgcatagggcggtcagggcagacttcaggaaaggggtggtgatgatgtttgagctgaatattgaaggaggaataataggagtttaccaatcagacatgatggaattggtggtgggggcgaggaggagaaagggcatttcttgggagaaggatgatgtgcgatgatgggtgcattggttacagtcataaagggcttggtgatttctgtgaattataactagttatatttatttgaaatgcacgtacttggtgggagatgaggttacaaggagtaaatacgaatagactgacaaagctaaggagtggggatttgcttctatagtaaatggctctaaccctacatttttttttttttgaggcatagtcttgctctgttacctaggccgaatgcagtggtgtgatcatagatcactgcagccttgaccttctgggtgcaaacaatcctccctcctcagtttcctgagtagtttgggttacaagtgtgtgccaccaccacatttggcagacttttttcttttttgtagagacggggtctcactctgttgctcaggctggtctctaactcttgggctgaagtgattcttctgctcagcctcccaaagcacaggcgtgattacaggtgtgagccactgccctggctctatccttacatctttatactatttttaattaatatatatgtgtgagtatggtgggggaggagtgagggagagatatcacctccaaagtcacctcaacagaacttttcttgatcctatttgccttcctctaaactcacatgacattttatctatatttttctcttggcagtcagtattttatgtatacacacacatataattatatataattaactataatataattaaatgtataacacatgttataattaattataatttgatatataacacaattatattagaattaattataataaatacataataattataaacaattataattaaatatgtaacaattatattataattaattataataaatatataacaattataattaattacataacataattataattaattataataaatacataacaattataattatgattactatataacataactattataattatataacataattataattaattataatcaaatatataatacaactaattataaatatataacaattatatataatatattcaactaattattctaattaaatagataatataattataattaattataatatataagtatattataaacatataagtatatgcaaaattatatgtgtatattttatatacatatcattatatattaagaatacataatttttgtttttttaaagagatgaggtctcactgtttttcccaggctgaactcaaactcttgggttcaagtgatactcccacctcagccttccaagtagctgggattaaaggtgagtgccaccatgccaggcccctctacattttaaaaacggttacttatttataactctgttagcacctttactatacattaagctccttgtgggcagaaggcatacctgagagcccctggttcctttgtgacccatatggcatctgtctgacctgtagaaggtgctcaagaaacacttgacaatggaatgaatgaatggatgggcctgtgatcatccccagcttcttcagaatactttccacttcaaaaacatgtttgatgaaagcagtcagtcacaaaagaccacatactaaatgatcccatttataggaaatgtccagtataggcaaatgtataaagagcagaagtggtggttgcctagggctggggtggtggtggtggtaacaaggatagggagtcactgctgattgttgcacaactctgaggatatactaaacaccattgcatggtactttaaatgggtaaattttatgttatacacattttgtgtcaataaagcttttgaaatacttttgaaattttgtcaaattttaacaaaagtatctttaaatgcatttttttcctgtttttatgtttaccgtatatacatagggacttgcattatataatatttattgttattttttgaagtttggactgggagctcatagcatgtgctttgggacttcattaaccatttcagagatgcaaggcagtgtgagagggaattcttgtgagcctatgcagaatgacctcattctctctgtcagagaaatactgcactaagttattttagtattagcagaatgtcgttgttggatatatttggacagtatatttttgtttcaagtcattgaagaagtttgtcttcatggagtaatatattgctttatcttaataaataggcatagcattggcagaagtacaaggaatggtgctatttttctgtcaccttcagaatgaagaggtaggtatagtttgttttttagcctgttgatcttgtacttctcattaacaggtactttatttttaaaagtatgttttacattaaaatagcatttgtgcactaatgaagcaatacttattaataaaacatgcccttagataaattgtttaatgcagttttcttttttcttccacattgtggggactagtggtttctgtgttgatgaaagagcagggagcatcttttcttgtgtgttcattcatgcaaaattttgccctcttgaaaaatgaacaaagatcatagccagaaggtatttatcatgcagttaaccacaagaaatcttgaatgagatcatcatcaagtaacttaaataaaacagttattttctgacactttatcaccagagtcattctttaggacacttagcattattatgtatgcatttttctttttcatataattgccaactattttgaagaatgggatgcttcagattaacgtcttgggagggagacacaatctacttgaccctgatttaaaggaatagtggaagtgggtggttcttcaccacacatgtgattgttactagggattcttcatagactctgtcatagcaaaagtattatatttggcttctcatgacgtgtcccgtgactagcagagtgttgctcagtggaatggcttgggctgaatcagtaggtctttccaagtataaatttgagtgctcactagaccagagagaggcagaggcgtcaggatttggtgggagattctctgagtgttgcaaatagtccccatccctcctgtgcatgacccaagagtttgctctgagacacctattgaataaatggccagccagcactgtggttaggtgaaaggagcacgaatattgatagatatttaagccctgacgtgactgagcctggccttcagctttgcctcttactatatttgtgatgtccaagagtgacaggggctaacatagctataaataagcaactattaagaaattgtaaaaagcagtgactgccaagagaaaaatatagagaaaatgccgtgtgaatttggaggaagtttagagtgataggagctgtgtgccaaagccactagtctttcttgggcaattcccattatggaacaaagggatccagaatgcattttcccaaagaaagaatgagtacagatgaaatattgttgttagaataattcttcaggcttatcatgggtttttgggttaacttggaaacccaaatagcattttactttttaatgacgaatatacaaatgagctatggcacccctgaagagttggcatggttttccatagctgcggtcaaggttggctcctttctgtacaggttttccatatgtcttgtgagagggtttgaaatatcaactttggattccaacatctgagttcagttattgtctctatgcagttttgattacaagcaaacatttgtatacatacaaatgtgtgtctgtgtatgtgtgtttgtcacttaagaaaataatgtgtcaaccacagatatgttagtatgagcattttaacagttcgttagtcactgaagtttttttgcagtacaggctaatgccaaaggcaagctttctcctgcttgctgttttgcccagggctggcatggctggtcagtgacatcaagggattgtaacaattcacttttataatagttgatataattttggttggcttttgtttattcactatttcaagtatgatggtggtggttttttgtttttgcttttctctgcttcaaagctatcaacgattgcattcctctcctccactaaactttatgtaggagggagggaggatttagtacctgcacatggaaatactttgatgctgtgtcgggtcatttttcagggagacagaggccagagtctgtgaaggtctgtagctgcagaatggttagcacagaggcaattgatacaatgagggggctcaggttttgggaccagccagccctgagtcaccatggggctctttataacattggaataatacttaactcagggctaacctaatgcctagaacattgtagaatcagtagagactaaattggcatggtattggattgctgactagaaatacttctatctcaaccttataaccaactggctgttttaccttgggtatgtttctttatttctctgggccttagtgttcttatctgtcagatggtggaatggactgttatctctaagattcccttgatagattctgagctttttagataagaaccattttcattcgtctttgtttcctaacactgcgattatacttggacaaaacatttttttgaacgaatgattagatttgcagctatagttatatagctacatatagttataattatgagcttatttgtatatgtctgtgaacatttataaatgagaattgtctttttttgaggttatcctcaagcagcctgaaatgcaattttatctctaaatgttcattcatacatatacatatgtgtgtatgcctagaactaatatataaaatttaaaaattagaaaaaaataaaaatgatcaaggtgcaagagtatacgtttaaacaaatctattgctttagaagaatttatttatgttgcattatttggatatgatgcttagaataacttggctagtagaaaaatgctgttggcagcttctaggtttaaaaaaagcaccccagagaattagggaaaaaatagtagttaaaagggtactgtcaaggttggtaggtctaaatttaacagagcagctgtgttttggtttggaagggtgtgtgtgtcatgctatctccccgcgctgtttgcttgccctgttatgaggcagaaacatgttataatggagatagagatcctgccttttgaaatgcagcctcaagaagtggctgcttgaatgttgcagtgcccccactggcttacaagaaccttgtcagtgtttggagaagtttaaatctagcaggtgtaattgttgttatgctttctggcttggctgtggtctttttctgaaggaactcttcaagaacattgagcagtattctctgtgcttgaaatattgtgttttattgcatttaagatgccagtaattataagattttattttattttttgagatggagtcttgctctgtcacccagcctggagagcagtggttcaatctcagctcactgcagtctctgcctcctgggttcaagtgattctggtgcctcagcctcctgagtagctgggattacaggcacgttccaccacgcctggctaattttttgtatttttagcagagacagggctttgccatgtcggtcaggctggtgtcaaactcctgacctcaagtggtctatctccctcatcctcccaaagtactgggattactaaagtcatgagccactgcgcctggcatatttttaagattttatgttccactaagaaataaccttgacagttaagctgtgataaagtgctttcctatccattagaatattcattttatgtttattggagttgttctatctatgttcataaataaaaaggaaaatttaagtgaaatgaattggtagcaatattcttgaagcttacattcagagcccaagtcttctgaatcattttctgcctccatgttgtccatgtgagtgttttttcctatactgtcaccctgtgtgccattaagagtggtagtaatgtagcagttgttaaaaagtgtgctctactgtctatcctggaattttcttccaagctgctgactctcattctgcatttttttttttttttttttttttttttttttttttaagacacagcctcctctgttactcagcttaggtacagtggcaagatcttggctcactgcaacctccacctttcgggttcaagcaattcttgtgcctcagtctcctgagtagctgggattacagacatgcagcaccacactaattttttgtatttttagtagagacagggtttcaccatgttggccaggctgatctcgaactcctggccttaagtgatcctcccgcctcagcctcccaaagtgctgggattacaggcatgagccaccacgcctggcccttcattctgcatgttttgatgctactgccttcttgatctcacatagataatgtcatgaactatgttatgactaccacctggcccacagtgacaggaagataccgtcggtatcagagacgaataaatgtgtaccttagaagcaatggcatgtagcagcagtgcactagctgtaaaaaggactttgaccaaggagtcattgttcagaggttcacagtggaagtgtggattatggagtattttctttattctaaatggttaaacaccacaagtaaagaaattgtttcatgttcagacactattattctctaattgtattaatgtacagttaccttttttctttcatggagaatcttaatggagagtttaacctgaaaagaatagccctgctgtttctatttttttgaaacatctttcaaacttcaaacatactttgcttctcaaacattcatagtgtgtataaattatgaggaatacaaagatgagtaaggcttgttgccctcaagcattattggttaagtattggcggttaaatgagaagtggtaataaacatcactaacaagcacattatagtcttcaaagtaggataaaattgttgggtactgtttaccttggatttattaagtttaattaagtctgcctacaataaattaaaaaatcacatgtctaaaaatatgtgcatcatcttgaatctgaatcagatttctttccctttagaagctctattgtggataattgattcaaaagaatatgatctgtacattatagtatttatggctgttaatgtcctaatttgatcatggtgctgtagttatataacagattgtccttgtgttttggaaattacgttggaatatttaggggtaaaggcatcatgtctgcaatttatcgtcatgtgtttcagaagaaaatatttgtgtgtgtatgtgcgtgttatgtttgtatagagagaatgatcaaatatatctggtgaaatgttaattgggaagtttgggtgaagggtatacgcggattttttatggcattcttacaacttttctgtggtttgaaatgattttaaaataagaggttatggaattgaaaagctattgctaagatatcagatgcctggtacttttaaatcaacacatttattttatgtgactttagggcagatgtgtgcatattttaagaaaaattccattctcttggcggaaacttgcagaatgtcttcaactctgcttcctcttgctttcacacaccccgaagtgcttgctctctcactttgtggatttatatatcttttgcggcccgcttggggggagtatttgcacatacatttctatgttactgctgttctccaaacactctattattattgtatctgagaggttttcaattgttttaggggggagtttcctacacttaccctttggtagtgattttccaattgtctatgactagctattttgatgacttaatttagaatggtggtcccttttgtttatttctaaactagctgctatgatccctgcttcccttctgcctctttacccctcccttatttgtcacccttctcctcacttctctattaggccggattcatctttggaattagtaaaaatcctgcctcttccaggaagcctatcctgactatccctatggaactctgattacttcttaatttgccacttactgcactcagttttgtatagttatattttattgttttatattgttctcaatgatggattaaaattattgttgttttgtagtcacttcaagttatatgtgcatattattttcccagcccagtgtcagagtactagcagatataagcagatataaactacgctttccctcccccgctgactttatccccacagctcatggctgtctccacgaagtaagtgattctgtctgagtaggtattttttttttttttatttaacctaggatcagacctaagggagttttgttgttgtcgttgttgtttttgagacagagtttcgctcttgttgcccagcctggagtgcaatggcgtgatctcagctcacgcaccctccacctcccgcattcaagcgattctcctgcctcagcctcccgagtagcttgggattacaggcatgtgccaccacacttggctaattttgtatttttagtagagacggaagtttctccatgttggtcaggctggtctcgaactcccgacctctggtgatctgcccacctccgcctcccaaagtgctgggattacaggcatgagccaccgcgcctggccctgagtaggtattttttactgggtccaaaactgaagccactgtctgacttttgggattatctgtatctctcctttcttcctttttacctccaatctctgaggattaaagattttttttgtctgcattagctgagatattagtttcataatgtagccaattcatttactatttttaattcagaatgacaaataaactggatttttttcacctgtaatttgatctgtgattgttgaaacacgtaaaacatatttgaacaaaaacattccaacacagtttataaatgtgttatcctctgtggtaaggacaaagtcatgagactcgtttttgctcaaggatataccacatttgcatcttaaatacaactgttaatattctcttcttgttaattcaggcagggtagcttttcctgagtgacagaaatgtagatgattatgtgaaataatgagttgattggttcatatctgggttgtcattttggctttttggattgtcttatgaaaattttctgagggcagtactcttttttgtagagttgggattataaaactgtgaaatgttctcttttacctttgtcttgcctctgaaacattttttgggttaaattctttaaaaaaaaagaagtcccattgactgtgtatgtgctattaactctagcatcgcttccatgatctggtgttgtctaacatttgattcgtccccttttgtacattagcatatcccagcagctcgtggaagcatttgtgaacgaagaaaccgaggctatgagagattaagtgatttactctagaccacaggtaacaatgtctgatgtaagtttgggtcttcactccaaacctgtacattctactggattaaaggttcttaacctgctttgtgccaagttgcactttggcattctggtgaagcctgtggatccattttacttttaaatacaaaaaatatggccgggtgcggtggctcacgcctgtaatcccagaactttgggaggccgagacgggcagatcacgaggtcaggagattgagaccatcctggctaacacggtgaaaccctgtctctactaaaaaacacaaaaaattagccgggtgtggtggcgggcgcctgtagtcccagctactcgggaggctgaggcgggagaatggcatgaacctgggaggctggagcttgcagtgagccgagatcgcgccactgcactccagcctgggcgacagagggagactccgtctcccccccccaaaaaaatacatagcattacaaaagaaaccaattatatataattaaaaaaacccaagtttgtaatatacactgacttactagcacattaaataaaatgacctggtgttgggtgtattaactactattatttcaaagtagtgatgagcatgaatatttggaatgtctgaaactattgtaatgtgttatgaaaatgtgtgatttctattggtgacaaatcacaggtactgtggctaatactactaggttttagggtatcattcatatttgaaggaaatgcatactttatttagaagttagtgagaataaagatgcattttttttcctatccaagtttacagatctcttgaattcccaggttaagaactacttcatcagattataccggtctctcatgtttataaacatttatgccacctgctggatctgctcttaaaaaacagaataaacaattacaaaagcaaaaatatatgcaaacaatgtaagacctcactaaaaaaagtaagattcaggcttaagtattagttcttgcactgctataaagaaatacctgagactgataaagaggtttaattggctcatgagtctgcagtctgtaggctcatgactctgcatggcagtatctgctggcttctggggaggctttgggaaacttacaatcatggcaggagatgaaagggaagggggtacatcacatggctggaggaggaggaggggcagcgagaggtgccacacacttttaaacgactagatctcatgagaactcactataagaattgcaccaagagggaaatcagctcccatgatccagtcacctcccatcaggcctcacctccaacactggcgattacaatttgacatgagatttgggcggggacacagatccaaactatatcagcatatacatatgttgcgagatcctggagggtaaaaattaaaatttacttaatttaaaatggttagaacctataagtttaaattatttgtgtttcttaatgttctagtcagttctctgcctacctctcccctaaagataaaatgatcatattgaagtttgttattttcttcattaaaaagcctttgccttctatatttcagcttcttctgggcaatttgttttaatgagggtgactgtcatagagagtttcagttcagttctccattagtgatgactggtaggtagagcagagacaggacctgaaatagaatgttagagtgcactgaaatggcatgtctctcctgtgcgtcgtgtaagcctgaaaaggtttgttttattgcttttcactgggtgagtctgaacctcttcgtcagttgtcaggcctgacagcttaagtgtattgtagttgcttccgtccttacctaaaatctagttctactctttcttttgttaattaaatgggaggcattcacttaaatgcattttatttcctctcttaggtggggaatcataagctgtttcttctaaactgttaagcccctctgtctgagttgctccagagatactaagtaactcggatggtgttgacaggaaaagctttaggtagaggggaaaaaaacgactgagcacatttaccgctcagcagggttgccatgctcccctaaccccgcatcatgcagtgagtatgtgcgttgctttccccaggccagcatcctggatcagagctgcaggacttgggaggcagtgcctcagccctgctgtcagcctcatctcccgcctggggaggagagctgcagatttgtgtgagcttccatgcagcttcctggattccctctcccaagtctgccctgcagacccatccagtggactgctcttctgccatatacattctctcccttgactctttccagccttgggctttctaatcattaccaacactttacagtctttttgtatttcacaaaaatagcttgcaaaagcttttggcctgaatttttgtaacagtcttttgattacaatagggctggagaatactattaacttctgattatctgaggacagattattttaaatttggcttataaattgaatggtattttattttcctttagtacttcttgtattattattgttattattttggggtaattattctccccacccattaacttttattttgctgcatcctatcaggaaacttacaaaacctaaaaatgtaagcatttattcaattataggtaatgtttgaaagaatacaggtctgcctaggtttgtattttgtaccattcccaactgggaacttaaatgacaatgttttggagagcgcatgctgttaaaagcgctaatggagaacattttaatttctattaacaaatcaaccaataaaacaattatttaagtattttctttaaatgtctagtgagttttgtgattgttagtagagatcaggcaaaggggtttcagcccttcagttgctttatccacagttggtttatcacacatgctgctacctgccatggtgattagacatttacatagtttaaactttttattcatagtcatgcagtgtttaatttatgcccataatagattattggtagaaatctggaaacatacgggacactgatgctgaaaagcaggttaatgagcatcataaatgtgatgatgcctctgaaaattagcgtcaggatgcttttcactagactactaaaatgtattcatttgctaaaatgctcatatagcacattggggtgtgtctcatattttgctacttaatcttagaaaggttgctcttcatttattaggaataaaaactatcctcccccaattttatttgcatttgcaaatagtaccctgaaatcttttatcctgtcataaataaaacacaaaagttctaaaatcaaataagttaacttccctaagtgcaaaatgtgagaattctgaacagtagagcatgaaagggaattttgtctattttttttttttttttgagatggagtctcaaccggtcacccaggctggagtgcagtggcgctatctcggctcactgctacctccgcctcccgggttcaagcaattctcctgcctcagcctcccgagtagctgggtgggactacaggcatgcaccaccacgcccagctaatttttatatttttagtagacacggagtttcgccatgatggccaggctggtctcagactcctgacgtcaggtaatctgcccgccttggcctcccaaagtgctgggattacaggtgtgagccaccgtgtccagtcgattttgtctatttttgaaactgtaacagttaagtcagttttgtccacattaaaaaatatggttggtccacaaatgaaatacaatatagtgtcatatttaaatttttttcataattaaaggctgcaacaagttaaattttatcttgatataaatggtataaaaagattattacaataaactttgttattaagggttgggtgtgatggttcacggctgtaatcccagcactttgggaagctgaggcaggcgggttgcttgagctcagaagtttgagaccagcctggacaacataatgaaacctctgtctctacaaaaaatacaaaaattagctgggtgtggtggtgcacacctgtggtccagctgctcggtggggctgaggtgggagaatcactggagccctggccattgatgctacagtgtgccgtgtttgtgctgctaggctccagcctgggtggcaaagtgagaccctgcatcaaaaaaattgaatacccgaagcaaacaaacaaaaaaaaactttgtcatgatctttattaataatattcattatttaaaataaaatgttttaagtaaaatcacttatgtaacatacaagttacagatgtttaaaaatattaccaaaggtttcttaagattgtgttattatgagaaatgcagttgtctgttggaatgtgtagcagagagaagagccttggggtagggacatggaacatcttcccggtttctgcatcagagagtgattgtatgaaaatgtgtacacattggcacagactagagccagttttgaatgatttctgcagtatattggccttgcctggtcccctgtgtcatcgcagagttgattataatgatgagtgtaacctagcagggatgccaagctccctacatctttctgggataaggatggtttgagtaaaaggttgccatggttgtctggaggcagcaagcaataaaagactgtctcagaatgtgttctcttggtgttaagccttggaggtgtgtctttgtgagtattcaaagggaaacgtaagatagttggagagaatcttagggacatgcagaaatactaccgcagtgtgatgaagagaagcctttttaagattgtaaaagtataaatattgctcataaaaaaatagatgtgtttcaaccaagcttgcttttaagtgaatatgtataagtggattatagttctccatttacatcttttataaaattggacatgctatgctggaaaaaaagggcccttggatataatttacatttcctaggaatgtggcagttctgtcattgcatgcttaaaaataattattttcttacagaactttacactaatgccaaaaacattgccagcacctcttatgtattcgtattttacctaacttatgcccaggcagactgctttagacctgaactatgtttattttttagctgatagtcgaagtcctcataggactattagcgtatcaaaggcagtattgaattagagcagttgtttgctttgggtcttagaaattcccagagtttagcagcagaacatagaatagtgaaagtgggttcttagatggggacagccaggacagggtgttctaaatcacattcaagttttgcgtatatgactggagtagatggagatgggggaataatgaagttatgactcaatcagtcctttcatttcattctgcttagtgaattttgaataaaagaaaacctgtgaaaaaggaagatttaggaagatttgtactggacccttgctgctattatgcagaatggtacatgggaagaaaggatggaaaaataaatcaagagcatcgcttcacttaggttttcagcaaacattgggatagctgagacattttttcattaaaggttagcttgccagaaaggtggttgagagtgagtgaattattagtatgtaggtactatgattgttagattatcattaaacaggaagtagatgactggatggagccttgaagaattactagagtaggaaaggtaatttagtcattgatgtgcaatctataaattccttgttatttgaaatttgagtgttatttatatagggatttgggtaaagtaggtttatgggaactaaaatgtaatctaatgaggtaatggtatttatcagaaggtgatataattctcacaacaatcttattacctggatacttgtataattcccactatacaagcaaggaaactgagttacggggaagctaataaacttggccaacaatatacataaacacatggcatggcagggttttagatcgaggcattctgattctacaggcgaccttcttagctgctctgctgtgatgccatgggcagagaaccacagtttcagaaatacatttaccagcagggacactcgaggtgatctaattcatggccctcattttagaaataataaaagggctcttcgactgcgactgaatggcttgttttatggcttacttaccctgggatggaaaaagcattttaatgactctttaatttcctcttattatggatagctgggtagtataggggagtgagagatcatctctgactcccctttttgctcttgtgtaaatgggctctttggctggatctgcaaactaaattgacaccaggcatattaacaagtgaaaagcatatacatcatcgacgtgttcatggggatcttcataagagagtgaatccgaggaagtaaccacagcaagatgcttgtatacttttttgacaaagaacaatgaatttgagaagaaatgacaggacaagtaaactttggtgaggggcaataaattttctaggggagttactgagatatatagaggggtgtataaaactagtggaagataagggttacttcattaagtatatttattcaggtctgttgcagccccagttctcaatgtctggtggtaagggctgttttctcaccccagtactggaagggtacccctcccagaggaatcttgatggcttactgcatgcgggaagagaaaggtcagctagccccttctgaaactacaattcctccagtgttttcaacttgaaatagtcaataggccattccagcatattttgggatggcatgtccttcactccttcagtagggataatgaaaaaagagactttcctggggcagctataggcttctgctctgaggtctcttccagctcttgcaagtatacccaacatagctgatttttagcttttctttctaagtctgcatgtttttgaggctatcctttgattcttctaggtctgacaaagggtagagttggacatacgttttagtaagatatgtggggtcgaatataggttccactgttctaatggagaccctaagttacatggctcaaaaagttaaaattttatttttctctcatgtaacattttggataatttgatgattccctaatgttgggacccagtcttttctgtcttaggctcacaactatccttgagcctgtgtcatgggggatgactctgaagctgcgtgcaccctgttcattcacattttcttggcctgaacttagtcactaggctattcctaactgcaagagaagctggaagatgtagtcttccttctgaccagccatgtgctcaaccacaaattgagtttcagttattggagggcagaaagaatagatatggggctgctttgtaggctgctgctcggggcagcctctgctgtgttatttgagatttataattttccttggcttcccagatgacagtggaaaaaggcatagtcaagacttcaagtgcggaaaatgttggcaactctgacatgcaagttcttttccatatagagctgagttatgctggagtattttggttacaaagacttcattttctcacctgtctgaattcctgtttggattttagttactcttgatttatcagcatggattaaaaattgaaaagacttggtattttaaaattatatctgaaatggcagagacagcatctgaggattcctcttgctactataaggaatgagtaatttagtttgatttttctttaaatccaaataaataagatgattaaactcaagataaagctgtaatatctcttatcgtgtcctgtcatttgtcattgctaccatgtcttgaaagctttgtggaaaaataatggttttgatatttgttattgagatagaatacccacaaataggtatttaaaatatttttgtcttagccagttgattgtggcgtgtgcatggactaagcaacttaaaaaaaaagaaattggtttgttgaataacagctttcactagagacactaaagtccacaaaacctcagtgagcagttgtcagattccattttaaggaggcaaagctaaactttatatgcgtttcccaccatgtgtaaatccaaacagcaagcaaggactattaaatgttttattttgctagtggcagcaaagaatgtaatgttggatataatatagtttacatttacagttgaagttatattttcaattgtatggaataaaatgaataggtctctatttcatagccaaagtggacaatttatagagtgattttctagaacaccccaatatgtagtgacattttgtggcagtgatgccacatgtaggaagtggatctctatagaactttgctattaatgttgcggggtatttgttgcatgatgtagaaaatgctatccgggttacctttcattccttatatctgacttagcttaacctcagctgatggcttaagtcagtggccaagaatttttcatcagctgtccttggtaacatatatcattcatcatactaggatgattggtgttatcaattgaaaaatctaaatggaagacaaaattaaatgctacttgagaagctagagtgaaaagagaatgtcttggctctctaacatttcctctcttttctacctgtattcaatatggccatgaatatccttttggagacactttgaatctcattgtgttcaattacagaggaactcttcagcaaataacccttgtatggtgtgcttctagatagtgtacataagaaactgtgtgctgtaaattctgctttcccaaatgttataaaggtatatgattgcatttttctataatataatatatcatataatataatacagatgtttgattgtaatttaccttttaagaacacatagtcttataatggtatatgggcaggatacctgtggggtcaaaggaaaagaacatgaaccaattttgttttcttagagcctgtgctacctacttttagatactttaatcccagccaactctctttggtataagaatggtttgaacttctgttagctaaactgatatactatgtaatgttcatgattgaattgataaaggtgttttttaaaaactgaaattatgcctcattatgcattgtttaaaaataacttttaaatgattatgaaagtaaaaatgtgttcttggtaaacactgcaacgaagtataaagagagaaaggaaaatgatccatttctcccaaatataaaggtaatcattagtatcattttggcatatgtatttatgtatgtatgtatttattttttctgagacagtctctcgctctgtcgccaggctggagtgcagtggcgtgttctcggctcactgcgacctctgcttcccgggtttgagcaattctcctgcctcagcctccctagtagctgagactacaggtgtgcaccaccacgcctggctaatttttgtacttttagtagaggtgtggtttcaccatgttggccaggccggtctcgaactcctgacctcaggtgatccgcctgcctcagcctccgaaagtgctgggattacaggtgtgagccactgtgctgggctatatgtatgtatttctttgtgatggtgtccttaggcttttttcagtactgtacatatagaaaacaaaatgaagaccaaatagtgtgttcagcctggtatcttttcacttgtgagaaatttttcgtggggtttaaagcatgttttttaatgttagcattgtattatttgaccatttcactgtttttggacatttaatttgcttctagtttttcattgttttatatataaaatgtatattgttctccctcattgtctaaatctttctctttgccacactacacttcatgtttcttaggaggaagatttaatagtcttttaagcttgtcatgaagatgaatttttagaaaatgcttgatcaacatcaattttactttaacctttggtctcgtcatcattcatcatattctattactttagcagcattcaaagataatgaaagagattcagataaattcttgttactctcagatcaaattcatttacaataaatatgtgaatcttgatgatcagaagctaaaatacttattgaacctggacatcaagccagatcctaaatctttatgaaaatgcaccacaaattcttcttgttacataatcttttctgtaggttaaaaaaaccaacaaatcctagcatgttgacattctgaagaatatatggctttaaacagtctcttgcaaactatagtactggctcaatgaaatgttatacagcatcagtcaggatttttaataaaatgctgttggttctccaattgaagagtttcattctgtttatgtaatgatgttcatgtttgacctgaaaatacctcctcattctacggcatttcatcttcaagagaaaccttattagtaatttgtagattagaaataaagtcacagagggtagtcaggagaacacaggtctctgtaaacctgactcttttattaaacatactttgccatgaatacttttcattgagctgtttttctacctatttaagatgaaccagatatgacatatttctgtattttatttcacaatcctatggtatatacccccaacacccacacagtggttataactgtaaaatgaaagttttgcatgtgtaacatgtcgtaacattcttatttcactgccttgtttgaaatgcatataaatttaaatgtgaacattttatactattcttttaaagattttaaatattatatatgtataatgctttattagattaatttcttcctgttaaattccctatgaactgtgtaacttgagataaaaatgttacaatcatttaaaagtgttaaaacatgcagtaaaatcttactcatttggattcatttaatttacaatttgtcagaaaattagagaagaattatgtttacttacactaacaggatgggaaaggggtcatggggtgagagttggggagggtttggtaagaaaattcccctaaaggaaatctcaattgcctagcgaattattttatgaaatcatcatgtgtgttggatgttactatttatggagaataagttggtattctaattactagtttcattaaaacagttcccctaaggacccctacctgataacacttttaagactggatccagcctttctttgcggaatcaccatggcggctgggaccctgtacacgtatcctgaaaactggagggccttcaaggctctcatcgctgctcagtacagcggggctcagatccgcgtgctctccgcaccaccccacttccattttggccaaaccaaccgcacctctgaatttcttcgcaaatttcctgccggcaaggtcccagcatttgagggtgatgatggattctgtgtgtttgagagcaacgccattgcctactatgtgagcaatgaggagctgcggggaagtactccagaggcagcagcccaggtggtgcagtgggtgagctttgctgattccgatatagtgcccccagccagtacctgggtgttccccaccttgggcatcatgcaccacaacaaacaggccactgagaatgcaaaggaggaagtgaggcgaattctggggctgctggatgcttacttgaagacgaggacttttctggtgggcgaacgagtgacattggctgacatcacagttgtctgcaccctgttgtggctctataagcaggttctagagccttctttccgccgggcctttcgcaataccaaccgctggttcctcacctgcattaaccagccccagttccgggctgtcttgggggaactgaaactgtgtgagaagatggcccagtttgatgctaaaaagtttgcagagacccagcctaaaaaggacacaccacggaaagagaagggttcacgggaagagaagcagaagccccaggctgagcggaaggaggagaaaaaggcggctgcccctgctcctgaggaggagatggatgaatgtgagcaggcgctggctgctgagcccaaggccaaggaccccttcgctcacctgcccaagagtacctttgtgttggatgaatttaagcgcaagtactccaatgaggacacactctctgtggcactgccatatttctgggagcactttgataaggacggctggtccctgtggtactcagagtatcgcttccctgaagaactcactcagaccttcatgagctgcaatctcatcactggaatgttccagcgactggacaagctgaggaagaatgccttcgccagtgtcatcctttttggaaccaacaatagcagctccatttctggagtctgggtcttccgaggccaggagcttgcctttccgctgagtccagattggcaggtggactacgagtcatacacatggcggaaactggatcctggcagagaggagacccagacgctggttcgagagtacttttcctgggagggggccttccagcatgtgggcaaagccttcaatcacggcaagatcttcaagtgaacatctcttgccatcacctagctgcctgcacctgcccttcagggagatgggggtcattaaaggaaactgaacattgaaaaaaaaaaaaaaaaaaaaaagactggatccaattgctgaaaggacttgaaaagaattatagatgcatttttttaaaagtatcatatatgtttagattttactcatccttgttgctttcttaccatttattctagatagtttaatattatatgctttagtgaaagctaacttatttttgctgtttatagagaaattatttcttattataccctcacttccttaatttcaaaaaggaatctctgtgaattattataagttaattcaggatgagtagctttaaatcctttttctttttccttcattataaacatgatatggccttattgaactgtttgttcagtattcattctgatattgtcatatataaaacatagttttaaatggtcaagcgctatcctgtgtagataattttgatgggaaatgtgtcagcttgaaataaatcgatgtttgggaaattgttctcttaaagacggtaatctgaaaatgtgaatgctaaataatgaaaacatttgtacagtttgggggtagatgagttttaatctgtttctggcatctgtacattcttgtgatatctcacagagacctggagtgtttaggttgcaatttgtacccaccttttccatttctattgaattaataatggagccctcatccctctaggacatcaggagagaaaaaaaaatagacaatgtgatgattagcagagagtaattttgattaccctaaggaaaattaagatgatctttataagtggaccgggcaaaatgtggttttggtgagtatggagctagagaaagctagtcatgtttgggcaccttaaggcagagatcatgttggggaaagatattttggtgtcatccaaatgtttatctgtttgaaaaatccatataaatattagtagattatttgtgactatctatctgtggtcatacaaaccataaaatagctagatttcccactttttttcatttatcagggtgaatattttagccctgtctaaaacaatggtgcgcagtggtggggcaatactgtaccactttagaaagtgtttgagtagtaccccacttgaggagtacggcaccacttcaggcactttaggaatttgagggaagctgtggtgtttagtggcacggggagggatcttcatggctagcagtgcctgggggtagtttcccatctccaagaattgtcctgtgccctctaacttctgaatgtcccatcagagattcatggagctgaaaacctatttacctggctgagaacttagttgttttatatataaacagaaagtatgttttgcatggttttaaagtatactgaattttccaagagtgaaactactgtgtaacaatagcttttgcatttgtgatgatttagcacacaaactcaagattcagactgttttattatgtctgctagggtagttatgtttgaacgtttacataatgagatgccattattttattataaattagcttgttttatttaaatattacacttagggcattatattgattacttttcttggtcacacaggaccatttgcgtgaaatggaaaagagcttgggtggtttctgtacttcatttagtttggagagttaacactgtattatagttttatctccagtgaacaaaatataatcatttttgaaacaaaaaaattaagctatgtatcagaaagcaatatccaaaggtaattattattttttaatttaaattatagatcttattttcctggaggctgtgtgagatcttgcaactattattcagaatattaagacatgaaatactagatatatctgattctcaatacgggttttaggaattgtctacttaagatgtctaaactgtagaatatgaattacgagcttatctcttgctatacggctatagcccagtattgatgttttctttcctacatggaatggaacatggagctagtttctatgggtgcttattgtgaagcaaacaataaaatgaacattatttgcgtaatatgccattcagatgagaaatttacaaaggtatatacatcctgatggagtgataatgctacaaaataagccattaacttgatgctgttgatgttcaggttgccaaactcttcctaacactgccttctggtacagtatttatgattatgaatgtgcagtgcagaactttcattctaccatcttcattaactttaatgcgtaagtagccacagttacccctgccaggtagtagacagatgccatttgttttgaaggcactcttaagatacattctccttataggatggtgaaggtaactgtcagctgaatatacctatattctctgtgtgcctggtttaaatcaggtttatttgtctgccaactaaatggtgccacaaatggataataaacatgtttatttctaactcttgagatttatcctagtcatcttttggctcttcttccaatcaaaccctgtagcttttagaagataaggagcaggacaagatttatcctgtaacctatgctgttagtcatttagctctaatatacttggtgttgtatttcattgattgcatggatgctttgattattattttcttaaacaataattgctcttcattttaatgaatttattgaaattataagattaatgagtatttctattgagctgaaaatttaatttggctatatcttatggtataactttttgctcaactatctcaatcctgggagaatcagagtctttatctgaaatctgctgcttatattatgcaggtacatatatttattttgttctcttggaagatcttcatggtttctctttagtgtgtttaaactagcacatgaaaataatagactttacaaaattggccatgacctatatcagcaaatggtgaaaccagaaagaaaaatacattaaaggaaaaatcccaaaggaactgatatttctctaagaagcaaggtataacttttattaagcaacttaaagagattgtttaagaaatactgtaattggggagggaattatagtgtaaggattatgcaaaaaaaaaatgaagtaaaagggaattacaagtgggaaaagttacaaaggaaattagtatgttccttgaggttcagggaatctatgtatatttcagatcatggttgcattttcagtcttctgtttttcatggttgatgagttcatcaagtccttccatcttttggagtcatttctattcaccattcaaggatctatctaaaatgtataattatgtctccccgtaccattccctcccttcatatctttagtttaaccagtttcggtaaacacaggaatttgagcatcacctgtcacatagaagacaggtgatgtgtattgaacttatgttacactttctttgaggaataagaatttcctcacatttcctaagaatactcaggatcaagtataagtttaggaatcttggactttcttatttgatcctgaactcaaatttatagcccagaaattttggtggctaagtgggtcaaaagattcctaggcaaaccttaaagaagacccttggactagccaaagcatttgtttagaatattgtttagtaaagacaaacaaaaatttgttaggaatccagagctgctttcaatcatccaagtatttattattttcagtaatggtttcaagtaaatggtttagagccacacttgctagaactaagcaattgcaatgcttggctttttctgacatgttttatgatcagtgtttatatctataactaattgacaaaatgccagtgtttgtgttctttaagatacattcaccattgagaaagaaattaaaatggtttctgagaagaattttaaaaagtacagactatacaagtatggaaagaaaacattcttttgtcttaacacatttctaaaaggagagtatgtgtgtatataaaagccatggaaccatacttactgaacttgaaatagttttgcaaatttccatggcaaatgggatttatattgcttgaacatttttttgtttttactccttttctcatttcacaaactttgccagttcccaaagatttgcttggaaactcactgtgctaataggcaaagttggcctttcttgtgcttctcttaaactagcccttcctgaaacactgaccttttagtttaataacagttttatttgagaaaatgttcagatcctgggagctgaaaagagtgttttcagaaaggccattttaaatagtggtctccaaatgctgtatctttttccctcatgcactttgggtcagacctatcagaagaaatacagtattgctttatgtattctattgatttaaaaacaaataccatgaagcttagatgtgctcagaacccattacctcactggtttattttcctggctgtgctttgatttgctattttagatttcaaactctttatgctaggtcatgtttttattttctgttattttaacttctcatttgtagctaaggtaattactttttcagttgtgaccttggacttgacccaaaagttgtgattttttttttttttccttttctggaaataggtagggcattagaaagatagctgtgctttggctcctttatggaccaaaagtgatgtcaaccagctggtcacttggacatgtctttttcagtggccatgggagtgttcctgtccctttcattgctgttgttgtcctcttcccacgtttttctctcctctcatggcctacctggacgatgccacctgtaatctgtatctctttctcacctcaccccacagcaagtggcagggctgatgatagtagggagaaggggatagagaaggaaacagcaagcctccagtctgcattttcttcaccccaaaccacttcctctccacattctcacctggatggcttcgtgcctatccacccagctggtcaccgtttgatcacactggaataaacagctcgctgctgatttgagcttttcctctggtaggaagacatccctatgttataggcataaagtgcactatgaagatatgacattgtgccaagtgaaataagccagacacagaaagacaaatactgtatgttcttacctatatgtggaatctaaaaaagttgagctctaggaagcagagtaaaagagtgattaccaggggatgtgggatggggaaatagggagatgttgatcaaagagtacaagctttcagttataagatggtgactttagttaataatattttttacttgaaatttcataagagaacaaattttaagtgtccccaatgttccccaccccaatggtaactgtgtggtgctcgatatatttgtggtaatcattacatgattcatatcaaatcatcacatagttcaccttgaatatatatgattctatttgtcaattataccttaataaagctggaaaaaccaaactgcttaatctcttttctgttgcttataacagaatacgtaaaactgggtaatttataaggaaaagaaatttgttacttaatgttatggaggctttgaagtccaaggttgaagggctgcatatggtgtgggtcttcttactggtggggactcctgtagaatccctaggtcatgcggggcatcacgtggtgaggggctcagtatgctagtccagctctctcttctttttcttttcttttctttttttttttttttgtgagatggagtcttactctgtcgcccaggccggagtgcagtgatgtgatcttggctcactgcaacctccgcctcccgagttcaagcgattctcctgcctcagcctcctgagtagctgggattgcaggtgtgcaccaccatgtctggctaatttttgtatttgtagtagagacagggtttcaccatgttggtcaggctggtctcaaactcctgacctcgtgatctgcccacctcagcctctcagagtgttgggattataggcgtgagccaccgcacctggccttctttttctttttaaggtaccagtcccactatcatgataaaccattaatccatgcatggattaacccattcatgaaccctcatgtcccagtctcacctcttaagggccccacctctcaatactgccacagtgggaattaagtttcaatgtgagttttgaaggggagaaacattcaagccataagcacaaacagacaaaaaacccaagacaacaataagaaagatgtgatacaattttattagtttacttagaacactgatcccagtgcatcatagttactctctgaggttttacagaagcctagttttaattgaattaaattaaattgaattttgattgagaatcctgttgaattttgcctgagaagtatcttgctgttgtaacttgaagtaatctaggagaggcagcatgattttacatataccatttgactgtgagttgatactaactggtatgatcaatcatactaattatgttaaatatttgtttcagtttttgctacaaatggagctactggttgtatgcaacttgaaaaattttagtgtcaggttgttttacttttttatgagaagtagatgaaagtatgaaaatcattaccttgtgaagtctatagtctagaatttcatagctaacaggtgtacccatatgtcatatttttaggtggggaaactaaaattcagttagattaactgatttatccaaaatttggctagttgaaaagcagactatttggactttttgtggagctcttactgcctgaaatttctctgcttttatttggatcgtttaaaaatctttcatactttcataaagagctctaatacttgcctgaatgcaaacagaattctgttctaggggtttcctaagttttgtttgaccccttcaaagtagaggcttatatttttctcatgctatatagactatgaagtaggagagaggcaaaacagaagcatagtatacagttggaagggtccctaaacacccatttgagaaaaggttgttctcttgctgcccagagaggttaatacctttcccaaagttcccctagattgttgatggccatggtgggattagacattaaatagtttttcctctattccctgattccctgtatagtgttctttttattcttttctttcctcttcctctccccccctccctccctccctcccttccttccttctcttcatttctttctttctccctctctctctctttctctctctctctctctctctcttacaacttattaaggtacatttagcatatcataatattcatccattcagagtgtgcagttcagtggtttatagtatatttatagagttgtgcaaccatcacacaatctagttttagaatattttcgtctgggcatggtggctcatgcctgtaatcccagcactttgggtggtcgaggtggacagatcacctgaggtcaggagttcgagaccagcctggccaacatggtgaaatcccgtctctaccaaaaataacacaaattagctgggcatggtggcgcatgcctgtaatcccagctactcgggaggctgaggcaggagaatcacttgaacccaggaggcggaggttgcagtgagccaagatcacggcactgcactccaacctgggcaacagagcaagactcagtctcaaaaaaaaaaaaaagaatattttcaatatcttaaaaagaaattccataattccatacccattagctgtcattctctattttctgctttctcctactgcagggaactactaatctactttctgtgtctatggacttttctattctggacatttcacatgaatggatgtagcaggtgacctttcatgtctgacttctttcccttagcgtagtgttttcaagattcatcatgttgtagcatgtatcagtagttcattaatttttatggctgaataatattatatcgaatggatataccacattttgtttgtccattcatcagttgctaggcacttaggttgtgtttagctttgggatgttgtgaataatgtcactgtaaatactcatgtatgagtttttgtatagacatgttttcaaattttcttgagtatatatagtacctaaaattagaattgctgggttatatggtaactctttagcattttgagaaattgccaaactgttttccacagtggctgagccattttgcattcccacaagcaatgtgtgagggttccaatttctttacatcttcaccaacacttgttattgtttgtcttttttattatggtgggtttgaaatggcatatcattatgattttgatttgcattttcctaatgactaatgctgttgaacaactttttatgtacttattggctatttgtatatcttctttggagaaatacctatttatagcctttgcccattttaattgagttgtctttttattatttgtctgtaagagttctttatatattgtatatcctatatacgtgcatactctggatacgagtcccttgtcagctaatgacttgcagatattttctcccattctgagggctttttagctttttgatggtatcactggatgctgctgttgcagtctgatagtcctcaactaagggaagtcatccttctgatctttcatgtatcttctttgtgattgcctcatgccaatgaaatatttgaaagggcttttgcatatcctattgtaaataatatttttgcatatgctgtgggactaagcatttataatgtcgaggttatcgaaagagacactgctgtctagttttccatctgataggctcaactatttgaaataaaacttaggtcctggccaggcgtggtggcttacgcctgtaatcccagcactttgggaggccaaggtgggcggatcatgaggtcaggagattgagaccatcctggctaacatgatgaaacgccatctctactaaaaatacaaaaaattagctaggtgtggtggcacatgtctgtaatcccagctactcgagaggctgaggcaggagaattgcttgaacccaggaggcggaggtcacagtgagctaagatcgtgccactgcactgcagcctgggcaacagagcgagactctgtctcaacaaacaaacaaagagaaaaaaaccaaaaaagaccttaggttctgtggatattcctagatcctcctaagtgcttctggtgctttcttgttcgtaattttgggtagtaggtctgtagtgaagaggagttagtctttgtttatttcttgtggaagcctcttaaagacgtgtgtgaaatttgtccattttatttaccatcatagctgtaagaaactttacaaaacataccacacacagtcttctaattggaaagaccagatgtttcaaatccagtcaccaggtatttagaaagctccagctgtgttatcagcactcttctctgtctctctccagttgctggcacttgaatttgaatgacatgtattccaaaaaatagggtttcaaaattttcataaatgacaaatggcttttttcataaataatggaaaaatgaatgtaactataaatgatttgctctttgtagtacatgattttgttagttgtttaattattgaaatgagaagatttttttttgtcattttcttctccaaagtccctttcttacagcgtctcctctccttacacaccgttgtcagactttaatgttaggacatcatcttaaagaattggtccttactgactcagtccccactgtacagtaagcagttccttgagtttgttataaattttggcaggagtggaaatctaggtcactagggaactcttgattaaattactcctgaagtgcactaattggccttttccacagtgcttgagaagttccaaggagacgctggccacttggcagaactttgcctgttcaaatctagtctcagccgggctttcctgagtattttcttgcttttatttttaagaagtcacctattttatctccttctgctctttatcgattctagtttctgatgaagaattgaaaagaagagtagctgaggagctggcattggagcaagccaagaaagaatccgaagatcagaaacggtgagttttgtggtatcagagagaggttttggtgggttttgtcatatttaccagtatttttagagaagaatgattgtgataagtctcattatttgtgtatgactgaacttcagaatgtgctgaacacatgaacttggccattttcggttttagattgtgcctcttagagccttgggttacctgcttcccaaagctgactgtgaattaccattatatctcttgtattggttgcttgaatattgagccgtgttttctcaatatgtgagaaggagtttttgagtattctccaggaatttcccagtcgatcagcaaatgtatgcatcattgaaaattatattgcctgccacaggcactaaagtaaatattttggctcatgatgaatatcgtgtgtgatacatagtgcccggattaacaaatagcactaattattattctgttcacgtaaaaaaattaggatgttacagacataagtaaggttggaaataaaaatcctgtttccatcctctgaagttaaccactttttaacattttattgctcgagattttttcctctgcacacacttccatctgattgttgccattattaatactactaacaacagctaaaagaatgttcattgaagtgtttttgtaacagtagaaaattggaagcaatccaaaccgaccatcctcgaggactggctgaattaattatggtacatgcctgcaatggaacactagaccatcagttatagccctgtgtgctgattcaaaaagatgttgacgagctatccactgaaaaaaacaccatgaaaggattttaaaaaagcattttttttaaatactactttttgaagttttagagtaggtacttattcataaaaagatgggaaaacattttaatctaagataaagtgcttcccatctgtactatttctggagtttgcacatagcttagagaattatgattacatgatcatgtgaatgtctttttactgtgagcaccaaacacatgcttgccactgagcaggtgcttagtttgtatttgttttgttttgaactgcccaactattttgcttgagagatctagaggtaaggaatctttgaattggattgtagtcctcactggccataggaccttcaccatataatttaacctctttgagccttaagtatttcatctttaaaatgagggttgtgaaaaattattatttaatatttcttttgacaaactaactcccaatttacacaaaatatacagaacagaatatgaattttagattaagactgctattttcttaggaaatagagaaggcttatgacttacaatttaaaaaatcaagatttaattagtactgccagaaaggtctctgtatatttccacagtttcccatgcagtgctttataattatttaattgggttaggttgatagactatataattagatagtgaagtttaaatattccaaaaaaattcagaatcaatttttaaaaaaagagaatcaatatgttatggtagaatttcttgtctttgaaattttgttatttttaattgagttttattttaataggggttttttggttagattctcatatttagtttgcttattatatttcacataggatttttttttttttttttggtcttcccttctctccatatggtgcaggctttttgttaaaataactcactgtgggttttttttttttcttcttcttcattattcagcttccatttgctctgccttggctcatgaaagggaaagggcagatgagatgaataaaaggtgccagtgaaagccaatttcatatctcaggtggaatggggtgggcagcctagctgtaacctggacaaatgactattgataaagaatttattttctgtcacctttaaggagagcagagggtggtacagcctttgtattattttttcttttttaaaaaaagttttgtttgaagcctccttcatgaaaacttcagctgtcaaatcttggcaaaaaatgtgtgttcatctatatgatagttcttaggagaatcaatagctatatttttctttctttttttctaccagagaagaaacttcagaaacagcattaagaaagttttgtgtgcagtcttttagcagcaactttttggagtcacagaacatgtatacgttattgtatgtattgcctgaattgaatcgagatttataggcagttttagaaaatagctcctcttgcctttgtactgttactcatatggtatataccctgcgtgccaagttttctcttttccctccaaatgcacacaaacctgttgaccagttctcaagcacttcatagctggacatacgcatctacgtacgtacattttgaagaaacttgttcgagaaggactttgtaattaatttcgattgtgatatttttctttatagaatatctattatcattgtaaccctttttaaatggaaattttttgtttgttttttgtttttttttgagatggagtctcgctctgtcacccaggctggagtacagtggtgtgatctcagctcactgcaacctccacctctggggttcaagcaattctcctgcctcagcctcccgagtagctgggattacaggcgcccgccaccacacccggctgatttttttgtatttttagtagagacggggtttcaccatattggccaggctggtcttgaacttctgaccttgtgatccacctgccttagcctcccaaagtgctgggattacaggcatgagccaccgtgcctggcatttaaatggaaattttaaagctccatgaaaaatatagtatagtgaatccccatatcccatgacacagttgtaacaattcttgtttcatccacatatctagtcactctacatatgtggtgagtggtgaggaaaagtagtacaattttaaacaggttggtgaattttatggcagggaaatattccaaaatgtcttctatcagcatagttgaaataagtactttgtttcagttagatttatttagttggaagactgaaatttaactccgattagcttagaaagcaaggaaatttttaggagcataaaggatatatagctcaaaagaaacaaatggaagacttagaaaaccattagcaaggggagaactggatgtttctaaaactgtgtgtggtgaggaaatagttccccagcaggaaatcatgatgagcattccataaggagggggaacggatgccgggtggctgaatttctttgcatgcccctgattttaagattttagtgtatttggtgtaccctatgaaatatattgctgcaagttttaacacaatactttatctcttagaattttcttattgaaacaattcattaacactaattttgaatttttgaaaacatatgtatattcataagaaggaaaaagtaggcaaaataaattgattaaggcagtggttctcagctgggagagcatttgatccccagggggcatttgacaatgtttggagatatttttggttgttaaaatttgtcaaatgttattggcatctagtggatggaggccagggatgctgtttaacattctgtaatgcacgtgacagtcctcacctcctgctgcccgccggcccccctcttatccgttctccccccaccaaaaaagaattatttggctcaaaatgtcagttgtaccaatagtgagaaacccagggctaaggtattcttcaaaccagcccacattggatttaattgttctggatcacttttggactcagggtttgatgtctttgtttttccacacaatatcatattctatgccgtcaaaacctcggtgacacaacattccttaaaagattgctccactcttattcctggaatttttccgagctgctgacagcagttctgcaaattttgatgcttctgtgcaagcaatgacaacagcagcaggactgccgcctggcagatagcaattttcagatgcttttaggtttgtgaaaacgtggaaaaatatgcatcctagaattgataaaatgcagtccatgtacacttcagaccataaaatttgtcagctcggaatgacttcttgaatgtcttactttaccttctacttaatgcagaagccctttttaggcatctgtgactggtagggccacatgcttttagattccattcaaaatcatcgaaactgatgatatttcattaggtcatctaaaatttaccccaaccccattaaatctccactcctaaatctaatgcagacctgccatacttaaaagttgccttagaggaggtttcttactaaggccacagtgacaatacagttgctaattattagcatgatgactatatatattttcatttttacaaaacatttacatatggactcccaattcattttgtcttagatttatcctgttttatggggatcttaagtgatttgcttccacaatcatgtcccgcacaaatcgctgatagattagtgcacacacgaaaatttttgggtctaatttgaaatcatggttttgcttatcaaaacatctagtagacagaatagttgctcagcgtaccgagaatccagagtaaatgcctctgtcggcagtctgtttttgctgtgatactcaatggtgtgtttggattatagctgaccatattgtgttgtaactgtgtaggccaatatagcaaggacataatatgctacagtttgagtatagactttaaaaatatgatttacttctcctctgtgccctacctccaaaagtcagtctttgacagctagaaaaatgtgactacttctgacctctgacctttggcatttgaatttcacctctttacctataaaggcaagtgaaagtgtttcacttataataacatttttttttcaagaaaccaagaagaaagggaatggctgcttgatgttggaactaactgtacatcaaccaagattacttgctcgctatttttcaatggacattagttgagatttttcccgcacttttagttatttggaaagttacattagatttgtaagacttcaaataatctatctggtataatgagtggtttaataaattagtcataaattttatcagccatctgtgttagagtatagtgtagtccttttatttttccattgatagcattgttgatatcatcaaataagggcttaaaacttatttgtaccttttagtttctcatactaatggtgaaatttacagggatggtaccatctgtttaagttcattatatatgataatttatcttgatttttattattacatatgttctgcctttgaaaaaggcagcaagaaaaaggcaaaagaaaaagcagaaaaaaggaggagggaagagttctgaaacaaacaggagtttgtgggtagcatcatgtttaaaatacatgatacaagaaatcatgtggctgggcctggtggctcacgcctgcaatcccagcactttgggaggctgaggtgggcagatcacctgaggtcaggagtttgagaccagcctgaccaacatggtgaaaccccatctctactaaaaatacaaaattagctgggtgtggtggcacaagcctgtaatcccagctactcgggaggctgaggcacgagaatcgcttgaacccgggaggtggaggttgtggtgagccaagatcgcgccactgcactccagcctgggcaataagagcgaaactccgtctcaaaaaaaaaaaaaaaaaaaaaaaaaagagaaatcatgcacctagcatggtgcttttcacatagtaaagtctcacaagtatttgttcagttgaatgaatcactgggtctggaaaatcatgataaccttttttctagaaggtgcagttctatattatgtatgtgggcatatatctattctacattatattaaaataaaaacttaaattatctctttgaaattggctactgaccagagactatagatacttgtcttaaaaatctttcttttaatttagtatagtgttgaacacttgttttcctgtcatagacacaaattacacagttatgaaaattacataccttcaacctgcatgtaatttctaggtgtaagtaattaaaaaaacttttcagggaatcagtactattgataactaatattgatcaaggcttataaaggcatagttttgaaatgatcttatgagatcagttagcagtcagtatattctcaatgcagtcacaactgacacaggcaaatgaatttcacttgtaatttataaatagttgcaaagaaggttattgcagaaatttgagttgtagctcttcagcgacacacagctgatgtccaggtgtaacctataccatcctgctgtgatgtgagcatatttcccaggctcattaggcttcactggaggtagtagatggtttgttggcattatttccaaaatattcctttatatactccaacatttaagagatccttctgtagtataaaagtcccactattttagattatttttttattaatcatatttttgctgtttttttaaatgctttattgcattgctgttgttttatactcatacttttccatttgattctgcttaacaattgataaaaagacctaaccagttctgaatgtagtaggaacacgtcctagccacccagtatttttcactggaaggtgattggaagtgctgtgtctgtactaggtattggaatcttgtgccatctgctactttcattgtttttcttcaggtggcagttttctatttttaatagccaactgcttttttataaccaacagtgatagaagtttggattttctagctctgttttattcttattgttttatttcttttttcaaatccaattttctttcctactgatgctacactgttgtaaatcctgtttgagaagatatttttacatgttaatatcaaacctggaaaaccagagtcaatcaagcgtgccatagacatctaacttttttactggttataatagcagcagtgatgtttgaccacttcttgttcacatgtttcttttgacagtaattacagtgttttctctcgtgaagtgcagtgtttgaagtcatttgtgccaaagtcaatttctgcatttggaagtttctaggaattggtttctcagtgttatatagctgtaatagtcttgtcgaagtgtctccattactttttggtctggggatgtggagttttaatgtactcagtcatttattattccttgcataaaagattaatgtttattgtcagtattatcactgatttataaaaacagatgactgagttagacacaggtaatgtttttcagttagcagaactagattagaattggcctgccgcattgctctacctagtctgttgctgaagtgatagaatcatataggctgtcatcattacataaacatttttcaaagggagtgcaacatggaacccaaagtaaagctgatttaagtgctgtctggttaaagctaggactagggacttagagctgtgtcagcctattttcttctttttccttcctaaagacccaggcccttgtgctaactggggctttcttcaagaaaactttggtcaaggtcattttctcgcaaatttggacactttgtgtttgaggagtgtactttccttacccaaatagcatttgttggatagactcgattctgtttctgttttaaaaggtgggtggacagtggcctgttgtccatttccttaatccggaagtccgtgtttatgggcagtggtccacataggctggacctagccctggctgtttcttagtcctgggccttctggaagccatctgttgatcctgttggtaatgctgtgttaggaacactggagaagagtgtgaggtccttctgtgcaggatctggaaatactggagaatattcagagagagtccctgtttcccctcctgacctccatagctttgccaatatagcctcgagctaaaaaggaatgtgggcaacacagttgtaaatcaaatgtaaattttctctccagattataatacttccaaacattggcaccgtttcctgttcaaataataaccttacccccttcttttcttggttggagcaaactgttaaacaggagtagcccatcttaaatttctgtttgatactttagtgagagaaccacattcttttgtatcccattcttattcagaagcagttgtcatttgtctttgaaaactttcctcacagttttatacagacacatacatagaacatgcacactggagtcacatataatctgtgaaaacgatttcagagcataggatccatatgcccaactacaatgtacccacattaacaaacacaggggtcatctcttacttactgtgtgctaagcactgttctaagcattttatgtattttcattcatttcaactatataacacccctactgggtaggcattactgttatcctcattttataaatgaggaaacagagagggtaagaaacttaccaagttatatggtttggttctatgtccccacccacatctcatgttgaaatataatccccagtgctggaagtggggcctgtaggaggtgattggatcatgggtgtggtttctaatggtttagcaccatcctcctaaggctgttcttgtgatagatttctcatgagatctggttgtttaaaagtgtgtgacagtccctctccctctttctcttttcctccttctctggccataaaagatgtgcctacttcatcttgcccttctgccataattgaaagtttcctgaggcctcccaaaatgctgccatgcttcctgtacagcctgtagaaccgtgagctaattaaacgccttttctttataaattacacagtctcagatatttctttatagtgatgcaagaacagactaatacaccaaggtcatatctatcaagtaagtggtggggctcggatttgaatccaagtctgcatttaaacaccctacagtattactttctgtgtggacagggaataccttctttaaagtctttcatttacaattgtgggaagaagtatcaaacagttacttggattttctcttataaacctttagtaaataacaggtctcttaggtctcttaaaaatgacctctgttttgtgctactggttattagatctagatagctactctgtacagtatttaaaaaaattcttttatcttaggcccaagctgtcttgagaacctgtctttacagttaatattctttttgttgtgtaggctatacctgacatttatttatttatttatttatttatttatttatttaatttttgagacgttgtctggctctgtcgcccaggttggagtgcagtggcacaatctaggctcactgcaacctccgcctcctgggttcaagtgattttcctacctcagcctcccaagtagctgggattacaggtgtgcgccaccacacccagctagttttttgtatttttaatagagacagggtttcgccatgttggacaggctggtctcaaactcctgacctcgagtgatccacctgcctcagcctccaaaagtgttgggattacaggcgtgagccactgtgcctggctctatacctgacttttaaatgcttgtttgtgcacattttcagtgacaatggcagtttaaatttctcatgagttcagttctcgttagcttaagattgggacatttttcttaatagtacagcggggagtatgtggaagcagctggtgccctgcctcatgaactttagagatgaggatctgctgctggtcagtgaggcacgtgtgtgctcactagcgatttcctgagttcagtagagcaaattgggcacctttcacggtgggggaatttgttaacttctttcttggagttaggaagcaataaagaagtgcaggaattactttaattaatgattgcagaggggaaaaatatttacgtttctctctatattcattcttagacttttttttttttaaaatggaagactggcttattctgttattttatatatttgtgttgcttgatatgctgggtttttggcttgtagtgtctgttgttagtatttatttgccttttgtatgatagtcagtcatcacatttagtctacaaacttagatgttttgaaatcaattaaaaacttagctgctgggacaatttgccgttggaactagaatattgaatttatctgtcaaaatattcagccacgatgggagcaattgttagttatatgctatttacaattgcttccttacatataaacaatctgaatccttgaggctgcaaccatttcatttgaaaggttttttttttttttttgagttatcccccaaacaattttagtgtgatttaggtgtcaggtataaagcattaaaacacagattaaccatgtaaatgtttcaattcttgatttaaattcaagtttcttcacaacttctcagaatggatcttttaaattccttgtttcttggtgccattttgtcaaggttgatttagattaaaacaaaaatctcataaaaatccataaattacagggcattttgacttcctgatggggttgttggattaaaaccaaatgataccaaaaaaagtaccccacaaagtcaactgaaaccactaatgtgacaagtgtctactagttaagaaacacttatgcaacagagtttctgcaattcttccattatttctaccgaaccaggtaggtttgacataggaaattcattccttaaacaactgaaaacatggatattgtgtttgtttctttaacaaaaaaaaagaaaattaccagggaaatacatacctataaaaggaattcagtaaatacagatgaatagttttctgtctccctcctttcccttattcttactccctacaaaatcatttatacattcttaccctagattatttatcattttgtttttttaaaacaaaatgagcatgttatataacgtgcttttttctactcagtcatatattgtgatctctcttcccatgtcagcatatatagattcaagtagaccgtctatctgataataaatgccatttaagaagactttgcctaagaaaagtaatattactactactaataatatgtaatagtaagtaatcatttgtaatagtaatagctaacagttttgaatacttcttttgtcctaagcactggtccaagccctttgcacatgtgattatttaaccttcatagcagccctatggggcaggttctgacctgctagtctcctcactttgtagatgaagtagctgaaacacagaggtcacttgcttatagccacatagccagaaagcagaggagctggaatttgaacgcaggcagtcggcatctgcagtcacccatacttaccatcactcgatcagactgtgtttcagaggctaaattattttctgatccagcagtaatgttacctattatatgtctgtctgaatgtttttttttttttttttttttgaggcggagtcttgctctgttgcccaggctggagtgcaggggtgtgatctcagcttactgcaacctctgcttcctgggttcaagcgattctcctgcctcagcctcccaagtagctgagattacaggcacccgacaccacatccagatgatttttgtatttttagtagagacggggtttcatcatgttggccaggctggtctcaaactcctgaccccaggtgatccacccaccttgacctcccaaagtggtgggattacaagcgttagacaccactcccagccctgaccttttgatgtcggttattgaaggtttggcctcccctcccctcccttcccctcccctctcttctcctcccctcccttcccctcccctctcttcccctcccctcccctcccctctcctccttttctttcttagttttgagacaggatttggctctgtcgcccatggtggagtgcagtggtgcaatctcagcccattgcaccctctgtctcccagactcaagccatcctctcaccttaacctcccgagtagctgggactacaggtgcatgccaccatgtctgcctaatttttgtatttttgttagaggcagggattcaccttgttgcccaggctggtctcgaactcttaggctcaagccatctgcctgccttggcttcccaaagtgttaggattacaggcgtgagccactgtgcctggcctgaagatttatgttttataggttttaccagtaaactatgccttaattatggagctcaataaataagaaatttagattgaaaagaatttcacaaatgaaaggactttttgtgttttgttttttaactcacatgactatgttttgaaataaaactgtcaaaatactgtcaaatggtgggtaaaaattaatattactgtagatttagctgtaataggttggaaattgtgcatttcattatgaatatatctgtcagctgtacaattcagtttttatagaattaaagaaaaggagcccaagtgggtttctataatttatgttatttagccctacataggtttgccttacatagtttgccttagaaaagctctctcctcaaactactgaaaatgtggataatgctagtctaacagaaaattgcgggtaacagaaagttgagggtaacatcaactttctgtaacccttatcaactttctgaggttgcagtgagccgagattgcgccattgcactccagcctgggtggcagagcaatattctgtctcaattaatcaatcaaccattcaataaatgtcaggcataaataaataaataagtaaatgtcagtgtttcttcgtaacagaaagaatattaactgtaaagacagattctcaagagagcttggtcctaagataaaataattttttaaagattttttattattgacgattccaaattcattcttcctgcctttatgtccctgttttcccatttccagtgaattggccctaatgtctctgcttttaaaatatattagaaatgaattacctctcacctttgccacccctgccttaggctaagccagtggttctcagctgctggagattttgctcccttccccatgggacttctggccatacctggagaccttttaggttgtcctaacattgggggtaccactggcatctgataggtagaggccagcaatgctgttaaacatcctacagtgcactggacagcccctctacaacaaagaattgttcagttcaaaatgttgatatagctccgaggccgagaaaccctggtgtaagccattaccatttctcatttgtagtattacaaagtcacctccattgggctattcttgtccgccacattctatttttcacaaagcagcattagttggctttaaaaaaatgcattttgaatcatgtcactttctttgcttaaaaccctctaatggcttcattaggtttagcataaagtccaagtccttttctctgaccttcaagtcctctacctattgttacacatttacaccctctgatacttggatctcctatgttaccaccctctcattgaacacttcggccacatcggctgccaaacctgtttgtgcctatagctccttgtccagaatatttgcacttcatattttgcatggctgactccctcttactatcacagtttttcccaaataaccctacagagaggatttccctggtcattttgtctaaaataactcttctttctttcctgttctctcatcctagctgtccttttcctgctttatgtttctttatagtattctttttctgtttcttgtctgtctcctgcactggaatataaaagtttatgagggctgggcatgcctgtaatcccagcactttgggaggccgaggcgggcggatcacctgaggtcaggagttcaagaccagcctggccaacatgacgaaaccctatgtctactaaaaatacaaaaattagccaggtatggtggcaggcatccgtagtcccagctactcaggaggctgaggcacgagaatcacttgaacctgggagccagaggttgtagtaagccgagatcacgccactgcactttagcctgggtgacaagagtgagaccctgtctcaaaataaaagaaagtctatgagggcaaaattcattgtctgtcatatagtaggtaccaaaaagggattttatattaaattacgataatattttactgttgtggctaaatacattaaaatgggatagaatttgtccaaaagtcaaaagagacaggagaatcatcatatgacaatagcaactgccatttaatgattgtccactgtgtactgtgcgctgtgcatatatttgtatatattagctctgaactccccgagagccctctgatgaagcctgctttggcctgtattgtggcctataagatgatgctcctcatattcccctccaggatccaaggctaggtgacccccactctgccatcaaactgaggagcaattggatgtggtagctctgctttctacaggtttattttacaaaagtagcttggagtgggcaactaccttgacctgacaacaggcagcatcaggttcaaatccagttctcttttactccaagcccgttcccaacatttcagattttcatagtgtttaggaagtgactgtgattcatgtcttcctgttgagtaggcttaattggcttcattttctgatatgaggactgcattataactccaggagcagtgtttttttggtttcaggtcctgtcctgagacagttgctcagtttccttcatttttaatgagcattgtctaaaagtggaaacttgacagtatatgaatatcatctaagctttcagagtatttttattgttggctaacaacataatcaaaatttgaaacgacatgaacaacatgtactatagtttgcacttacattttacatgagactgaaccagagcgtatgttgtgtaagtctttaagccttgtctgttgggacagaagtcaagaagtctcttgtgtctctgagcatatacttttgccctcatgaaccctgtcaaagggattccagatgtcctttgaacatttggtgccttagattcaagaggtgcatggcgtaacatggatttgtatcttgaaacattgcattctttccctggtttcgtgacagagttttttttttttttgtcgtaacctgagagatcatctcttctctcctcgtgcccccctcagcctccctggcttctgggaatcagggctctctccaggcaccagagaaggcaaaagcccagagcttcctgggatggcaaattgttctgagtttcagtgtgttcctgtacttttttttttttttttttttttgagacagagtctcgcactgtcacccaggctggagtgcagtggcgcgatcttggctcactgcaacctctgcctcctgggttcaagcgattctcctgcctcagcctcccgattagctgggcttacaggtgcacaccaccgtgcctggccaatttctgtgttttttaatagagatggggtgtcacatgttggccaggctggtctcaagctcctggcctcaggtgatccacctgccttggcctcccaaagtgctgggattacaggtgtgagccaccgtggccagcccttgtgcgttttgagttgaagattatctcttgcttcttggcctcttgtatctgtcctcccactgactacctttgtgttctggtttttgttgttgttgttttttttttttttggtcttttttgttttttcatttgccagcagcttgtcataggaatgacacatactcagcagagtcagctttagacagctttttgcagacaagaacaacaaattcaccagtcagggaacaaagtgagagaaaaatgaagaacaatattagaaaagaatcctttgggaagctgcacaaaaaatgttatattaaaatcaataccagggcttgaccttttgtggtagtgtatattttaaagcctcctattgattctcttttaataacatgtttattctagtttactgacataagcctacagagaatacaaaaagaaaagatcaaattctttattacggtggtcatttaaatttgtctcagacatttcatatggctaatgttatatatgtatgtatgtaacatattcttatgcattgtaagactttgagatgttatgaaggtggcaaaggggatttttatttttgttggaaatactcttggccttgctgtgacatataaatatatctccttccttcaccatgaaattgctttttttttcttttttttttttcttttctgcatgtgtgtagaatacagaaaagtctcattttgattgttttttttttcttctcttaaaaaccatcgatagcttaatctgccgagtctgggaacatttggtgacagttctatgcataaagacagctgtcttttactgtataactaatggcaaaatgtcgaagaataggaaatcttcttacttgatccctttgatcactcaatcttgtaatttcaaagacagaaatatttattgcttttcacagtgtggggccatgcacatttcacttaggaagatagtcatcttaagggtgttgtccagtcatgaattggttgcactattcttatctcctcaggtttttttccattaggaaagaaacagaatcaattttcttacttcattcagatgatttcccccaacataacagatattaagaggtatccagaataacaggaaggacttgagagacatacctggaaaggttatcctgtaaatggcaaattaaatgagattcaacctgtagaacatcttgttaataggcttggggagaaataggatgctcggatctaattcatggttttaatataatagtcctgttgtttatgggacatataatatcagatgttgagaagccagagagtaattccaggaaggctgtaatgaattagaggacattttcaaagggcaagtaaattaatcaggaagctaaaaatcagaaagttgggacacgtgtattgtagcatgggaggagacagggaggctcagcagagatgtagcagggcatccctaaggaggtccagagagtggctagtttctctctacccttgtgtctttaaatgttggagggacctggagtgagcagccgtagtgatgatactgctgccattctgcacactgctggtgcggggccagccattccgttaggattggtttctggacactgacctgcttgctagggtctcaaaaggtgagtgtcagaaaagctagcttataagtaaaggtaaaattcaaataaaactaagatttaaaactgtccaacttagaagtcagtttaactaatcccatggtagaattgagttatggtatatgtccaaaaagagactgagaacgagacaataactaaagacatgggcacaatcaagtgggtctctcctaggtctgcccctgcttgcttctctctcttaccttgtgccattgtcaattctttattagcctggtctgctcttctgtgttttatcattaccccacctgtaacagcttcctagtacctatcaatatagatcaaagtgaaaatcacaaggcacatgatagtaataagtatttttttctagttacaaaaataactcacactgtttagaaaattagagaaatgcagccaaacaaagttaagaaaatgaaaatcatctataatctcactattcacacaaaaccacggtaaatattttggtacacaggcttatacacacaggagaaaaaaaataacaagtggtattatagtgtccttactatttttatgagctgctttatttttgctcataatatatcataaaaatatgttgtcagtacatatataaataacttaattgtagttcactattagacatttacggttccaaataaatggttcagaatgtttcacttttatgaacactctgcattggatatccttattattaaatttacacatatccagtgttatttccttagggtaaatccctagaaatggaattactaggtcaaaggttatactaaatattattattgtcaaattgccctcaagaaattgtgttacttaattcaccaccagtatgaatccttgtttttttctcactgttgcaaactttgggaacatagtagttaaaccagtgttgtgttatgcccatatgaccatggttgctcgtatctgtttatttggctagtattttcattaattttatttatttatttatttatttatttatgagacggagtcttgctctgttgcccaggctggagtgcagcggcgcgatctcagctcactgcaacctctaccttcccaggttcaagggattcttgtgcctcaggctcccaagtagctgggattacaggtgtgtgccaccatgcctggctaatttttgtatttttagtagagacagggtttcatcatgttggtcaggctggtctctaactctggacctcaggtgatctgcctgccttggccttgcaaactgctgggattacaggcgtgagccactgcgcccggcctattttcatttattttagatgggtggttactagtgggatggaatagtctttttgtgttagtactatgggagtttagatactttaattcttgccagatcattttaggttaatgttaagttaatatagtttaagaaatctgtaacttaataatgttctttgttagttgtctgtacatacaaaatcctgtcactgagacctatatgtagctggcgagatacaacagatatgcaataggtgagatatgatatagctgggaatactctaattgccctggagtggactcagtatttctaaaattgccacagcagatctggcgtaaatgtgatttagttaactggtgagtattacaccttatctataaatgtataattgtgccataagatcaaatgtcacagaagaaataaaacagctttgtgacatttctagctttataagtaaaacaataccctctatatagtagatactaaataaatacttgttgattattgaatttgaccattccttcatttttttgaaggataacttgatgtttgccttttgcttgttacatacaaaaaaaggaaaatcaaataactttgtagattgaaatgaaaactccatgagaagcgaaaatcagtgactgagctttgggcttaaaaaattatatagcgtatacttttgtgatttttgtttcttgattctgtatgctgacctgattttcaaattcctttttaaaaatgagcacattaaacaaaatgaatgttgatcttaattctgagaaaataagtaaatatggttgttggatcttttcttgatcccacactaataagagatgcataggtctagttccttgttcaggttcaccctcgagtgaggatgagcctagagagacacatgcgcttcacccttaaaccacatatgctgacttaatataatgaatacacctaagtggtttagagatggaagagattttaggtttgttttttgtttgtttgataacaaaaataacccagaattgggaatcagaagaccagagtctggtcctgcctctctgcttattaactgagcagagattaatcacagtttctttaagctcagttttttcatatttaaaaatggaaacaattttaaaagcactaaatactgcttctattctacttttttgtaaagatcaatatattgaaataatatattgaaattgcattgaacccatgtacttttataatgtatttttaataacaaaaataagaatgattattattaccataaatacttctactataatctttggaataaactccctcattattacaaatatgacagcagtggtttgatacaaatgttaaatcagcagcatcccaaacacacatttttttcagtttgccgtgccatggtaatcaggtcactgaactcaaataaaatgtaccaacatttgaaaattgtcttcattgcaaagtgttatgttatttaaaaaagtttgcccactctccttgcctactgcagtttccccttcacattgcctttctcctctcttatctttcatctgctacttaattgtttcagtgtctttagttagtgtcctgttctcattctctttggatatacaacttctgggcttaagtggtcctcctgctctggcctctcagaaagctgagtttctaccatggcattagttaacctgacctctaggctagatggttttaaatccctcttgtatttgaattttacctttacttacaagctagctgtgctgtcacttaccttttgcttttacagctcacctttgcagtcagtcctatcttttgtgaactctgaagccactctggtatgctcctccttagatagatgactgataagatatatggaaaaactgatggatctggttttgttttggtaattcttacccaggtacacattaattctcatattaaatctttaaggcctgctgggtgtagtggctcatgcctgtaatcccagcactttgggaggctgaggcaggcagatcacctgaggtcaggagttaaagaccaacctggccaatatggtgaaaccccgtctctactgaaaaacaaaaacaaaaacaaaaattagctgggtatggtggcgggcaccagtaatcccagctacttgggaggctgaggcaggagaatcgctccacggcggaggttgcagtgaaccgagattgcgccattgtactgcagcctgggtgacaagagcaaaactccgtctcaaaaaaaaaaaaatctttaagatatctttcaggttcaaaattctaagtgttgactttctaatggaaattattttcatcaggaccctttgaagttttaaaaagggttaatgttagggttaaattgatttataaagatgatgtcatatgtttcttttcaaggtatttttatcctccgtgtatttttatctcagcagctatgtttgtagtaatagaacaggtgggttaggaagtagccagtgaaaggtggcagatcactttgggcaagagcttgagtcagcattgggcctcggcaagtgtaaaacagaagactgtgtaaatttgaacatggcaactgtaaattgcaatgcattgtcatagtaagaaaaaagaagtaaaattggtatttacagccaaatggtgcttttccactgtcacatatgatggacagtgacaaaattatcatctcagctatcacacttttgagtcatgccagatctttaagttttctgtgtctcatacagataaaaataaaggcttgattgtggcatttgttattcttgtttgcttttaaaactagttgtctatcttcttgtcttctcctgggattgaccccaaacccagaaaggttaatttactattggaagcccatttttacagcacacaggcctcaatttattttaagagcatgtttgccaactctgtgctgctttagccctgtaaacatgagtcttaagggaatttttaagaattggcaatagtggagtttcacattctgctagcagtcttctgcaagtcgtgtttcacattgtctctgaaacatttatctgagacactgccttctgaggttcatcttgattaattatatatatgtatatagatccttaatgctttcaggatttatttttcataaactatccgaattgacctccttggctgcttacattgttttccaccccatttccttcctcataggcatgtatacatactgcaactcctagacattcaaatacatgttttatttttcaataacttgggcatttcatttcaccctggaaaatgtaatcaaactacataacagtgtcattcattttcatttttatttttgctcaattgctatttaaaccaatggaaagttagtatcattgcaacatttactgtaatatgagtgtattgtatatgaaggtttcaggaggtggtcattattgtgtgacattaaatggaagagcaattttagtaagggttctatagatatttgataagaaaaagaatttgtaaatgtgttactatttaaatatactcccactctgagttaattctattaagggaagctaaaaatgaattacaaattgaagctatgttgtagcctcaaattgtctttttatatgagtgtttttttttttaacagtgcttaccttcacctaagttatctctataaggaatgctgtttgtaaactgttacgaactacaaataaaattatttttgtactatgaaagcctaattatcatggatttctaccattagcaaatatcaaacccacctaaatctcaggaaaaaacccaggggccaaaagttaatgtcttttggagttggagagatctgatttgaatgccagctttgtctcttagtaatctgtgatctcaagtcagtgatttacccttccaggcttcactttcttcagttaggaagccaagttaataagaatatctaccagataagcatgtttttcaaatgaagattaaataagataacatatataaagcacctggcacatattaaacttttgatacaaaatgcttattcttacagataactcttttctctctttgaagtgaagatcactagagtgtgatggttaagagtgtggtcctaggagtcagaccacttgggtttgaattccagcttcatgggttactagttctgagaccacttagtaaattacataacttcttgagggctcagatacctcctctgtcaggtggaggacaatgataactctagatgcctcatctgtaagatggaggacaataataactcttacctcagggttaccttcagcgttgttttgaggatcagatggttcattccaggtacagttcttagtacagcacagcgactcacacagaatcaaagtaaacgctctgtaaaaatgattatctatcgcatccatctgtgtattcattcatttcagagaatcgtttcctagttgtatagtgttaaaaatctgtctgctctcttctacatttgccctttttcattttttcttggctttatagtttctgaagattgtaaaagatctctttgttgatgaaaatggaagaaaaactagctaagtgaagctagatgagctttttctcttttgtaggagccattgctcctttctggaaagctatgccatgtgtaattccaaaagtgctaagtgagagaaataagaagactttttttcttatcagattaacaagtaattaaaaaaaacaacttagtttttagtttgaaaaatattccttttagttgacataagttttcactttgctattggtgctaaatggttgattgttgtatattgcttttttgcttgttcagataatcattttcaagggcttggaggccctctgtaaaaatccaaggatctctgcagctggaatgttgcagtgttagatgtgagagaaagggataacattgtgtttggcttttaaaaaagacattctgaaaggagatccggagggttagcagtacctgactctgctaatgtagttaatgccctgaaatgaaggtagtcagtggctttgcacacaaatatgtaattttaagaattctcatttatatgccagaaggtaacatgcaaggattgagggcattgaatagtaggttaaacacaggccttgcagagagaaattaaatcatttttggtgagggagatgccatctaaagctatgccttaataaagatcttagaaattaacagtcacacagctgtatgttatgaggcgagaactgatgagaagttgtaacatgtacctctgtattgctttgaagttttggaatagaaatacctaacttgtgcctagctatgattttgagacttactgtagctctgtgctgtcctatggtcacaggtgactattaaacacttgaagtgtggttggtccaaacagaaatatgctctaaagtgtataccaaattccagagactcagtgtgacaaatataacatctctttactagtttattgtattgattacatgttgataatattttggatgtattgggctaaataaaatacatggttaaaattaattcggcctgattctttttagttttctaatgtggcttctagatgtagtctgcattatatttgcattagtcagtgttgctctaatatatttaaacataagacaattgcatgaaagtgacaacatcacataagtgaaaaaagctaaatcccagtaccctatctcactccccaatggtaaccatcattaattttttttttgtgtccttgtagacatttttctggtattctcttcttcccttaagtacgttgtagattatagaataatcataaaagtcaccttaatttaatagagatttctggattgtgctcggtaaaaatgttctaaatgaacatctatatgcctttttgtctcagttactcatacttgagaaaagtctaattactgaatctgtgtacctttacagagataccactgttacctgataggattaggactggtgctcagcacgaatgatttttcattgaaattgtagcatcaattcttttaaatggtttaacagaagaaattgactctcaatgactctggtggcaattaaggtctcatattgaacgaagagtattacctgtcattggcaaatgtatcaagttttctgcagtgtaaatttttaagcagttttgtttctctttgtcactttttgaaataattgttgataaaattgctgatctgataaaagtgagataggtgaatttagtagcattatataatgtcatgatataaaaaaggaatgatactatatttgatggtaaaatccatctgattttttaaacataatgctttgtataatgttgtaagcacataataaatgctcaataaatactttaatcaatgcttaaaatatgtgatatcaaattgaataatagatcattgagtgtcactgacaatttccttttctaaattaagatactttgtgaactatcaaaatatgacattaatgaaagtttagacattagaaaatgtttaacccatgtatttgtgcttatttttaaatactttaatcaatgcttaaaacatgtaatatcaaattgaataatagatcattgtcactgacaatttccttttctaaattaagatactttgtgaactatcaaaatatgacattaatgaaagtttagacattagaaaatgtttaacccacatatttgtgcttattttcctcttttatagaaacagaataaggcaatatacaaagtgccatttccttttattataataaccataatggaaatttcagtaaagaaagtataactaaagcagtaccttcctgaaacattgtaggtgctcaataaacagacttttctttgttcctattggttaatgcttaaccaaaatgcttaacagtatcgttaattggattccacaataatcatttgacatagagtgtactattaaccatcttcatgtgagaaaaccaatggtttggagatgttacaatgctaaattcagtatgtggcaaaatagagtctaaaacccagatattctaactctagattatattttagtgattgttgaaatggccattgcgaactggaaatgcagataaatattggaaattgggccttattctttgaatagtgttgtttgttttgagacagggtctctctctgtatcccaggctggagtgcagtggtgatcatggtgcactgcggcctcaacctcctgggctcaagcatgaatagtgttttatttttaaaatgctaacattcctaacattccagttaggaacactttaaagtcctttcttcagagcactgtgattttgggtattagttaactgatttgtcagtaaatcctcttctccttgctgttttaatgctaatttttaagacaggattgtttgcaaatgagacaaatccaataatctgtgcagattacccattgatttgattaaattgactcattgaccaactttgctgtgtgatattttagattaggtacttcccttagtagaagatgtggagacaagtcattatttgatctgaacttgctactttattacagtttcatgcatttttaaaaacaggagtaatcaaaatgacatgttgatgtaactggcagagttgattcctaaatgcacttgaagctagactacccattgttattttttgcactaaccttattattattttttccacctttggcaaaacatgtgagcttctagtaattctaaaatttctgatgaatgacatttgataagtggtgtgatcctgtgaatactgataagcactcgaaattcagttggtgaagcatcaatttcacacctgagaccccagttccaagtttaggttaaaggtttgcctggcgtccgcagtctttttctcaggtcccttgataagtgcagtcattccaaaccacatttttcttctgcatcaaatccaggcagcactcggaatcattaaatattaaaacttatattcagaaacattattcattcataaatatttcattgcagcctaaactgcattgttcaaaacattttaggatgttatgcaactctgtcaaagtacattaacaaacttaagtcatgttgaactaagcaaaaaatgacagactgcatcacatacgtgttatagttgaatttttgtataggaagcattttgtgttgggatatttggaaattaccgtaaagataaaatggattgcagaggaagccagatataatgaatattcatcttctgtgtaacatctgctatacatcttaatgaaatttatagttatccctgaaatttttcttccttgacagtatttatttatttttaaaattattttaaccgggagttgaatatgagttgataccattctagctgcatataaaatgacagtattggatgcagggaccatttttcagatctccatgatagccatcatctccacagaattgaacttagacctcctgtgaaccatagagtaactgggaaacttttgatattcgcagagtgtaagagagtgatgagttcaagcattggtctctgacaaaatttgttctggattgctgtgaacacatttggtctcttgctgtttttttttttttttttttttttttttttacaaccctgttagttacagtgagaagccataaaattcttcctatgcaggaaaatggtagaagcattttttgtgtctaaaattgttctttcttaaaaagaaaagaaaagaatctttttctggtgtggtaacaaaaaattgaaatagcaaattcaaatagtagaaagtgtaaaaattcacaactgatgaggtgatagcatacttttttttggtacagtgacagtaatatagcttatgagctttatctgaagtaggtgaaatactgattatattttacttgagctatcattgacacaatggattagaacttaatgagggggaggtagtttgattttaaaacatccttgattacatagatttttttggaatggaggacagattaatcttcctgtgatatgtggatcaaaaactatataggcagccagtgggctcatcttgaacacctacagccgttctttcaaaaatgatagaaatggatattgtgaagtaaataatgaaggtggcatagtgaattcctgctggcagagagttaaattattcattttgttagtttagctaacatggttcatgctgcgtgggatttgagcactatgtcaatgactaatattgcataattaaaaagcctcagttcctcgggcttagaatgtagctggaatttagaaatggttgttaacatcgtggaaatatagttttatttgtataagtagatgctgtttacctagccgttttgaagttttgactttatgaaacatttgtgtagcatgtaggcagtatgccgaagatgtttttaacgatagttaatcttgcagtcccttccccttgctttgcgtcccaccccacggtgtttttcttcttgaaaggctgctctgtagtaaatggtccgtttcgaaagcctggtgagcacactccctcagcatcgcaccgctgcctcttccctttgcttatctcttccacattaggttgctgattagcgacagggcttggaaggattgccacttctgtaacgattcaatttgggggactgcataggcactgatacctttacaaagcaacgccgacattagtttattaccttctcaattttagcaactctgaagggaaagagacctaacataaacctcttttcatttttgtatgatataatcttacacacagtatttcatagtcagtcaattggactattttgttttatgcttcttcacggaatgtaattttacatgcatatttgtaactttgggataactttttagcactatttttgaagctcaggactctgtgaatggggaaaaacaaagagtggaaacacgttctgggtcacctggtagccacttgttgccttgtgatgtcaataactgcgtgtgcttttgcagttgctttagggccagttggatggcagagcacgtaacagtgccctgcataaaggtccacagaagggtgggcttcattaggggaaagaagaaagatgagacatgtacatcaatgtttgaatcagaacatggagcattttactttgagggtcttgagctaagcgtttcggttcacataatcaagatatagcatagtgactagctatttggtttttttaccataaatctagaatacacattccagcacatgttttcctatgtgattttgagtaatctattgaacttctctaagctgtggtttctttagctctgaatggggactaacaactactatgtgggatttttgtgtggagtaaatgaaataacatacataaaacacctgttaaaatgcctggcacaaggaggtacttcacaaatggtagctattataatattattggtagtggaatattatgcatagtttttagtttaaatggtataatttgtatgttaaaattgttaatactaaaaataaaaaaatgaatggagtgagaaaatgaaggagcacataggcctgatgccttttgttaggatgagttggaattgtatgttattgtagacaccttaagagcaagtcctaggttttacgctctgtctcctgccggccaattccgcagcttcacactatggcctgcacattagattcacaaaaagtgcttttaaatgcacttcaatttcaggttacttcatttgtttattgtttttgtcttggatgtgaattctgaatggtaattcttcttgaagtatgtctatgatttcacttttgagtcaaagatggaaaatatcaagtgaggatacagcatagtgcctacagctaacaatattgtattataggcttaaattttagaagggtggactatatattaagtggtcttaagggagcggaaggaaactctgggaggtgatggacttgttaatggccttgatagtagtgatggcttcatgggtgtttacttattcctagactcatcaagatgtgtacattaagtatgtgcagctttctgtatgtcaatcatacctcaataaaatggttttaaaaaaagaaaataccaagtaagggaatgaacaggagttatcctaaaatgacagtaaagaaaatcctactgaatttcacattttttctctttctatacatgtttctaccattttgaggtgaaaattaaaaaatctagtatactgcttagtgtggctttaaaatcaatgtatttgtttttgaatttttttagtgtgatttcatagggaatactagaaataaaacatctgtcaaggaatgaattttttgcagatgagtagtgtcagagaggcatgaaattgattgctgtgatctaaggagaatgcgctgtggagcaggcatggtgggtgctgatgttgtctgttggtctctctgtgtatgccaaggtgactttcaacagaaagatgagcttggtctaggggataaggccccttcaactcttggtatttcttttgaggttgtaaggagttgaggtaaaaaatatagggccatctttattcagaagtaagactgttggaaattgttttctaaggcctatgtttaactagctaataataacaattgttgtgattgtgttcaatgatataaaatttgattcttaagaggcgatttatccttttgctggagtgggtttcaagtagtttttcagaataaaattagttttgcagcatatattcctttggagaggggttgttctgttttctcatataacttcattagactcctagctttcaaaaacggatatcactcttccctcagattggctgacctttacagcaattggcggtgtctttctctaacatcatagaataggtgctggccatgaagtttaatcttgaacttacttctgtgtaatgtttactcaaagccatgctctgaaatataggcaatccatttatttcttgattgtctaagacctgtcttttcattatgtttgattattattagtgagctacaaaactggaccatgttgttctgtctctctatatcaaatttctcttatttgattgttttggtgttcacagttttcatcctacatatatagaaagacttcatatagtacttacagtgagtgggggagggggctatgttaaacctcaaggtgtctttttagaaaaatgtagcctatagtgaaaagatggtacaaggaaattatttccataggaactaatgtacagtgccccagattgccctatcttgcactttttacttattaactctgccctaaaattctttaagtaatcctttaatgttaaaacattaagatgaaatagacattttaaaaatggagaggattctgggagttggagacttgaagcatctctgcaccttctgctatcaatttcagtctcgccactagttgctgtttctcagaagcacatctgacgacagatgtgagccattgggctagttctggcaaagtgccgggatcaacagtgttggccccagtctctgtgactgttcctgagataaccttttggttttcatgtccctgtcaactggtttgggtgggtgagggatggggagagactttctccaggttttcttaagagggggctgcaaactcatcagctggtggcataccactgggcctcagcagcagaggctgcctcatctcccaccacttagtggatccttccacttaaggcagcccaacagtgggacctgagctctggtgcgtaggcagatgaaaaagaaggggtcatctatggggcacagtaggcggagagaaagagacaaatgagaacttagaagaggtgtgtcttggaagaactcttggaatagttcagtggtgctttgatgtttgtagcattgacaacgattactacttgattttaatacaccctcaattttaagttgcattttgatttcatagatagtgaagagtagaagaaagtaacttcatgcatgttatatttgatgaattagactaaattccagaaggagataaagggaagagtttgagaggaggtgataattatgtgatataaaacatttcactgagctgaagaaaactggagtctgcaaattgaaaggactctttattctaggaggcactgatgagaaaacatgcacacctagtcatagacagctaaaatttcagaactctaaggataaagagaaagccttatgaacttccagatagaaagaacactaatttataaaggaaatgggatcagcctgggtttaggcttttcttctgccagactggaagctagaagatggaatgacacctaaaaggactgcaagcccacaattctctgttgagctcttactcagctgttacggtgaaaaagaggaccattgatatgcaaggatttagaaaatttattaattttaattctagcaggcagagtccattaaggagatcaaacacaccagttatttttatagagagaatttaatgtaagaattgttaatgaggcacttaagagctgaaaaggcaaaaacaaacaaaaaaaagtaactctaaagcagtactgtttaacagaaatattatgtgagcaatcattgtagttaattttctactagttctgtcacaagtaaaaaaggtagaaataattctggttttttctcagtatatctaaaataataacataaggagtataaaatttattttcataccaagtgttcaaaatccagtgtatattttatgattaagcaagtcttggattggactagccacatttctgggctcagtagccgcatgtggctaatggggactgtattggacattgcagctccacagtatctcagatgtagcactgggggagcaatgggaagaggtagttgttaaaacattaaagcttggaggagaggctctgtgggatgtagctcagacgtctgaggaaggggcatttcctagctggtagactgctgtcatggagctctgaggagagacctgtgggtctgggactgagattttcaagagtgtgccagtaggtagggtcagtgtctccagaatggggtgcactgaggctgattttgcaagcagacttagcttgaacaaagtgcagactcaactgctgctgctgcaggagcaagtgctgctgctgctgggaagcagtgaggcccgagtgacgcgataggaagcaaatgggaaacagctccttgttcttccaccagccttgcagtttccctctggcttcccttgatgggtcctagtagggacccagctatgaagcagaaatgtgtttagagaccttgccttccccgccagctccacatcatgaagcagagagcagaagaggggtgagaagctgagagtcgtagccaaatgttgaacacagtagtccatcttaggataatacttaaaaaataattctaaccaaattaattacaacagagacttccatgtaggggaagatggagaggaggggaagcacccctgaggatcagtctttgccttgtgtacataaatgatagaccaggattgtctcataaagtgctaataaagattctcgaaattgaagaaaaatccttgaggaaaaaaaaaactaagagttttatgagtttcaaagtactgaactcttagctcagaattgggttgggggaaagtcaaagcattcaaacgatttcatcttactgggtttgctggagtagtgtttgaggaaatagttggaactgtgtttttaaacaacagtagagaaaagagtatgagattttttggtgggagttgggggagggtatggtaacttgatacaaccaggaaaatgaggaaaagggaaaaagtaaaattaatattaaacatgatataaaatggaagaaataagtatatcagttgtactgttaataattgtgactgggcacaattacccatttaaagatcaaggctgccacatgcacaataagagctatgtatttatatgaaatgcagttaaaacaaagtaatttgttttaaccttaataaaggttaaaaattaatggattggcaaagttgtgccaaacagaaagaaatatgaaaaaatgtacaatcaaagcttataaacactaaacagaataaagaagcaaattatgtaatgataacaagcacagtttataaagacagcagccattaacctttatgcatcaatcaaattagcagctcaatgtaagaatcaaaaatgattagaaattcaaagtctagttgatttacaaaaataataagggactttgtataattattttttccttaaaaatgtttactctggcttcatggaggagcatgctaagctttaacatttagcacatctagtataaaaagagacagaatgagttaggttgtgtgtgtgtgtgtgtgtgtgtgtgtgtgtatgtgtgtctgtgtaggggagcagaaaggccactcacatccacctctcagctccacatctgagaagctaaatgcaggtatagggtgagaggttgcattttggttcaagttggaaggtcttttgaaatcaaaaagaagaggagaattattgattgttttcctccatagggcttacaatggtaatgtcatctctttgtctggcctaaggtttccctagccttatcaatgaacataatttcaaaattcgagtcctggcaaaaacgtgtcccttatgaaaaagaaacgtaagtgcaaaacaatgtaaatgatgtatgttttgtctacagaagtgtactgagattctcacattatttcatagcttacggtcctctttatgagaccccacccatgtctctcaggtcacggaaccaggattattgccctagtttctgtcttcaggaggaagccatttcacattgtcatctgtccagggctcaagctgcccatcttggatggggccgctgtttgcgggaggagttgatagttggcttatgaaagggatttgcccagagatgtctgcatttgaccttaggttcctttttcttccagctgacttcatgattgtctagctccagcatcttagtaaatacatagcagcagtgcccattccagtgaaggatgctacaggggaggatgcatggggaggagtatagatattttctaaacaatagtaataggtcaagcatgagcatttcctcccataacttctgtaaaacaggttatttatttatttattttttgagatggagtttcgctcttgtctcccaggttggagtgcaatggcgtgatctcggctcactgcaacctctgcctcctgggttcaagagattcttctgcctcagcctctccagtagctgggattacaggcacccaccaccacgcccggctaatttttgtatttttagtagagttggggtttcaccacattggccattaagccctgctgataagacacagtttaatggtggtgtctttacctccccattcccaccattattcacccgtatattgaatattatgacatttgatgtgtactttaagataaaaagctgatgatctcggtttaagatgcctctaaatattcagttcaagttagacaaagaagtggccataggtcatttcagtagaggaagacaaggatactttgtggtgttgtgtaatttcctcctaggtagttttggttgtgaatttctgagagagagtgggtgcaggagccatggatataggaacattaacttatgaactaaaatcagaatacttttcaaatataaatgtatttttcagtgcagtaggagaaaatatttaagaagaaggtccaagagcatccaggacaggtggtacttgttcccaaatgagaactgaaatagggactttaggtataaagtaatatacaatgtgtaaatgggaggcaatcatctggaagggggagatgaaagctagttaggattatggctgtaggtaatccataattatagtcctaggctttcagttatgggctgagttttttttttttctcttgcatcattttgaagctatgcaggcatatttccagattgcaacaaaattttattgtgaattaaaataaaatcaccttttctctgttcctttggaaaggaaggaaaccttgacttaaattctgagtgccattttcaatgctatttacacagaaatgtagatgaccaaaataaatgtcctcttggttttattcagaaccaggacttaatgctggttaaatacagtcctcacttgatatgcatggaggattggttccaggatccctaaggattccaaaaccctcagatgctcaagttccttatataaaatagtatagtacttgcatataactggtgtacttcctcccgtatactttacatcatctctagatgtacttacaatacaatgtaagcactatgtaaatagttgttatactgtatattaaaaatttgtatttttaaaaattgtgttactatttttttattttctttatttttttaagagacagggtttcattctgttgcccaggctggagtacagtgctgtgatcatagctcagtgcagcctccaaatcctgcagtcaagtgattctcctgctgtagcctccctagtagcttggacttacaagcaggtgccaccacacctgactgataaaaaattttttttttgttagagatgggggctcactatgttgcccaggctggttctgaactcctggcttcaagtgatcctcccacctcatcctcctgagcagctgggattgcaggcatgagccactgagcctggcttttattatttatttttccctaaaaatttttgattcccatttggttaaacctgtggatgaggaacccattttatttaatttattgctaaattaccattatgtaaaatatatattgctaaataatcattatataaagagtacctatgttccataatatttataaaaatatgctcacactctgtattcattctttcaaaatatattttgaatgcttaccaagtgccaggtattatttaatgtggggattacaatggtatataagacaaagttctacccccatgccacttattttaatggtatctgtatatttgtgtgtgtgtgtgtgtgtgtgtgggtgtgtgtgtgtgtgtattttctgtaagaatgcaggctctgaagttgggctgagtttaattctggctatacctctcactggttttattttgggtaaatttgactatgggtaagtttcttatgacccttgaatgacctgagcgttaggaacactgatcccttgtgcagttgaaaatctgtatataacttttggctccctaaaaactgaactactaatagtcatctattgaccggaagccttaccaatagcagagtagattaacacatattttgtatgttatatgtattacatactgtattcttacaataaagtaagctagagtatagaaaatgttagtaagaaaatcataagcaagaaaaaatatatttattatttattaagtgtaagtagataatcataaaggtcttcatcctccttgtcttcaggctggagggttggttagtcttgctgtctctggtggtagaggcagaaaagatgaaaggacaggcagacatattatggaaatgccttataatttctgtctgactttttttgctttttttagtttctctaaaaatgtttctacatggtaccagttctcctcccactgtttgctttagtttcagtgactatatcttagatgggtccctgtcataaaataagtcatttgtagtcttggataatctgaacccttgtgccagattgtctaatgtcagttgtgttctggcactgcttcttctacatcttctcattgtctggcgctgtttcgaaagcactcatcaccataatgtcgtccatcttctgttaattcctctggtgtggtgtctgttagttctggaatttctccaaggtccatcttgaagcccttcatctcccaccttttttggttatattcacaatctctttcatgatttccctggttgactctgttgtaaatcatgtgcaatatctggacacagtttcctccaggaggagtttgttgttttgggcttgatgactttcatggctttttctgtaacaacagtggcatcttcatgaggtaatcctttcagacttcatgatgttctctctgtccgggttctcttccatagtgttgacagtccttttcatagattatcatgtctgatgaagaaaggtccttatgatcccctaatctataggctgaaataaaaacattctgtttgggggtaagtcaccactttgatgtgttcaatattgaagtcatggggttctgggtggctagaggcattgtccaatatcagaagaactttaaagggtagtcctttactggcaaggtattttctgatttcagggacaaatcattgatggaacctatctagaaaataggttcttattgtgtagaccttcttgtacaaccaaaagactggcagctcgtgtttatcttttccctatgaggctcaggggttagcagctctatagataaggacaattgtgccataaactcaactgcatttgcacaaaactagtagagatagcctatcccttcctatcttaaatctttgtacttgcttctcttctttactaatatatgtctttcatgccatttattttctagagtagggcacttttgtctgcattaaaaatctgttcaggcagttatcctttcttctcaatgattttcttaatggcatctgggaactggtttgctgtttcttggtcagcagaagctgcttctcctattatcttgacatttttaagtaaaacctctttctcaaattatcaaaccatcctttgctggtattaaattcgcctttaatctatcacataatggagacttgacttttcctcaaatcgcattagagtctataggtaagcctttcctttcttagcaatccagcactcatatagaagttgtattttcttttttttttttttcttttttctttttctttttcttttttttattgatcattcttgggtgtttctcgcagagggggatttggcagggtcacaggacaatagtggagggaaggtcagcagataagtgaacaaaggtctctggttttcctaggcagaggaccctgcggccttccgcagtgtttgtgtccctgggtacttgagattagggagtggtgatgactcttaacgagcatgctgccttcaagcatctgtttaacaaagcacatcttgcaccacccttaatccattcaaccctgagtggacacagcacctgtttcagagagcacagggttgggggtaaggtcacagatcaacaggatcccaaggcagaagaatttttcttagtacagaacaaaatgaaaagtctcccatgtctacctctttctacacagacatggcaaccatccgatttctcaatcttttccccaccttctccccctttctattccacaaaaccgccatggtcatcatggcccgttctctgagctgttgagtacacnnnnnnnnnnnnnnnnnnnnnnnnnnnnnnnnnnnnnnnnnnnnnnnnnnnnnnnnnnnnnnnnnnnnnnnnnnnnnnnnnnnnnnnnnnnnnnnnnnnnnnnnnnnnnnnnnnnnnnnnnnnnnnnnnnnnnnnnnnnnnnnnnnnnnnnnnnnnnnnnnnnnnnnnnnnnnnnnnnnnnnnnnnnnnnnnnnnnnnnnnnnnnnnnnnnnnnnnnnnnnnnnnnnnnnnnnnnnnnnnnnnnnnnnnnnnnnnnnnnnnnnnnnnnnnnnnnnnnnnnnnnnnnnnnnnnnnnnnnnnnnnnnnnnnnnnnnnnnnnnnnnnnnnnnnnnnnnnnnnnnnnnnnnnnnnnnnnnnnnnnnnnnnnnnnnnnnnnnnnnnnnnnnnnnnnnnnnnnnnnnnnnnnnnnnnnnnnnnnnnnnnnnnnnnnnnnnnnnnnnnnnnnnnnnnnnnnnnnnnnnnnnnnnnnnnnnnnnnnnnnnnnnnnnnnnnnnnnnnnnnnnnnnnnnnnnnnnnnnnnnnnnnnnnnnnnnnnnnnnnnnnnnnnnnnnnnnnnnnnnnnnnnnnnnnnnnnnnnnnnnnnnnnnnnnnnnnnnnnnnnnnnnnnnnnnnnnnnnnnnnnnnnnnnnnnnnnnnnnnnnnnnnnnnnnnnnnnnnnnnnnnnnnnnnnnnnnnnnnnnnnnnnnnnnnnnnnnnnnnnnnnnnnnnnnnnnnnnnnnnnnnnnnnnnnnnnnnnnnnnnnnnnnnnnnnnnnnnnnnnnnnnnnnnnnnnnnnnnnnnnnnnttaggagctggagaccagcccggccaacacagcgaaaccccgtctccaccaaaaaaatacgaaaaccagtcaggcgtggcgccgcgcgcctgcaatcgcaggcactcggcaggctgaggcaggagaatcatgcatggaggttgcagtgagccgagatggcagcagtacagtccagctttggctcggcatcatggggagaccgtggaaagagagggagagggagaccgtggggagagggagaccatggggagagggagaccgtggggagagggagaccgtggggagagggagaccgtggggagagggagaccgtggggagagggagaccgtggggagagggagaggagggagagggagaggaggagcctttccgagaagttgtattttcaatacaagattaaaaagtatttctcaaaacatgcaggggttttggacctgctggcatagctgcattgaaggcttcgtgaattttcttttctttttctacaacagtccttatgctggattcacttatctcaaagtggcaggaaactgcagctgcagacctcaatctatggtacttaccaagcaattcaacttttttttcctctaatgtcatgacttttctctgcttctcgggagcacttctagcatcactagtgacactttgtatgggtcccatgatgtgatgcaaagttatggtattgtaataaacaatgaaaaatacacgagaacctcaaaagatcactttttactgcagtatgcaatttactggagagactaactgctcactcgatgattagcatcacagtgtgttaagcagatactcgtaactcctgagctcgctacaatagcaacaggaggtgcctactgaattatagcaatacagtatgtactatagttaattttatgcagttatgacttaatactgcatctttacctctgtttacgtttccgtccactgcagatggtgccatgtacagtctgtttgtgtgcatacattttgatacattttaactttttgtttgagatagagtctcggtctgtcacccaggctggagtgcaatggcgtgatctcagctcactgcaacctctgcctcccgggtttaagcaattctccttgcctcagcctcccgagtagctgggattacaggcgctaccaccatgcctggctaattttttgtatttttaatggagatggggtttcgccatgttggctaggctggtctcgaactcctgacctcaggtaatccacccgtcttgcctcccaaagtgctgggattacaggcatgagctgccgcgcctggccaattttaactttttaataatagattcgtatatattttatgatagtgaatgataaaactgaccagaatcaacatattttatgcattcatgacatactttaaaaatttatttatatttatagatatgtgattcatctgtgagttttatcaaattgctacaagtcttcaaaaaaatgttcaatatatttattgaaaaaaaaatgcacatatgtggttctacacagtccaaacgtgtgttattgaaggttcagctgtacttaaaagttctgtaggcctcaattttacataatttctctgtgcctcagcttttcatccgaaatataattgatttaatagggttgttgtgaggattaaatgagttacacccatcaaatgcttacagttgtacctggtacgagtaagcataataaatgctaactctttttctgtcacacatgcagatattatatatgaatttaggctgggtgtggtggctttcgcctgtaatcctagcactctgggaggctgaggtgggtggatcacctgaggtcaggagttcaagaccagcctggccaacatggtgaaaccttgtctttactaaaaatacaaaaattagccaggcatggtggcacatgcctgtaatcccagctacttgggagactgaggcaggagaatcgcttgaatcccggaggtggaggttccagtgagccaagatcacaccactgcactctagcctgggagacagagtgagactccgtctcaaaaaaaagaaaaattaagatgccatattcatgtttatgtatttattttggaatctcaatccacatatattttcttccaggatttgaaacgatttgagctgagaagtgttaagcttctctgttcccttatttttgtcaagtcttattaatcaaaaactgtatacgtgttttgtccttatttttaatagtctaataattacttcattgaattacccagcttagctcttctgtttaaaaatggatggtaaacagtatcttgaatgctggttcggcaggttctgacaaaatatgatgcgttaaaataaaattcattgttagcattaaaatgacctttgaggttgtcgtcactcatttttctctttcagtgtttgaaatagcctttctgcatcaagtgcattgcagtatcttgtatatattgcctatgtataacggtcacggttcaactttagataagtcatttagtcaaatcactttatctctagcaatctccgtttcccatttattcttacccattatctgaagttcttatcaactttctctccatagtgtaatggccttatgtattacatttataaagtaattttctaagctagaattgtatagaattacttatgtgtcaacctacatgaagataaatctgagtatttgtgaatggccaaatgagcagtatccaaattcagaaaaacatttagggccattaaaagccaaaccactttgggaaaggggtggtaataatttagactctggcaaactctgacttagtgtagtatacacaaattttaaaagagcctattttaaaataaccgtgaataatgtaagatttaaaaactgtccttacatgaccacaaaggtgagtagtataatggaaactaattcctataggaaagtttactctttaagatgtttaagaagtatgactttggaagtcagatcaccatctttcacacctctgttgtacttctcagtttttctcatgttaaaaatggagatagtagctggtgtggtgacttgtgcttgtaatctcagcactttgggaggctgaggtggacagatcacttgagcccagttcaagaccacttgagcccagttcaagaccatgtggacaacatgctgaaacctcgtctccacaaaaaaaaaaacaacccaaaaatcagccaggcttggtggcatgcaactgtggtcccaactgcttgggaggctaaggcaagaggattgcttgagcctgggaggcagaggttgcagtgagccgagatcatgccactgcactccagcctgggcaagagagcaagaccatgtttcaaaaaaacaaaaaacaaaaaaactagagctagtaatgcctcccttatggaggtgaatgaagttcaatatgttaatgccttgctaaagttatctttaaaattctctttctactttcttaaaaacttgaggttctttagagtaaagtcaaactggctagtttttaccctgggactaaaatatagagaactagattttatacctgctgtccatgaaagttgaatgttttataagtagttaatttgttttcccatttaaaaggacatgtaataatatttattataggagatttggctggcttttaggaattcattttgctggtgtaccttaagtccctcgcctgattgacaatatactgaggaaagagctaagttgctagggcttgaggtctaagggcagcactgactggtatttgtttcattaagcttaggcaagctatccaattacttaatgcaaacaagaaaagtttacactaaactcctacttctttgcttgaaactctagagaatttaaatgaggagagatatgtatttaaaagaaagaaatttaaatgaaacttaaatcagggacttaatgtagaatatattagagcaggagatctaaaatattaagtgggaaatgccaataaataaaaaaggaatgtattctctaagatacttggcatgtttagttttgttttgagataattcttaaatctttggaaacccaagttaataatgagagacttattttatctcctgcctttacatataaagtcctgccttcccttggtcagtgagagcctgggtcttctctccttagtgaagtgttcccaaaacaacatggcttctgattttatagctccactatctgggcagtagttttcagagaggcccagatggcagggctgtcttatttggttcaaaaagagaaaaattggttgacagctcatctaccttttgcagatggctgttgaatagtatagctccatgcggtataaaaccaaggggccagagaggaagctttgaaaataattgggggtttctgaaaacataagcagtttttctttgcaaagtggttttggctcagtaaagaatttacaggaaccattgaaagaggaaacttagaagaaaataattgccatgcaatattttggaggggagggttggggaaatggagaatggtacaattttgaagtttcaaatctattgcttttaaatgggaaatggtacaacttagaagcttctcatctttgggcactggtcaaaactgaacctcagtcagtataccattgaaactctgtcctccaagagaatctgaaagcaagtaaaattctttgcagaggtgatttcatgcctcagagacccttctaagtgtcacaggaatctaactgaaggaaatcctttcttggtgcttctggacccaactgatgtttcctctgcctaagacactttctccttccccatgttgctcagttaatgtcctgtagagctcaagttaaatatcagtcccacccatgcagtgtcatagatacctacctaactttttaaaaataatgcatctgttatttgtaatcatggctcatgaaagtagggactgtgtctcttgctcactacttcattctcagtaaccagagtagtccctttcacctagtaattatatactgaataaatttatgaattccagtgtgtagtttttgttgagtactgtagtgagaaatctcaggattacagtagaagtatatgtgcccatcgagtagaaattataacagtatcaacctgggagataatataatgcccctctgttttatttatcccctgccaccacctttttcaagattttttatggaatgaggaataatatgtttaaggtatagactttttagaatgtttatatgcaaaggaccataagattatatagtagttcaaccttcaaattttaaaactgaggaaactgaggcttattagattgtacagctaagttgttgataggaaatgagaatttgttcagagtcctactgccaaactccctgatgacaaaaaatttggtttcttaaacagtcaccatacagaccttaaaaaaagtttttttaaaatttataaacattcctttaaaaacatttgagaatttgtgcagttctatttgtaaggatgaatgaaagtataagaatttattaagaaaggaaaataatattctttttagtcagtttgcaccactgccaatcctctttcaatccaggtgtcaaatatagttaggtgttgatgttggaggggctctggactgttgtggcacctcctgttgtaggctatttaatgtagcctgggattatatcacagatgtgccacatctaacatggtggctaggcccttggaggatacagtttgtctcgttagttgtttcttatatgccatcgccttgtgttcttttgcagtttgttttccttgttttgtttgtggttagaaatatgccatttatttatttattcattcattcattcacacatgcatacatcaacaactttttcttgcgtgtttgatatgtggcaggcacttttataagtatgggggatatagcagtgaacaaaaatagggcaaatcgttgtccttatggagctatggacaagagggaaaggaagcagcttgtgaaagggtctagctgctggagttagtagagtcaatttgtgattttagaagtccttagagatcataaaaataaagcagaatttattggtgaaaaattggaaaagatgatggagatggcattgtagttagtgaatttggagattgtcttcttcatttcgtaaaatcactgctttctctgtattcctacccgcatagtgggtactattattattactgctacttacctaacatttattgagtgtatattatgttatgggcattgtgctgagtgccttgtttatatagaacgctgtaaggtaggtattacactatttcattttacccatgagaataacaggactcaccggagattaaataaagtacttattcagataggaagtttagagccttgatttggacccagagtttgcatatctgtaccagtcatggcaagctaaatatgtttatttttattatcacattgaaggcttttgtgctcatgttttgcttctttttcattaacttgccaaaatccttatgatcctgtatttcttaaagttgaaccatgtagaactccatatgtaattaaaatctaagccatacataagtaaactaaaatggaaaaaaaaagtagtaatttttaaacagtactttaaaattagatacaccaaatgtggtagatgtgataattcagttgaacagaattcattttatgttcatgaactaataatagaatttgaataaacattttatatatgtttgtaaagtgcctagcacagtgcttagtagttgatccataaatgatagtaattttattattttattttagtttccacctcactggtaaaaataggtaatgcttttttacttaggggtaagatgtccatacaaatgcgttaaatacagtattgtaatctgatatgataacctcagcagttatttgcacaatattctcatggggagcacttcatttttgatgttactttcatttacctccaggatttatttgagtacaagtgtattttggtaattaagggctgtagtcttaaactttagcatgcatcagaattctagagggcttatgaaaagacagtttgctaggcactatccctagagtttctgattcagcaagtgtgggatggaatcagagaagctgcatttctaacagactcccagctgatgctactgcagctggtttgtggactgtagttttagaactgctgttctaggaagtggtgtgacttctaattattgctgttctcttacaattacacatatccagtggtgttaatgtgttgatatcattgatgttgctgaatttattgtatggtccttgtgaaataatttagagaaatttggtttgtatgagtgtcattgtgcttattgcttaggaagtttcccaaaggttacttttgcattagagaatttcgaaatacagattttaacttgtttctagtcctctttttttttatttaagacacaaaactacacagctttgatttttaggggaaaaggatgataactttggaatatatctcacaaggtgacttttttttttctgttgtagttgatttctgagaattccagagtatcaggatgatgtagcaatttaaaaatagtaacacaaaattttatctctagtttttttcaaaaatctttttaaaactaaaatttgataagctagtactgagtagaatttggtgctcatcattcacacgtataaagtagatttcactcagaatttcacttacaccaacataacaattttacttttcctttttaaagcatagctataccttcagggatatgatggtatagtagggttattctctcaaagaagaaaaggcagtcagaaaatctttgttcatgagattagactgaaatcttcagtgattcagtgattactgaatgcctctatgtgccaggcactatggcaaaaatcagtgccaaagtaatttatctttatcatgtacaatgaggggttttagtgggttgtaacttaatatgatctaattgtgtgatgaggctactgagaaatctaatgcaatcttatgcttcattaatagaattagtattgtgtacagatctagggaagtaagattctcctgtcttagtttgctagagcatgtctggagggttaggtttagtttggagctaacagatcgattggagtcattccagaagtgaggagccctgcagttgaaaggcgtggtcatatttgcatatgaggattgttggaaaataggggtaatatactgggaggaaagatgtccttattagttccataatgtctggcttctctgctgtgctgtaacatccacaatgacagtgacctgtccatcttgtttatcgctgtgtcctcaatgcctagcacagtgcctggtgtgcattcagtaaatggacgagttgagtaagtttggagaaagagacgatggttaccttcaaatatttgtcatgtagattgctttttttttttttttttaaacggagtctcattcgcccaggctagaatgcagtggcatgatctcagctcactgcatcctctacctcccaggctcaagcagttctcctgcctcagcctcccaggtagctgggattacaggaatgtatcaccacgcccagcgaagttttgtatttttagtagagacggggtttcaccatgttggccaggctggtctcgaactcctgacctcaagtggtccacttgccttggtctcccaaagtgctgggattacaggtgtgagctgccaccacgcctggcctagatggtttgttaattacttaaattttcagaggccaaatggaagcaccagggatggaatttttttggtgggcagattttaattttacataagaagaactttgtaaaacttagttatatttggcagccaaattaataagcttcttcatgtatttgaatttggttatttgaaatgcttgagtggaggctgcatggggatttacctctatacctgcttttttgatagattatgggccaagatgatttcagctgttgacctttttggctatgtgtttctatttttaaattatttcatttgatagaaaataatgtcaactaataaaatattttttctaacttagacaattcttgtcattttagactaaagcaagccaaagagctggaccgagagagggctgctgccaatgagcagttaaccagagccatccttcgggagaggatatgtagcgaggaggaacgcgctaaggcaaagcacctggtgagtattaaaaatgtaggagaaattttcttgcctacaaggaaatctctgatgtttgggaagagctaagtactctgtgccagcttttagtgttgataatattattcatgttctctttgctcagattttgatttttgccttttataagtagcttacagtttaggtttaaccatcaaggactttaaaggcaggtaactctggaagtattgaagaccaacatgcagacatgtgtacatgtttcacacctgaaggattgttgtctgcttttttttctttttctttcctttttttttttgagacggagtcttgctctgtcgcctaggctagagtgcagtggtgcgatctcagctcactgcaacctccgcctccggggttcaagtgattctccagcctcagcctcccgagtagctgagattataggcacctgccatcgtgcccagctaatttttgtatttatagtagagacggggtttcactatcttggccaggctggtcttgaactcctgaccatgtgatccacccgcctcggcttcccaaactgctgggattacaggtgtgagccaccgagcccggcctgtcttctttttttgtcctttgcctttggttttattgtctttgaaacctcaggggtcagcaatgtaggcttctttctctcgtggctggcaactaccagatgttagtctggaagactctggcaaaggtgagtaaggtttgatcaatcactgcctggggtttagggaagagaaaatgtagagccagggccttggggaacagtcttttctaagataatttttttaaaaagaaaatattttttaatcttttaaaagattacatagacatgtttttgttgttgtctttaaaagtattactaacagacagaagaaggtttaaaagacacccatcaatctgtctttctgatataaccatggtttacaccagtgtgtgttttcctcgagattatttttttctaggctttttaacatattgaaacatttagataatgctatagatggtgttaagcctcatgaacattttcctatgtcactgaacatttttctgaaatgtagtttttaatggctgaataatgttctgccttttgtattcaacataatttattaagcaatttcttattgttatttgatagataaaagtggagctgctctgggtgaaacctggagtgttgactgcttagcctccacttcggccttcctagaaacccagatgttactcctcggaacctttagtcctcattggagcacagttgggaactcactggacagggaaaatgggaccatggaatggagaactttgaactgaagagtgagggggattttcctagttcactaggcaattgggaaacactaaaactttctaagaagaaggctcatttctagtctctcccattctttaccttagtcacttctctgaaagaccaacccatgaccagctgcaaacagagaacatgaaaggaagtccatgcgtaatgaatcagtttcttcagtgacaaatctggggtcccggttgcatgggcaaatagtgaagccagaatagaggtggtagaccaagaaagaaatgtcagtggactgactggcagctgccctaagaacagtacatgtgttgagtggaacaaagggaataagagaggtggaagcaaagtcagtcattgtgaaaggggaataatttcagaattaaagacagtaagttttgagtaactcaactgaaaattaaatttgttgtacgtctaagctgaaggattttttgaggaagctgaaaaaatatcaggtcagtgggttgaaaagtcatttctatgtatattaaagtctccaaatttggaagctaaggatgtagtggaggaggttaatagtgctcatgtttgaggaaggtacgagagcaaaactcttagtttccagcgggcagaagaataccttggttggcatttctctttgcctcccagcttttactcttttgaatcttatctttgaagcactctttctccacctctttttgcctgaatttggacatactgtcttactctcttagtttatggagaccagcaagattcaaaaactcaaaaaactcattaaatatatacacacactcagcaagacataaaaagagatttcacaaaaaaatgtgaaagtatcaaaagatttgttactcaacataactaaaatattaagcaacatgttttgattggaatagcatatctgcagtctgttctgttttacctaataaatcttgtctattgtctgtctttactgctttgtgtagctggtgaagcatgagaaactggcctcgtacattctgatttgtagatctcttatttacagattctggttgtgtggtatagatgacaaattgtagtactcacaactcctgtatttcagcatctgttgtaatatttgccaaatagagccctcaaagcacttagggaataaaagtggaatttatgccataggatgacagctgattgagagagtcccttccttcccagagtgttgtcagacatttgcatggtctgccatggccacagcaacatggctgccagtgacatttagttattgggcagttcccaatttatttaccagatttctccctttattgttgttatttattattatggaagacatacatattcattggatcaagattagaaaataaatacaaagggatactaaaatcactcaatgtactacaattcagagatagttactgttaacattttggtttgttgtgtttatattcctttttacttcccactgagttggtataaaacatttgattttatgtgtataacggtatttctccaaacatagataatagtatacactcttttgtataactgttacaataaccttcacattaaaacatttaggccatgtggtaaaagtttttatactgataaatacgtttttgtgtggtcacattttaatggttgtgtttcactgagttttccactaattactaaattaatacaagaatattatagaacacttggaaaacaaaaaattacaaagaaaatcagtattgttataattctgtcatctatcattaatgtttagaggtataaagttctttctcccttccccatatgtatatattttatacatgctttagggtctcagattatgtatcccaccaccctccaaaccagtactgtgcggtgtggacagtgatcgcaagcctgctgttgtttgttagttccttgatccccagctggagaggtgggcatcttcagaacccataattgatgtgggagtcaccccagaaaggttagcattgctcctgctattttggagggcccctattgctgccattcttaattctaatatgtgggactctttgagtaatggccaagcattgcttcgttcctctttatttagaactcaaatgttgcagtctgcaggaaagtaaagattgtgtttcacacatgtgaagtaattaaaaagttgtctttcaggagagcgagggtgaaagcacgggagctgatgtgatgttgggactgtgaaataaaacgattcccaccccttaccccacaccccccacatctttctggctcactaacagctgacatttaggtttctgtctccttagatgtgagtccaggctttttcttcccacagttgttttagcagctagctttattgaagctctttgaagggcaaagtcatgatggccctgttgttgaagttttaaaataggatcagatcaaaactttcccctttggaagaattgctttagctggggaagctgttaatcccactctagattctggaagagtataccagccccttcctctactcagcactgagtgatgccagcattttaatcagttgactttatccagaggctttggaagaggcagtctactgataatgattttacctgcatgaaaatgttaaaagcaactcacgttcaaaatatgcttcttaggatcaggaaagcacctctgtagaagatgaagactgactagaaggacaggaccagggaatttgtaaagttaatgcaacttgatatgtgtattgtaaagatcttatatacgtgatctaatatttgctgtcattagattcttttttgaaattgaagagtagtgagttagtttttttgactttgcagttatattttctttttaaaattccagttaaaattttgactcactcttttttatgtcttactacattatgctggtttaatgttagatttttaaaattttaattatttttaaaaatttaagtagagacagagtcttgctatggatcttgaactcctggctcaagtgatccttctgccttggtctcccagggtgttgggattatagatgtgagccaccatgcccagccacatatttcttgttatcatcacagaactatgtagtattttctcttcttttcttttttttttaaatctaaatgttaaaaagaagtctcaatttacttacttaaggcaatatttacttcaaaattcttccattactctttggacagatgttttattgagtgcttactgtatgaaatttactatgttaggtactaatgatctatgaataaaagacaaaatcttgtccttgaggaataaaaggtaaaagatacactaaaaataatgtttaaaaatgctaagtctgttatagagccatgctacttatagtcttgtgaggattcccacttttgggaaagccaggactttgtctttcttttaactaattgctatgtttgcatttatttattcaacacgtaattgagtgcctaatatatgccagtgctgagcaaacagtaagcagtcaatacatatttgttgattgaataaatgactgattgcatctactgaagccctggaaataggaggagaggaaatggggaagaatagaaaagattttctggggaaaggacccctgagctgactcttgaagtatgagtaggatttgctcccaaggttgaggagtgggatgaaacagccttaggtattgcaggcaaaagcttggaaacgtggggatagggggacactactagaagttgctgagtgggaatcattgtggcagttagaacatagtctgttctttaagtgggtgtgtgtgtgcaggggattcacgacttaacccttgcctggcctggccctaggtcctgtttataattggtacctgattgccacaaaaagcctgctttgtcagtcttgtggtctctgttttaacgttaatgctggtcaatggttgtatctaaactgtaaaagagagggtgtataaagagacatgtccaacctcctatccctttatggtcgagacctcagtttttaagtttctctgaggtccccttggccaagagggggtccatttagtcagtcatggggtttagggtttgatttttagcttacactctaatgaagtatgaagggaagagcagaggaggaaatggctggaagcccagagaccagttagaaagccctgtgttaatccaggtgagaacaggtagtacccaaattagggcatggtagcagggatgcagaggaaagaagaggagtaggaactatttgggaggtagtattactaggattttagctttgaagggttgagagaaatgtcaagcctaactacaagcaaggtttctagtatcagtaacttcatatcatttgaaatacaaaaattagcaatcaatgtaaaaaacgtcctgggctaagcatagcgtgaagtctgacttcagtgtagcattgaggagggtcctggcctcagatactgcaccagttgtttgttcagctctgggcaagaacattagtcagatcattaggtatttttgtccctttctgcattgtccttcgtcatatatttattaaacacctactgtatcctaggcagtatttcccagggatgcaaagatgaattagatctggttgcttttcttcagagtctgaagttaagtgtcaggtttgtggggaaggttattcttgccttgtgtattttgtcccaacttaagctataatttttgaatttgtaaaaccttatactgtttagaaaaaaaaaaaacacagtaaaaaaaaaaaggatgggtgaatgcataaatttagtttttgaaaatttaagcgactgtttctccaaaatgtcacttttcatccccagtttgccttttgtctgaaatgcaccagtgaagcaatcaagaagaagaattgattaattttgtgctgtatgcctttcagttctgtattttgtttgtgcttcaaactgtgacagttgaaatttcatggtaaaaaagaaaacggttttgaatttgggatatagagaaaaatgactaaattaaaggaagcagataagaacactactgctgtccaagtgaggttctatccaacgaggaagggaaacaactggggttgtaattttgaaatgatcgacatggtttatactcaaaagttctgtgtaagagaagagtaagagtgatcacttggggtttttagtatcactgaaattagccaggtgaacgaaattgcagtgtaagcagtggtttcccgggttcttttattgggcatttaaagataattttagaaatctgttgtttttgggtgcaatttagacttggattataacctctgttaaaactctctctggttatgtatgttgtgtactggttttcttgccctagacactaacctccaattatttggatatgtgtagagtattagtttgctttgaattccaaaaatgaagttaatgaattcgagcttttgcttttgacaactattgaaatatggtatttccacgttgaattggaaggatttgggccatttaggtgttagacatttttctcagtgttattggtgagaatgggctctggaatccatctgcaagtcccattctttctgactcttctctcttaatagcttaccaggaaattcaaagggaagcatccctcacgacaggtgggagccccctgtgcatttggatttagcagggtattagggcttctgggacaaagtatccagattctgttttctcctttgtgttctttgttatcacgtgtggcctctacctcctgtgtgttatggcagcattattattatcagctggaatgcatatacaaccttatgaagagactgtgaaccaagttttctgtggagtagcagggcagctttaggtatgtttgctactgcagtgaaaaaggagaaacgtgttttgtttcagtttgcctgcctaggctgcacgttaagatcccaaagaatgaataggactgcgattacagatttaaagtttgcttgtatcctgaaaacttgcccagattaatatatttctgaaatgtacattgtcagacccgctttcctcatctaggtcggcagaaatgcctaggttcttttttttttttttttgagacagggtcttacttgttgcccaggctggagtgcagtgcatgatcacggctcattgcagccttgacctcccaggctcaagtgatcctcccacctcaacctcctgagtagctgggactggaggcacattccaccatgtctggctaattttgttttattttatttatttatttatttatttatttatttatttatttatttaagaaacagcattttgccacgttgcccaggctggtctcaaactcctgtgctcaggagatcctccctcctttgcctcccaaagtgctgggattacaggcgtcagccacagcacccggccagaaatacctaggatcttaacatcaccaaatagcctctgagaagctcaatattatgctgactagatattgagggacctggaggtggagagcagtggagtgttctggtcctggagaactcactgccaagactctgggggcctatccagtcaacacggtgttgccattctccaaggaactgtgtcagactgtgtggccttttggacagtgattagaaaagaagacagcacagttgagtagaatgctattgatgttcttggcaacaattagtcatatttaaggacagctagggggaataactctgcttagaatgtgttctcatattttctaagtgtgattttgaaaattcatcaagttacttgcaaaccagttggttcagggcagttcttgttgagtggtgtcctgtgtgttagccgtaataacttattgacatcctatcacttgggtcattatgggtgtccaggtgagatatggagagcactgcgtaaaagtccataggcaattaaggtgcaaagggctggttataattccatcactttatgatgacgtggcattcattgtgaacatatttacttcattgcctggtctgttggaattttatcgaactgacatcataatctcatttcctactaaagaggctaagaaatacagcccttggtatttgctttaacctgcaacaaattaaaagttaagcataatcaagtctgtcagtccttaacaatcccaagtacatgttttgcacattatgttttgaatgagaatgtaaggcagatgagctccttatattcttacagcaatctttccagattgtcttcatggcaagtcacacaactgtcagttctgatacagttcttgtgacttgttttcaacctattgtgcatggacctcaggtttagtgaattcagtattacattgaacagcaatattatttaccatgtgataaactatgtgatataccatgtgcaatggcgcctgcttcattttcgtgtattggatgttaaatttttcacagtgttgaatatcacagctctgtattccttttctgtatccgtgcttttattgctttgatatgattcctaaatggcactgagttatgctttttctgtgtttcttgatgttctgacctgtgtcctgatttggcgatgggggcaggtggcagctatcttcatgtatcttgtaactattcccttacccataaagacattggacattttcttgctcactcttttctttactaactgtagtttaaggatgacttctcttgaaaataccaaacggcagaattaccaaatgaagtaaggcttccgttctctcaagagcaggaatctgtttacaaacctgcagtatttattacatacctcatttagcccattcatcattttaatagaaaaatgagtcattttagatgattctgaaataattcgaggtaagctacattgctgcaggcagaatatgatttacacagatagcaccatgctattttgaaaaaaatacagtggaatgatcagcaccaataatttatgattacttgtggtaaacttatcaaatgtcttcattgtcatagaaatttgttgattagataaagcatttagagttttctagctagcttttcccccttcttccatcttttatgacaaatgattacaaagttccatacttaccctctgcctgtttcaaacactgactgtaaatttaattccagatttgtttttaatattttcttgataagaaataacactagtcactgtcatgggccaattttattggagatgataaaacctactcatatacattttctgcttagaaattaaacttcatccatttacagtttctttagcccagtgtatgcacatattttaaatcctatcttacctatccataggttacatatttgactctcaggaacacaggtaactcattgcctggaaccatagctctgagccccaaaggcatcacaaagtgattctagttagtgtcttgaagcttatgagctttgctgataagcagcatcacagtaaaagcaatatttgtttttagatttagttttttttttttttcatttaactaagagccttcaactgtactatcttcttgggtgtttgatatgggcaggacatctatcattgattcctattagagatgataaagcaaacattcaaagagactgtgaaactaaatgttgcacagagatagagccagggttacaactctgatcttctgtgccgaggtgatcttattttgggcacaatttagcaaatttagttttgttgttgttctttgtttttaacgtgtaatggatttgatttattacattagaaagggaaatggacttttaggcacgtggtcaaagcagaaattactgcagctaagagtagaaagggcaactaatcgccatgcatgtgatgcacactcacaggaagtaaaacacacacacacacacacacacacacacacataaaacccatagcattatgagcctacttagcatagaggcaggcagccgtaactactcgaataggccttgtgtgttcttgcttagtgaaataatgtatgcacaatcataatgctatcagggattgagaataatttgtttaccagcgtgggtgagaaatattagcactaccatttccatagaaaccattttgcatttaaaaagttctggcatgtcaaactgtaaatttcagtatttaaaaacattctcttatgtgaatccctgtattgcaaaagatactggtcaaaggaagtgctatttgtacactttcgtcaagtcatttttgaattttcttatttaaagaaagtttgccatggcctgtcatactttgggagaagtggttgatatagacacaaaaggacctggtttgtagcaattatccattcccttggcctcaaaggaatactagtatataaaggcagaaactttctctttttcttttgagactgagtctcaccctgttgtctaggctggagtgcagtggcgtgatcttggctcactgcaaccttccgcctcccgggttcaagtgattctcctgcctcagcctcctgattaactgggattacaggtgcacgcctccatgcccggctaatttttgtatttttagtagagacggggtttcaccatgttggtcaggctagtcttgaactcctgaccttgtgatctgcccgcctcggcctcccaaagtgctgggattacaggcatgagccactgtgcccggcctactcttttttatgtctaacataaagtcttcatttgtgcgggaggtaagagatgattcaattatttttgtcactttgaataataaagaagcattaatctgggagaatgcttgttgagagtagaggtgggcttgctgcaatagagtatttttaggaataaccgtgatatacattagcagtgtctactcgtagtgaattcagtcacttttgtattttcattgaattttatgagaaatttaaaggaagatattctacagtttgtttgtaaagccaagctctgaatagagtttgaaaaactatgccattgaccattttggagatttgttaagtttaaacaaacaaaaaaggaaacaaaaaattggggatgtagttgtataattgttaatgtatttttcaattatactttccacttccaagaataattatctcaacagcaggttaactaatgtattaaaaattagtttatttccaaaaaataagctcttttctcatagctctgatagaatgataggaaagagctggtaactgattttactgtatgtctactattgcaaaaactaacaactgagtattaacattgctagattatgtgtgtgtgtgtgtgtgtgtgtgtataatcgtttgtgttgcatagggtaaaggtagagacactaggaaattacaatttttttttttttttgagatggagtctcactgtatcgcccaggctggaatgcagtggtgcagtctccgctcactgcaagctccacctcctgggttcactccattctgcctcagcctcgcgagtagctgggactacaggcgcccattaccatgcctggctaatttttttgtatttttagtagagacggagtttcaccgtgttagccaggatggtctcgatctcccgacctcgtgatccgcccgccttggcctcccaaagtgctgggattataggcgtgagccacagtgcctggcaaaaaaaaaaaaaaaaaaaaaaaaaaaattacaattttaaaattcctttcttaaactttttactttgaaatatttttagcttacggtaaagttgtaagaatagtacaaagagcttgactctgattcatctgtttttaggcatttaccacactttatcattctatttctgcctacatatattatatatatatatatatttttttttatttgggggaggggatcaattgagcatgggtagaagacatgctcatttacctcttaatacttctgcctcttagaaatcagtgtttcttacataatcaagtatagttgtcaaaatcaataaatttaacattgatgactattgtaatatttagcccaggtttcaattttgtcaattttctcaataatattctttatagcaactgttcctctggatacaggatgtattctaggatcatatattggcaactattatagttgatgtgtcttaaaattccatattaaacataatttgcaaacagtagtattaagatgaatacttttaacttcaatttatgagttactgctgtcattgctagagttttagtaagaagaaagtggaatgggcaaaaaagaggtgaagaatttcattcagacctatagattaatattctatattgtgggtgagttgaggaaaaaccattgttttggaaattttcttttcatgaactaaaaatgctttcagcatctgtatagatcccgtatcttcaaaatgcagcaggcatccaacttgcatcattaaaaactgttagagaataaactcttcctattttttgacaatttttgaacaataatttcatctgaaatagccttctctctgtccctctgcccttcccgtccaggtacaactccatgtaattttaggcaaattgcttccttttctttatgccctttgtttccgtctttttaaaatgaggacaaggtcgttaatgtagttctctttcaagtctcttaccttgatgaataaatatctaaatataggagttcttacagaattcgaagttctatatacgtataaattgagtttttataaagtaattttgttttatgaataggttaccaattccaagagtcacatttattttaattttctttggttattaaaaaagtccattttagaaaaagaaaaactgttaaagttgaaagcctctattttcttggctaaattggaattttgttattgattacttattctgattagtaaaagtggtttagtcacaggccgggcataaatgcttttagacagtcactgaattgaaagtgtcaacatgagagagggatccttttcttggaaatgggagcatgggatctttctgctaatacgtgtttgttggcttagaatgaagactcagagctttgttaggaaaataaacttaaattggcaacatggtgagtgtgaacctggagggcattatgctaagtgaaataaatgagatacagaaaaacaaacactgtatgttctcacttatatgtggaatctagaaaagttgaactcacagaagcaaagaatagaaaggtggttgccagaggcaggggactgggagaagtggggagatttggttaaagggtacaaagtttcagttataagatagatgaataagttctgtggatcgaaggtacagcattgtaactatagttctacagtatttttaataatactctattgtatacttgaaatttgccaagggaatggatcttaaatgttcttaaccgcacgcatgcattgtgtgcgagcacacgcacaggtgtgagatgatagatgtgttaattaacttgattgtggtagtcattttatattgtatatgtatatataaagtcatcatgctgcatacctaaaacatatgtaatttttacttgtcagttacaccccagtaaaactggggaaaaataaagaaccggtgggaaaaaataattaagtgacccaaatttttgtatcatagtggatgaaacccctttgctgtctctaagcttaaacaaagattcatcttttcgaatggttgcttattttccatttctttcttcaactcattaaaacttaatatatttgtgggacagggtctttctctgttacccaggctggagtacagtggtgcaatcatagctcactgtagcctcgacctcctgggctcaagtgatcctcctgcttcagcctcccaaacagctgggattacaggtgtgtactaccacacctggctaatttattttttatcttttgtagagatgaggtctcactatgatgtctaggctgattttgaactcgtgggctcaatcgagcctcctttctaggcctcccaaagtgctgggatgacaggtgtgagatgctgcatcctgagcccctttttttgtttgttttttgttttggcgatagagtctgtcacacaggctggagtgcagtggcaccatatttgctcactgctacctccgcttctggtgttcaagcaattcttgtgctgcctcctgagtagctgggactatggatgcatgccaccatacctggtgaattttttgtatttttagtagagatggggtttcaccatgttggccaggctggtcttgaactcctgacctcagtgttctgcatgccttggcttcccaaagtgctaggattacaggcatgagccaccatgcctggccccatttgttaatttttaatgtgaccattagatcttctgttttgctaatttctgacgttgtttttctcctttctaaacacctccttgctccatgttgaattttaagcatatggacagtggcatcattagaaagtttcccatcattccctgtcatgcacaggtgatagaagaatgtattggtgcttcaaactgattattactttttacctccttgatgaactcaatatattattacgagagtggctcagtttcaaccctggaggcatcaaaaagaacaagttctaaataacatcctcctttagaatgcagcatattttaactgtgtctctccatcttgcacatcaccacttccaagctccatctctaactgtacatatgctctctgtgtgtatgataatactgctttccccgtcctctcttctcctctctcctctctttgaatatttttttttttgtgagccttaggaacatgtacactggtcccgtagagtgacacaacaaaagcaggctcttggtgtagtcaggttttgtccttgtaaatgacatggtacaagtgcatgcggtggattaaaatatgttcaccctgacagaaatcttttagttgaagtgaaaaagcctccgtcaattctgattgcaacaaaggttgctgctgcgagtgagagggacttgccaagactgcaagtttttcaagctctattctggagatacgtttgttacttggttctcagctttgacttggttataatcttgtcttggcttgttctctttccagaatacactagttttcatttttctttggccttttctcaagatttatgaaagggggtatttagctttttgtctggcaaatagcaaaggctgtttgagttccctaatcaataattgtaaaataactagaaattgatctatgccagctgtaaacccatgcatgcatttattttttctttttctttttcttttttttttttttttttgagacggagttttgctctgtcgcccaggctggagtacagtggcacgatctcggctcactgcaacctctgtctccagggttcaagtgattctcccacctcaacctcctgagtagctgggattacaggtgcctgccaccatgccttgctaatttttgtattttcatcggagacagagtttcaccatgttggccgggctggtcttgaactcctgacctcaaatgatgtacccacctcagcctcccaaagtgttgggattataggcgtgagccaccatgcccagccccatccatgcatttctattaatgtctgctatccttgagaaactgtacataaaacatttttgtccccacatcactgaagataggacagaagcaagtgacagtcagacaactgtgtattaagggtatgctcttacagtgctcacagtttgatatatggctgtggggctgtttctctagatttgtaatacatactttgcaggtgaaagtttctggaatgtgagtatagcctcatttgggagttagagctcatttgggagttaggtgtaggtagaataacattgtgatttgaggctactgccaggttatgccttttcaaaaatagacttttcactcatttggcatggcctcccctttcttctctatttggcctgaaattcttaatttccctctctctcaagatagaattaagggcaagtgtgctggaagtgtttaatttggcaagaccaccattgatagacacatatgttgcccgggcaaaaaagatgctggttaatatttggatgagaagggtacatgttttcttcctctcccagttgtggtgatacctgtcagtttgtcagatactattttgctaccttgtcactgtggaaatttcataagacctaagcttccaactggccagggcactgttattttgggaggacttacctgtgctcacagattatagtaagacacttattcttaaataacttagaagtaagagagaaatagtggtcttgggataaagcttgaaatgtactgagtggcttcagaacaagaatggcctgttgccgatggactatattaatacatctaaggaaaagatgtgccaatctttatttttcagtctttaaaacatggttttaaataaaaaccaagtaacaaatgtatctccagagtatttaatatcatgagacatgtttacagtgtgctgtttaatagaataaaaatcatgatactctttaatacctgtacatctccatggatggaaaccttcatagtaagattgttttttcttttccttttttttctcatacttctattttttttattatcacagcaaggtgtgagaatttttttcttatacttgaaaaatgcttttctgtgattgctaaagtctctgaaatgagtaagtattaatttacaaaatacatttcagccattaattattatttagaaaagaatacatgtatagaaagaaagaagagattgtaaaagaccagcaatggttgtgttcttctcctctgccctggtgtaacaactctggcccttgtaggtctctgccttttgtggagatgtttataataagccctcttagcctcatgcccgtcatacattcaggccgtaaagcttatcaaatagccatcctgttatgatttagctttccaggtacttggtctgcagaaagagtatatcttagcaggaggtcccacatatgtgttcttttggccagattttattttattttaaagcaataatttggcccattggttgattcgtaagtctgtgtaaatttctcagcctgttgacaaactagtcttccaaatgtgcaatactaagttcatccagagtaattctttaccttttgataggtggcctgaagttgtttctagtaatagctcctgtaccacgtgccaactgggcttttcattttcaaaagtttattgaagaaagaaaattgagggctgggcacagtggctcacgtctgtaatcccagcactttgggaggctgaggtgggtggatcacctgaggtcagaagcttgagacagcctgaccaacatggcgaaaccccatctctactaaaaatacaaaaattagccaggtgcggtggcgcagcctgtaatcccagctactcggaggctgaggcaggagaatcgcttgaactcaggaagcagaggttgcagtgagctgagatcgtggcactgcactgcagcctgggtgacagagtgagactctgtctcaaaaaaaaagaaaaaaagaaacttaagaagggtgtgccccagagggtgtgtgccccgggatgcccagtgaggtgagaccctcatcagattggagtggcgcagccatttcccagtttggccccaccattgtattgctattttagggccctagctcctactttcccttttattggacccttttctgggcacctttcgagtagatggggtcaacttaccttgcacaatcactgtacttctttttagaccttgaagaaatcttagtaatcaccctatctaatctctaccttttcttcatgaagaaagaggcccaggggttttgggaataaaccgaaagagtcagaaccagcctccaggtctccaggttccctgtctagggtatatttcagtctttgtggtggttttcagagaggctctcaggattgctgaacagagaacaagaaggcagggatctttctgcacatttgggctggcttgggattagcagttacactgagggtggggaagctctctccctctgctgggtaagccagacacacagagggcatttggggtagatcgctcttcagaagaggcatggagatgtatatttgtttttgtattctctcctgttttctgcctaatatgttgcagttttcttagcagcccttcccaccatttacctaactcctcagcctaagtggctgggcaaagattaatgtcataacttcctagatagtgaaactggtgtcttatgctgtaatctctcttgaatgatgaggaaaaggcctagactatcagttatcttcaagacgactgttacaatgagtgagatagtgagtaaatatctgtagcctctgtgtgttcttacttgaaacaaagaggcagaaatatggtcactgaatacagagaatgatgatcattgatagacctcattctgtgattataatgacattatattgtacttatgtggaattataataaagcttttacaatttataacatgacttgcctgtcataaccaatgcccattgttttagcaagagtggactttttcttctcgctcttctttatgtctgtactgatgtgtgtttgtgtatgtatttgacttacatttccattgattgaagaattatttgtatagggcctactatatgctaggcattgtggtctatatgctgggtatacatcaaaatatatgtataaaaaatctttgccttaatagagcttacgtttcagtaagaggaattggtgtacaccatgcttgatagattttaagaaattggcttatgtgattgttgggactgtcaagtctgtaatcttcagggcaggccaacaggcttcagattcagggaagccttaatgttgcagtcttgtgtctgaatgcaatctggaggtagaattccctcttccttagagaacctcagcctttctctcttatggattcaactgactggatgaagcctgacaaagattctcttttttgagcaaaactttagtcaggctctgttaaatcctttctgaatagactgatcttaggtttccctcttgtagaatccactttgagcaagaatcccgctaagtcagttttcggaaaatcccccacccttgttatctgaccaccctggatattatcaccctggcattggcttcagcaatgatcctattcagtcagctccttatccttgatgtttcctcttgatacttttctattcgctgatcccccaccttgctccttggttataaatctctgctcttccttgttagaatcagaattgagccaatctcttcccctcactccaagacctcattgcattagttcctccacctattgccatgggccctcttgaataaagtctgctctgccgtcttaacaagtatgatgaacaactttttctttaacaggcccatccacattataaaaggtaatgttttattcaaagtctgaagatttaaatgttaatcacattaaaaaaaaaaaacaaaaaaccccaaaaaacaaacaaacaaaaaaccccagctagactggtgtttgaccaaacatctggatatcgtagtctagttgatggacattaaattaactgtgaaagcaattgcctccactttctagatgaaaaaaactaacaagtactttttgccctgcattgcaaatgatgtagaaagctaggcaatcatgttcgtaatatgcacaccaatggctgtagagtgtagaggtgtttgctttgttcacgaccatggttgtgggtcttttctgcataggtagggaagaacaatagttgattgaggaatgtcttccagcccaccccgcacacacacacacacacacacacacacacacacacacacacacacacacacaccctctgagggaaaaagcctcctttctaccttgacgttgttggtgatgtgccctgccacacagtgtgatagtttgggaccctatgacttccctgggctaaggcccatttagagaagggcctacgctgactcttccccagttgcagttaccgtttttgatggcttcccactttgcaattccttgatgtttttgctcagagaggaaacccatctctgcggtacatggtatggcctccatttttgaggaattttgtggaggacaaggtcatggagcttgagacacatgcagtctgtgatcaggcttatgctttatctgagtaggaccacaatgagcctccgtcagggcaagctgtatggacgtctagaggtacaggcagatggcgagggacgtcgagtgcatacagaatggagatatctgctctacttggcccctcagtgggactgctgctgtcctggtggcttttctgggcaggattttgtggaatgttgggaattgtaccctctgaggaattgggcctgctgctgtgggctccccttgtctctgaacattgtagagtccgtcttttgttgagatgctgaagacagcccaggttgagggctgtggtggccccatgttggcattgtcacatgccttcacctctcaaccactgctccaaaatttgtctctggatggttgcctgaggataatccctgaccctgtgtccacaaaggacgtgggttctgccagccctgacagtttcttccacattctcctaaactgtcaggccagcaaaatgtctagtgtcgtggccatgagcttcctcttgtaacagagccatgtaatcagacataggtgacaaaatgttgccatgcctcgattcattcagtagaatagcagcccatgggttttgtgctcctctgcaccaggtgctgtgtcaggagatagggacacaagatggagcagaatccttgctctcaagaagcttagagtggctgccatatacaccagagcaaggcggacccccatgtgccttggaagcacatggcaggcctgctgctgccctaaccctcctgcctgtccctctgcctgggacatcctcccctgctttctaccacacctctcagccctcttttaaactttgcctttcatttcatcccatagcataaatatctcattcttcaagaagccttcctgatttcctaacacagaaatgatcacaatcttctccatatttccaaactcttttatgactcttttatggctagggcaacccgataatttatcatccaaactgggaaagtgaaaggaggcactgttaattatacggagacaacacacataaactgggatgctccaggcaaaccaagacgtatggtcaccctacttatgacctttactcctgtttgagtaaaatacagtctgttcaagtatggccatgttcaaatgtgaagtccgtccttggggtgggagaggcagaagttatttatacttgcatttccatactgggatttacatgcaacaggagctcactaacacttcctgaatggaatttatgcagttcaccatacatgtcctaagttgagcagacctgctgggacctccaggatagctggcagggagaagagaatcagtctgaataggcagagctggggtcagggaggctcagctgtggactggctcctttgagttgtccagtagtccagtcttggtataatggcaatttggtcccatgctgggctgcatttggtcaacctaaggtcagatctgttctgttatgtgagcatgaagtcaggatgtccctcagggcagtctggaaggtggtggagctgtggttcctgagtagacataggagcctcgttgtggggagaaatagagcctccccgaaggtagacaggtgacaggctctgtttctccatgctgtggctggcaccttcagagtcttcattacatctcaatacctcctgccaatatattaaattcacagcattggagaaggttataatcacttagtaaggccgcggaaagttacgtggagtgaaggactctataaggctcattttatagactagctatcactgaggaatttccttgatggatgacattagttcatggacttttacatataaatgaaggacttgccgtttaaacagtcctttcactggccagagtaggcagctattggcataatgaagtgaggtattgaatataatattgagtttattaccacatggttctgaaataagtaaataatggatacatttatttctactttatagatggctgtgagagacctctttagaacacttcaaaggtcttttgaaaagtgcagtattttactgccaccttccctgttgtcataattctttagtgccttggggccaactcccattggaaaggtggacacttaaaatccttttgtaggtaatgagcatttggttttactgcagccaataatttggactccagtggaaagctgttagtacaaacttttgagcctacaatactataacactttttatcagacacgtatgatcagctaactctatatggcctatgtttatagtatttggtatgaaagtgaactgctcatctctctattcaagactggcttgagtactttcctttctttagttaaaataactcaggcttgatattagttccttagacaagattgtttactatttgattctttcatacacttcttgtccttcactggctcttatgaaatctgtagccaacttttaaagttgcgaattttgtgccaacctcattttctccatcaattgtggatgcaggtggaaaagaaagagctgtgcagttctagcatcgagaggctcaagtctggccggtcattaaagtccctctgccaaacaattagagagtataaatgccccagtggattcagacttacagggtgggacctaggcatgtgtatttttaaaatacaccattctaatgcttaaccctcgatgtgaaaaatggattaaggacatgaaagaggcaagatgtcattctcctcttgctgctggttggcagcccagtagttgggttggctttggtcttgcctagcaaacctgctggtcagtgccaaggcctctgtgcccatatgcactttcaagcttcctccacattgtatgacagtgaaatctgtattaagcatgtatgtagcagtcatgctcttcatgtttttaaggaaaatatttctactcatctttcctcttgggcctctcccttgatgccacctccttcctattaggtcttagagaagagagcactggctttagagacaaaagacatgatttatgggctcttcaactaatgagcttgtgatgtttagctagtcacctcacttacctgagcttcagtttcctctcctctgaaatcaagatggcattttcatcatagctttcttggtaggatcaaatgaggcaatgtattaatataagcaagcactttgtaaaactgcaaattctatatttcttaataaatatatttttgatatccagtcctatagcttagcgacagggatatgttctgggaaatgcatcattaggcaattttgttgttgtgtcaacatcatataatgtacttacacaaacctagatggtatatcctactacataccctacatacctaggctatatggtataaccatgcacagtcaccgttcagtatgcagtctgtcactgaccaaagtgtagttatatggcttcgtatatgtgtttcccacagtggctggatcagtgcacctcatccaaatggttgatcaacaaatattcccaacaggttatagaaagaagattctcagagtaatgatgtgtttctattgcttctttctaaatacttcccttctccttgcacccctccctgtaaagccagggactctatttcttgattcattcctaggaaataggatttcttttgcctacagttagtatctagttttggagacccactagttgatgtgtggagtttcctccttggccttttcaacagtttaattctgatcacgttcttaaaacaatatttcactacttctgattttcctaattatcatgcagacaaacagtgggggatcatgacattagaattagtgagtggcttatgatttttgcctcagaaagagaaactcttgctgtttttctctccccttgagcaacacagcagtaatgaatgagcaggtccggagtactttatgatagatggttaagggtgctgtgcctcagccaacaggcctgtttccctagcatctgtcacaattcagagtcattagcatacctttaatggtttcttttcaaaataatttctactagggcatttagaatgcatcaaggaaaaatattgagttgtagagatgaggaattttaaatgtagacaaatggttttcattcccttggatgtaattttgataaaatcaagaaaccacatagcaacctactatggagtataacataattcacagcatttaatgtgctatctgggaattactttttcaggctttctaaaatagttaatgaaaaaaaaccttctttaaaaaataacaaatttaatgtaaaaaaatgtttaaagttgctgtttgccagcacccttaactccacaacagtcttcctcctggtgtgtgtggatggcccgttggctgtcttacatactctgtcttatgatcaatcagggaatcaatgtgatttgcatcttataagatgacaaatgttttgtaaggtatatgccatttttactagtactggtaaatattaggctcgttatttatttagttgtgagggggagatcttcagagaagcaaattaagccacatctttttcctaaaatgtcaaagttgagtgagataaggtctctattagattttttataatgcatttactctattttggactggggggtacactgtacatgtttgttatgtgggtatattgcatgatgctgaggtttagcatgtagtcgatcccgtcacccaggtagtgaatgtagtacccaatagttagtttttcactatgacttatttctttaaaaaagccaaatgacctctttacttttgaaacatgcaaatcaatgtatacttttctcacagttatttgaataatagttatatttactaaggatgctcttttttaatatctactgatatattttttcatatttaatgttttacaacagaattatgaagagggcagaacacaaagtatcccatattcctaaacacaactgagaacctcctggaggaaagctgatgtggtcaggtttatacagctgaccattggaagggccagagcttctaacttgtgtctactttttgtgtctagactagccattctgtgctactctacaatgatctttgtagccttaccaatattataattttcatactgcactcctaactcctttgtgaagaggtggtatttttttctatatttttttcttggtgattaggaagcaaataatttgattttcacaagtcttaagacatattttattaactttagggtctgaatattggtttctcttatttgtttgaaatactgacactatatgagggcatttattctttgctaggtgtgttacttttaaaaattattgggttgtttaaaattcagaatctgttcattgaattgaagaaaagtatttttccatttccagagtacatctcgtacatttttgcattctggaacaattactgttatgctacttaggcaaataaacataggctcattagaagatggaacttgtgattttaaacttcattagtatgtatttttgttcatttctcatccacagggtccaagaaagctcagtatcttcttgttccgggcagtgggattgagtaggggagcaggaaataggcgtttgtcctctctcttttaagatgagtcctgggaggcgtgcttgtcactttccttcacattctgttggtcagtactcagttgcccatacatatccagcatcaagggaagctaggaaatatcttgtttttccctaggatgatatgagccatgcaaaaattcagaggccctgttatagatagatatatgaagagttagtatctgccacagttatatggtcttcaaaaatgatatttgagctttctgatgcaaagccaattttcaaaactatttagatatttaacatttcttgacaactcctttgcgattgtaaatcacattgacgttttgattatatgtattcatttgaaagcactaaatactattattttcctagttattgtggtgctaaagagttgtcagtaaaatctagaatctttaaataaattttgaaaagggatgacggaccaaatggaattctaattacttgatttcaacacatttctctttcatttgaatcttttaagagaaaagtgaaaagcaacattatccttgagaatttctctctcagcatctaagcagccgttttaattacagaaaatgtcttcaaaatctgttttgccattttaaagttttggctgtgaaaaagtcaattgtcagtgtgtaatggtggaaaaaatatcttaaaaagccattgatatagtatgttcagtagacatgtgttacttgaacactagtagttgattttccatagaaactttttcctcttgagtttgggtatcgttgttggtaataaacatccctgcagaactgactgcgatttcacatgaattgtttaaaaataaaccaaaattacacattatatattccctctcccaaaggaatctccttgggaagctgttacgttttctactatagctgcccttatcgaagtttcggtcctaccctcccttctccttctccgtccctcactcttccaccattttcttcccctctttcttttctttctgtctatcaagagttgcatgaaaaagcacatctctttgaccagcctccaaggtgataaatcttcatcagctgagaataaatttgatttttggaaacagccagcagtcagagtcaaggtcagtgggtaataaaactatagtaacattttgagttagagatggggagtgactgtaaagtagtgagcccatttttcttgagtttttggaaggcaaagaaggaaatcccaaaacaggaaatctcagtttattgtgtatatttgttaaaaacaaaagaaaacaaaacaaaaaactagtcttgtttgataatgacattgcaagttttgtatattatttatttatttttgtatttgtgactttttccccccaatggttgtgtctttcaactgactgtgggatccttgtcacacttttattttatgttgataatccttttggcattttaaatgatatctgtatgtcatattgaaatacagtaattaaagtggcacaacataggaggaaatcaaatttcatttaatgtttaattacataaattgactacctgatagatttttttttaaatttggagtttaacatttgaaaattggcaggaaggttttaatgcttgttttaaacatagtcatcatctagatctgtactatcaaatgcaatgatattacttattataacattatcaaatgttatatgtagtgccatcaatttatattgttttcaaagtgtaacttttaaaaatagagatattcagcagttatactaaacatttgagtctttcaatgtctgttaaatgtaaaacttgatatttattaaaagagaattttaaacttagaaaaacagtggttttcatttctgtatttcctttgaatttgtttggtatctcattttttcaggctataatttagaaactttttattttacatgcttactggccatcagaagagttttttttctttactccaacttcatgtgtaaagttttaaaataaagtgaagatgttagtgaatttgttttgaaaggaaggaaggaaaagaaattagtacaaaagctaaataggtatgcttagatattgagataaagtgcctcctgtttctggttatttctactacatggcttatttcattcaatttttgtttaataaaattatgccttcaactatgataataataaatttaaagcattaacagtagtgattagctaattataagaaagttattttattaagatatctaattgtctacttgctttaaaaataaccatttattttccgtaaaaagcagtaatcttcattagattttctagtatctgtcttgtaaataagtactcattggtccactttttgagaaagaggaaaggtttataactgtttagcagaaaagtatggtggtttgtgtacattttctggtagaagagacaactgtcgaagctcagcagcttggcaaatgttttagggtggtataaaagttactgtggatttgaacattaagaaacaataagaataaatataaaatttagatatttcttctgattaaaaacattatctaaatacattgtaatataattcgctcatttattcatccattcatttggtaaactatcacatatttcagggtataatctcagtaataaagatgcaagtttgcataaaaatagaatccatcactgtggagctcagtctgatatataccaggttttactccatatttataaaattataaaccaatatatttatactctaattaaaaatggaatatatttttataaaattagactaggagactcatcatttttggatataaatttttggagttaattcttaatgacctgtaacaataaaagtttaatgtttgccattccctactgagtggagctccaaatgacatgaaattccagttttaactcagatcttgagcaaactgagcaacaccatagaggagctcttctcagttatgttcctgccctagtagtttaaaactggctgatttttattctatagtatttatagagtacctactatggaccaggcactgcttggtgcttatttttatatatcaggtacatttcaaaggtattaaaataattttgaatttttcactgttctctttctctttctctctgtctgtatataacagtgagaaatgtgtgtacattatatgtatatgtgtgtgtatacacacacacacacacacatatataaaggccaagtaaatttttagttaaattgaattattccttaatggttacgtgagaatatcttatcaagtctaaatatagtaatcatcagtatgattttttatgtttgatgtaataagaatgtgtctaattttatgcattttataattattgaatgtatctttggacagtgtgcatacagatagttctggttatcattttcaataaaaatgtttatctgaacttttgtaactctgccctctgaagattatgcttcatagaatttctcatgttcatgagcataattgctaactggtgtttatgtagattgcattgaacaatctttaggaagaaaaaagcacattataccattttcttttcaaatttaattgagaaaatcttgtgagcacctcctgtgtgcctagtgtcaatgcctacattttagttgagcttcaagatttatctaagtatcttagtttttctttttataagttcttttaaaacttttattaaagcaagatgagtgttattaaatgggttgcacaaatgaccactaactcgtagtaatgttaccttatcagcttactctcatatgtgttttcttcagacccctcttttggtcttttccattctcatgcttcctacctatcacttgtaaagaagtttgaggtcatttaatcacatctaaaccattttaacttttaatagacaataggaattcattttggtgcttggcaaccccattgatatgtacttgtgtgaatatgtttatacatatatgtacaatattaaagaaatctcatccattcttttatatttatttaccacaaaaataaagttctggaataccatgccttacttgaaaagcattatttctgagtattttcacatttatttaattaattgttttaatgttaggtagtgctggcttaaggggaacctttttgaaagctgaatttttaaaacaatgaaaacccaagaagtcttcatgatttttaatggcaattttaaaaaagcactctcattaatgtcaggaacagattaaaatatgcattctttatatttttcaggaagtactaaccaatgccgttagacaagagaaaaaagtagaagggaaaacatggaaaggaggaagtaaaatttccattatttttagattgtatacctgcaaaatgaagaaagccagctgacaaacttttataagctgagagaattcagttaggtaactgcctataaagtcaataaagaagttctttatgtactcataagtaacgagaacaaagaaagtttagagtaggctttcattttggaataataattttgtaacatattgacagttatattaaaacaaatgcaaatgtttattatacaaaatgtttattatacaaaaatttgcaccagtagatttgaaaacgtaaaacatccataatcctaccactcctgatgactagtgttaatacttgctgtttgattcctgtttttaccatgcatatatacttctggggagtgtatggataggatggaggaggtacaaatttcggctcatattttactactatttatacatttttttttacaacaatgtaattattttattacaacaatattttttacagcaataaaaatgtaatatttctattatagcaatgtattgtgactatttttttcatattactaatattccagctattcttttaatgtatattttggatatttgaccatttttccatttttggatatttgtggtgttttcttttttttttttctttatccttttttactattcccgacaatgctaagaagaatgtcttcttggctaaatcttagccaatctgcactcctgctctctcagatcactcagccctgctagagtcttgatagaggagcagttggagaatcaagggagatgatgatattaaaaccaacagtactgtgttcctaatttttgggttgccagcagttgtaaggcaccctgtgtcaccaagaagtcagcaattgattggttaaaggggaggatttgagaattgtacattgattgctaaggagcaattaatgacttgatattgatgacttattttctgtttttgataaatttctaaaagcaaatttgctgtttaaagagtatattttaatgttttctttctgtacatgcatgctagtaggagctcatgcccacacagagaaaactttctctcttgaaagtttctatcagtttatattcctaccagcaatatgtggtgggaattacttgcctacttattagcattgggtgttacaagttctgttgttatttatcagtttgaaagtgaggaagatttcacttttatctgtggttcttagatgaagagacagatagtgaaatagagagacatcgccagacatatgtggctaacctgaattgctcattcataactttccttttcagtaatgtcttaacatattttttataagaccccctcattgtttgcatatataagttttacttttagatagtcaaatctgtcagtcttttccttttatagtaactatatgcttagagtggtttgtctccctttaaaatttatttaagtcatcactgctttatttgtacttttgttttcaatttttttactaatgaaattttaattcagtcttgtgtttattttggcatgtggtatctcaccagctttttctaaacagttttgccagtagtagctttttgaataagtaatttatctattctctttagagttgtcttggctattttatattaagttctcatgtagaattaaggctgtttctggtctttgaattctgtccaattggtatatttaccaattcttgaaccagcacaacattattatttattgtatatttacactcaaaaaatatttgtcaaggcaattccccagtcatgactattaattttcaacatttctttgctagtatgatttatctgttcttgaaaacgaacattagtctcttttcattaagcattttaaatactcaagtctctttgttgttctttgtgcatttagatacctttatgcagtatctggaatgtatgtataaattgaaatttttgtgcttctaatatttagatatagtaggtagtttattcatgaaaaggtctatttcttagagtatgcttaagttaagacaaaaaataggatcttttcatgcttattttttatcctttattttttcttctcattgttggcttgggttcctttctctctgtttgcaaccagaccctttattacttgtgcatggttggacatgctgtaagcaatagagacctcctgcagcaaaccagatacctagtggtaggctgcacatgggatgtagcttttcttattaacaaaccacgttagtttattcacctttgaacttattgtagccaactcttcttcatttcattatgaacaaagagaattacttgtgtgctttttcagaggacatttgtgttatatgtttttctccattcatgttttatagatgttgtcacagagcatcttcatgtctgtaataccagtctagatcccatcatattatttttagctcttcaatgtatttcttatggatatcttcttttaatataaaaacacaggagaaacagaaaattcttccaatgtataaagccgcaggattcaataatgtaaaattacagtgggttctgttaaaatcttcagagaattgcaattattaacactgagtaattttcttctttcttaacttgtagttgttagagaacaatttagaaaattgatgcttctgtcaaaagtctggatgggtaggatacatgctcagtgtggatatgacaacattaagaactccacaacttttactaactatgaaaaaaagaatatattttatactccattaaactgttacacatcatcaataattacatcaacccgtgttcttgtctgtatcaagggtgataaactagtcactgtagagagtttttctagtgactgtaacagtattcccctttcctcctgcccgtgtgactttctgccccttccctctctccaccgctctttcttattagaagtgtgttgtctcctgaatgtttccagccaatgaatataggcctagaattgtatagggacccagcagggatagttcaggaagtcacgtgacttagagtgatttgctttctagctctactgctttctgaatatattcctttgggcacagtccagtctttgtatctcagttttctcatctttcaaatgagcataggtacttacttcagagaactgttttgagagtttgaagagatatgtgaaagtgctttgaaactgtgatgattatgttaaattcctattgctatggttatttttgacaatgttaatcaggactggcagacccacagacagattccacaggtggacttgggaacccaagagctgttgttgttgatctcccatcccgtcctgtgcttttcagaaatggctccgtgcctccctgactgcactcctgccccatcagatcactcagccatcccaggctcttagcagaggagcagttggagaagcaggggagatgatggtattaaaacccaacggtattgtgttcctcatttttggtgttgccagtaatataaggaacccagtataaccaggaagtggtaaacgtggagggtttgagaattaaacattgactgcaaaggaggataaaaatatcagaaataaggtggtggtgtttgaagtgtcagaatggcatggctgttatggtgggtggctgatggtcttagtgggggtattttgaagaggacaaggaaagccattgttgtgagctgaagtgtgggtccgttgagaagtagggagcacctcagtgtcatgtagctgaggatggcctgaggattatagcatccatgtggggcctaggcagtaactgcacccttgcagggaactaccctgtcatgaagctgtaagatatcaagtgccttgttttaagtattatcttcaaggataactatgaatccaagaactgttatcatcaatatttagctatttcttaacattggatatagtctcaaatttgaggagagaaatgcaaagaactgttgcctcaccataacctttttgttacaattgaacacatagatcataatgctttagtgggtagaattgtgtaagaatgaataaaatcaggcacatataagatcggaaagcatcagttttacagtattttgagaggaaactggccactgagaaagtggcttcttgggttatattggaatttggatcttggatgcagagtccaagatctaagatttcccctggactcttctactaaaaatgaaaactgacagggcgggtggaacaataccttaactcatccactcctgcatggtaataaaacttgttcagtaaagccatgtactttccacctgatgccccatgcctagctttattgacacctgtcaaggatgtctttcttaacaagctcacttatttccacccaagtcaatggaataaactcttagactgaagtgaataatggaggcttgtgattgttagaagccatcacagcagtagtggaaaaaatgactgctgaaagccagacgttgaaggaagagagaaaatataaaaagtagaaactatattaaagtgcttcagtggtgaatattcctaaggacggccatggtttattcctacaacaaaaccaaacccctgaaccgctccaccactttcaatccaattgcctgtaaggatgcagggaatgaaatactctgaggaaagatttcccttacagatggccacaaaatttaatcagggattcacagtgtatcaagggataggccttggttatatagaaaatgcacttaaatggaacaccttatttcccagggatgccagataattgagttatacctaaaatcttgaactgtctgactagcacacatgcatacacatctagcttctgtgtgctgagaggtgttaaatggtttggaaactgtaattaagtagctgaaattgtgctgcagaaccactataagcattgcctcatgtagtatttcaaccttaagtgctaaaatttcatctgagtagctgtgactaatctagtctttatttgtaacacattcaaattaggaggtgtatgttcttgtccatgtactttctcattagcactaatattgctaatgggagtgacaaatgtattatgttttttccttcgatcactcacgccttttagataactagctttttagaggaggtaattttccttgtgatacatttatggagctctgtgtttaacagatttactcaaaagaatatgtccgtagggactgtttattagttgataggctccggggaaaacaagtttggattaatcagtttgaatcacagaagaaattgtgatggcagttagtgtaaatgggaatagcacatactcatttgttcctaaatgtctttccagcattttccgcctagtttatttgaacttggaaggttctttcctaggctgtttactttgacacttgaacacaccctcttcattcttcctttccaaattttcgtttgttcaaaggactccttaatgtttagagagtcactgaacagtgtttggtacagtcataaataacaaagaagatacattctgaaaaatgcatcattgtgtgaatactagagagtgtacttacacaaccctaggtggcatcggctactacacacctaggctaaatagtatagcctgttgctcctaggctacaaacctgtgtagcagattcctgtacttaatacaattataacacaatggtaactctttgtgtatctaaacatatttataaaggtacagtaaaaatatagcataaaagataaaaatggtatacttgtatagggctcttaccatgaatggagcttgcaggactggaggttgctctgggcaagtcagtgagtgatgagtaaacatgaaggcctaggacattgttgtatactattactatagaatttgtaaacattgtatacttaagttatgctaaattaagcttattttaaatattatgctacagtgctgcaacagctatgagttactgtgtgataggaaatgttcaactccattgtaatctgggaccactgtcacacatgtgctccatcgttgaccgagaccagttttatatggagtaactatatttaaaagtgtaaagccatcttcttcttttaaagaatactgatttcattaagggccagtacattcggttattgttttccctccaccttcttagcaggtactgtttccttgtaagagatcaagaatgacactcaccagggatagactacctgctgctaccaagtgtcccctgctcccaaacatgcactcaacttcacacccagtggggtcagtgggttgtgtagacctcgcagccgcatctcctcttggagcactcttctcctcatctccccagggctcagagatctaaacgtcctgggaaccttctcctttcctgtttgcttgttgccggtgtcggggacacactgcaggtttaaagtgtgagcccagtggaggagagctgtcagtttggactgtggcttatggggatagctttcttgcattccaatttccattcgataggcacttttccttagacaatattataaggagtagttagtttacctgggactcctgagttttgatggtgatgtactttagctgtgtattgaattaaataagaacttgcctaggctgcctgtgttgatttccaaaattaaatttcaagtgactctggaaccacccatttccaagttgtgtactgtttcagtcttttcttggtgagttacttaaggtttttaccccagcttttgggaatagatgtattacgtgttcatttgggtgcagaggaaagaatattgactttggaatcaagaaactagactacgaatccttattctcatttgccttactttgagcaagtcatttaacctcaatgagccttagtatttccatctgttaaatagggtatgattcatagctacaatatgtaccacacaacatgattttgagcattatatggtataatgtagatgaaagtgccttgtaagttgttaggaagggatgtaaatgaaagatacaactatgtaatatttaataattagaacaatagctgtgtttggcaggtctctaaaatatcataaattttcataagttgttgaaggcatttgctggggttttaaaattcctgccattttatagaaacacttcatgtattatttttaagtaatacaggtttttaatgaattaattttcttaatggctgtatgtttgtaagtaaaacaccttacagtaataaggtactttgaaaaggaaatgtcttttaacaaatgaaagatcagttcagtctctttatgtagcacaggctgaaataccagccatcatattaaatcttaatcagtaacaaagtttcactaattacaagagctggtttatatattgggtaaattgctgtttgtaaacgttggattatattaactaacactgctaattgccagccacagcctaagtgtaagattttctgaaagcttccattagtagcttgaagtaggcactgctgcctaatatttcagtcagtgaggaaaggcaggtaatgacattatgaatacaattataatgcaggccaatttcttctaaaatgcatggaagtattattactttaccaggagtctttgaaatatgatttatttaatgcattccagcccccataatattaagatataattgagatgtgaagtttaaaaaattgtatgcagtcagtatggtacatgaatcatagactaaattgcttataattttaaaggcacttaggggaattgtgaaatttatataatgcattcttatgtttggaaaaggttataagaacaatagtccagttattttagtatttcagtcccaaaaataggattttttgagttgctattaaacctaagatagctgtatacatgagcaaatccaaatctttctatgtccagttctcattcactactttttgtgagttttttctttaaacctctcatatttatcaaagctgttgagtggtatataatttctataaaggccataatctagtttttataaactgtacaactgaatgaatgacagcaacataaatgttgccagcatgtttaagaagggaatcagttaaatggtacttggaattttgatgattattgctttgaaaagactgaaaatcacaggtcttggctttatagtttaattacttgcttaacaattgctagtgattcactaaatcacaaggcttccaaacaaataacatcagtaactctgctatgcctgagcaactccaattttcttgacaatggctaccaaactgtgtttagcctaatataaactgttagtttaactgcaagcaatgggggcttcaagcatgctattgatgagatgccagcaaattgagccctttgccactggtgacacttgtgtcaagaataactttagcacgttttatcaagaccagttggagaagcaaatatagtaattatccacatcctttttggatattaggtttaataataatgagtgctgtccagctttccagagtttctaattaataattggttcttaagaacacagcatgtggtttctcacagtttgaataagattgggaaatagggcaagcttaaggtcctgcatacttttatgggcctgatagaaaaggcagtttaaaagaagagcaagttgtaggaagacattcaggtgtgctggtgtgaaaatttaatttgtgcctttattgacctctgctccctgaccttgctgtgtcttaactttgtggcatttccatgagtacactgctcttccttcttgcccttttgcaaccgcaagcttttgatttcaaatggactcttccagaattagatgaatttctcagtttttactttggtagcagctacagtcttttgctcacttgaaaatgatcttatcccctgttctttagtactttatcattgaaataatggaaaataagcatgttagacctgcatttaagaggggacaataatgcctgtcatttatcgggtgcttactcatgccgggcactatactaactccacgtacgttcttaaattgttaaagcatgaggtggttgtattcttgtgcctatgcaatggttagaatgtcccttctaaaactcacatcaaaatttaattgccattgtgagagtgggcctctcagtgcactcgtgaatggattactgctgttatctcaggtgtaggcagttgtccaggcaatggtctcctgatgaaaggataagtttggcccccatcctctctctgttttgtgtgctcacttgctcttctgccttctgccaaaggataatgcagcaagaaactcctcaccaaatgccaagcagatgctggcgccatgcccttggactttgcaacctccagaaccatgagctaaacaaacttcttttctttacaaattacccagtctttggtattctgttacagcagcagaaattgactaaacaccctatgatagaaaggaggcttagaaaagtgaagtgatttgtctagagtcaccagtcagtttggctccagactcatgctctgggctactatgccaaaccatctctttagtataaatgtgttttcttagtataattgtgaacattaccagttcagatataggcactatatgaaatatgacccttcttggtatagatggatatttacaaaaattttaaaattacaacctgcaagaatatattttacatcctgacccagagtacacacagattttaattcatacataggaagtactactacttgtgatttattgttttctgccttcttaaagtttctattttattgtattttcatattaaaaatgctagtgtgatatgctaaaatgatataatagtccaatagtaggtagcaacctccagtctgaaaaatcactgagagtcagtgctggccttgtagggttcatgtggctgagcgaaatctgtgttccactagttttacttttgctcatgtgctgcctcaggtacttgtacttctaattttgttagttttctaattttgtgaggccttgaatagttttgccagtaggcatttgtgagtgattggattctgaggcaggattaataattttcctgaggctgtctcttgccatttcatcgtggtcctttgggggtccagtggagtttggattacacgagtatactcagaacttgtctttccagaggcttcctccctttttttataaagctcttttattccaggcatgttcattatggcaactgaaggaaactgaagtacaaaaatattatttctccacttgtatcttttccatattgtgcgggagatagtataagaaatgtgttataaatagaaattgagaagatgcagaatagtctcatctttatcatcttgtaccccttgtcagacctaccaaagtactggctaaaaggctagactaaggttattgccccatgtgtctttgcctagaatgaactagcagtgtaggagcggcatcacctagcgctcttttgaaataaggtgtccatgtcatctcattcagtcctttttgaggaagcaaacatttgttgagtatctactccatgatggccctgtttcaggctctagagttataatggggaatgtgatacacaggccgctgctctcttggagtgtgtattctagtgggaaagacggtcattaaatacgaaagcaactaggtatataactatatatttggtttcagaatcaggtaagcatatgaagaacagcgatgtggggtcagatgatagagaactgtggactgcagcatttccctgcttatctgtgtcccaccccatggattgtgaatttctctaggatatagaaatcctccagagatcctcaatgtgtgagcccaggaccacgataggattttcatttgtgaaaggcctgtaactcagtgagaggatgtttcaaggaatagaaccaaatgcggtgtgtagagcagtagcattggcatcacctggaaacttatcacaagtgggactttccagcccatcttggacctactgaagcagaatctgcaatttaacaagatccccaggtgaatccttaggcaaatcagaagtttgagaagtttgagtagtggttctcagccttggctgctgtagagaaggagagttaggtccagtaagtccctcccagtgaaatgctattcagctaaacctttaatctgccagggtggaaatcatcaggtgccccagctttattcacttctgcaatacccattaagtttaggctgaaggcaaggcaacttcttctgtacctttgacatccacccacaacccagataggctacctgaaacaagtccttcacccattattattaagaaatcccactggcacactctggtcctgtatgtgtgtccccaggacctggcacattgtctcttcttctgctcagacatgagagcccttttgccagtgggcccctttgcccagggattcttttcacctttcctgtgcctgagtgagtaataaagttttctgttatgtactatcattggatcagatgacatctagttttttaatggtgttttttgttaatcgagtacatttatgagattgggggtacccaagtttgggctaagtcagactatggatcatctttaacagaaatcttggttctcagacatcactcccaaccagtgaaatcagcatctctgcaaattgggacctagtatttttcaaaactctccagtgattccaaagggcagctgagattctagagggaaaatctattttatgttgttagggccatagaacattttagaagagccttatgataaagtctggctgatgttttgcacatagtcattgaaatacatacttctcgtgatgtgtatggcatgctgagcacaccatcagaaatcacgtggccccttcttataaaactatggcagaactgagagcagcagagcagagtaaccagagttaaatttgagtcaccataatgagattaccattagattctgtggaaaatgtgttgcaacaaatatgactcagttgataagtgcaaattgcattttgcccttgatgcaaaataactgttctgtttaacgttcaggatgtttttgcctgttgttttcatctaactcagaacggagtctgcttaacaaatgtatgaaactggtcaagacctcggttttccatctgaatctgaaggtgacccttgtttaaaacttcatactctgggcggtctttttgtgtcagccttgctttttgccattttctttttcagatgacacaaaacagacaagatcagctgggagcccttcaaagccagctctaaatggaattaaaagaaggtattctgaggcaggaaatagttgttagatgaagggcctcatggggaatgattttgaggtccttagattttatgaagttggataagtcagggctctgagtcatggtttagaagaggagctcaggtggaaaaattgaaaggaggtctcctcaattttgtaggatgtaaaaatgagaaaatttagcaaaaaaggtttatgtgctaataatgagcctgatttgaaatattggccttccagcactttgatatgtgtctatcagtggtctgcctttgacgtgaaggccctgtgtgcggcagcttaacttgtgaatcctcactaaaggggaacagtgggagacggcagcctcagagtgcatgaatggcagtgattggctggcaagttgcgtaggccaataagcagtgccttccagggtaaagacctagggaagcgccttgtttttgctttgtcttagtgtctgcatgtgtttgacaagtgaacaataaaatgtgctgtttgattccacactgtcttgattcttttctgtgtccctcctgcaatctttctttttcatgtcacattacatgaggctcttttcacctctctctcctgaccctgagttctagtgttcattgctctctctcacccaggatgtgctctaattggcaaaactataacctggtagcagcagttcactattttagtttcctaattggtgtcaggggctgctggcagagcccggccatgttggattgattgatagatcagctgctgtgagtgtcaggcttccatctgaccaacaggtttattgcttttgaaacttaaaaattaatatggtaaatatatcctgcagtgtccatagtgggtctgaaaaaaaataaactattcatcattcaggagcacttccaatgttacctgaaggtcccttgggtttgcaactcaaaattttgttctatttctgactcacagctggctgttttcttgctttcatgatgcagtgtaaagctgcattatatttcccactgcctgctgcacagtgggtttcttcttttcagaagtaatgcagacagggtgttaaatgtgtgtgtcggggtagggggaggggaggcagcatcgaacccattcttcctacagaacttaaaatttacaagctcatttacactggtcagtcagagtgtagatagttaatgttgaatcagaaaaatgatataaattctttttcaagaggtatttcatttaattgacattgatattgaagatgtaacttagcatttaggcatctgagtaatcatcatcgaatataatgattagtttacccacattaatgcctaaaattatacggaaggctaaaaagtactgcattttaaaatctagttttaatactttgattagcgctttatgttctagtataagaaaaacaatacagtgaccttaacgagatcagctgttaccagtgagcaaaccactttcatgtttttgttgcttctagttcctgtagaaaagtacttcatcatttatagcaatttttcttttgtagaaagataagtttgggtcaatcttcaacaaacattgtgcaaaatgtcttgataacaatactgtcttatatttgtttgcattgtactggttttccaaataacttttatgtatgttatctcatgtggtccttagaaaaatccaaagttaataattattatttaacatttattgatgaggggaatgcgaatcaaaaagttcagtaactggatggaaatcactgctgcaacatacgtgagtagatcgtgacttgatccctacttgtcactcttgttactccacttctggagtttttccacaagagtgtgctgccctctatgtggtgagtgctgtattagtgcttccggggttacaaagcaacctcaaaacttgaactctcttgggtcttaaattctagttagaagactgatacctgcatatagatagaagcacaaagtgcaaaagggctgagtaattcaggccctggagatgggactgggccataggggtgaatgaggagaaaacctggtacaatttcttagaagagtaagtgtcagagctgcaaggggcatagggatttgaaatgtgtctggcatccatcttgagagaaaagctggatcgaaaaggtatagcgatgggagaacatgggttctactttaggatgttgagtaacttaatgttgcaagaacttagggtgctggggtgagggagggctgataacaggacaggtgtggagggtagagaacagccaaactgcctctggtggaattgttgctgggcaaaaggatagcggggaagaaagggcgaaatatgttagaaatgtggtatagccttccaaacaagtggaaacactctgcattcgaggattgttcatgggaattcaaatgatgagattatatgtgggagacattgctgaggttggaatgaaattaagagtgggggccaggtgcagtggctcacgcctgtaatcccagcactttgggaggctgaggcgggcagattgcctgaggtcaggagtttgagaccagtctggccaacatggtgagacccactctctaccaaaaatacaaaaaaattagccgggcatggtggcatgcccctgtaatcccagctactcgggaggctgaggcaggggaattgcttgaaccagggaggtggaggttgcagtgagcggagattgcaccactgcactccagcctgggtaacagaacgagactcccgtctcaaaaaaaaaaaaaaaaaaaattaggagtgggaggttaagaaggaggaagtgagttaggcaacaccataaagcttactccggcttgaagactgataagaatcacatttctgtttaagatttctgtcacttaggtttattttgaaccagcaaacaagcaattccaagggtatgtaatgagttaaggacccaagtgactggataaggctttctcttgccttagtttctcacagagtaaatccaaaattctgttgtcattacagccatcatgcaggaaataatatgccatattcgtggcaatcagaaccataggttctgtgactttcatatgttaagctgaggaaagacgcctctcagctctcaagcatctacccctttaccataaaggaaagcttcctgtgcccactcatgaattctcttcctgtctctctgggcccaccatagccctggtcatggagtatggcaagaagtaaaagatgactgcagtgtggagctcagtgactagcaagatattgacagctttagattgggttaaggacaagttatgtttcatattgctgtgtttgaggtcccttcaggatattcttgtagctgtgttcattaaataagttggaaacatatgtctggaactagggagagcagccaggaatagagagagttatgggaatccttctcaaagagatgaagctctgggaatgggtgagattgccaagaaatagtatgtggagagaagaaagaagacaagggcagaattttggagaatacttacctgtaagcagcaggctgagaaagagttgcatgggagactatgcaggagccatctgcaaggcagatggaggatgaaccatgagtgttcaagcagccaacaaaagagagagagagagagtcaagaagtgagggatccgtcagaggtgaagtttccagagacagccagtgaaatgagcctcagtgagaaactggttgaaccatcagttgctatcatttgtaacatacataataaaaaatagtgttgaaatcagaacccaggtttcaggtggttaaaaaagaggaaaagggaaaagccaggatagttattattctatgaagattttaagctttgaaagaaaggtgataaagattatgtaccttgaagaagtagtttttttgggtggttttccttaaaggtattaatatgtttgagagtcgagggaaagaagccaatggcaagagaaggataaaaaatgtaagaaagaggtgataataagttgatggagcaaaatctcaggatttgaggagggagtaggttcgagggtagaaatagtccttggaaagagaaggagaaccctgcttcagggtaagagacggagaaaagcaaggatgacctgagcaaatttaaaagggagggaggattcctcctgaatggcctccattttctcaattaagggatttattgatattttgtatccttctacgttaatgctgagtctatttattttattttattttattttttgatggagtcttgctctgttgctctggctggagtgcagtggcatgaactaggctcactgcaacctccgcctcccaggttcaagtgattctcctgcttcagcctctccagtagctgggattacaggcatgcaccaccatgcctggctaatttttgtatatttagtagagatggggtttcactatgttggccaggctggtcttgaactcctgacctcaggtgatccacccaccttggcctcccgaagtgctgggattacaggcgttagccaccacacctgtccccatttattctttagagtaggaggctaagacagcccaaggggtacacagtcagataagacacttgtgatgcaattctattccagtgtcctgagaagtgcatcttcattgctaatcagatattgatattgcttccctaagttaattggccccttcctggcacatctttcctaacttcagcgttcacccaggcctcatagaattctttcactttttatcctttatccatgatgtcactctcttcatgttacaagtcttggctggcctgtccccttcctcattctgactaggaagatgggattccctctgaatcaggcctggactccagcctccaactagagtccccagcctactctttagctggggtttagtggactctcttctggaacctggctcggttctgtgcctcgatgagagaaggaggcttgggttgccttatggggcctatttcacaactatataaatcaattttttttgtatgaataaatgaatatgttaggagatccttcagggtaaagatgtctttaggagtaggttgagatacttcacaggtaagatggtcccttttaaaaaattaaaaggaagtcttaaagacgtctgacagatttgttttctgtaaggttagttttttcttgctgaaacctacttatgagtcctaagattgtgttcctccagtgcttatgaaatctgttctgactttctgacagtggaaatggacatctagttccaagaataggcttaaattaaagattgtcaattttaaacagtttaatagatatgtaaggaatggagctattttaacagcgtctttcattttttgaaaaataacacatgctttagaaattcaagctgtttttaaccaatcgcttccatctaacttaacagcagctgttgcacactattataaaaggcctgggcgagatacagtgttgaaaacttggtgagtctgagatttgttacatattttatcaagttacctgctgtccctgcatttacagatatgctagattgtttgatgtctacttttctggatgaggagcagatgtggttgacggctgttaagttaggaatgcatgcagaggttcccgagacttggtgtgtatattcaaagaacagggactttctcatttagcttctttgtgcctaataaacacagctaaggaaggaatcagaagcattagtagtttgtagaacatttatggttttcagtgaaaccactttctatactgcattttgggcaatgagctaatatgtattgtatgggcttgttacagtgggctcttaactgtttgtgggtctaatctgggggcatgggtttatatgtaatctttatgaagacattgcaatagcctgtgctccctaaagttccctcagactttgaattctaatcatagctgtattccataatagagagctgcttataaaaagacatctcagtagagattcttggtaaacaggatggattctgatgttttgttaaaacgaaaatacctatacagttacccctctgtatccatgggttttgcatttttaaattcacccatccatggattaaaaatatttggaaaaaaaaacaacaatacaacaacaaaaaatacacattaaaaacaatacaatgtagtagttatttacatagcatttacattgtgttagatagaagtaatctagaaatgatttaaagtatgtgggaagatgtgcctaggttatatacaaatatgatgccattttacatgagggacttgagcatctgtggactttggtatctgaagggggtcctggaaccaatcctctgcagataacaggggatgactatatatcaaaagtgcagcttacagaatgcaaatatgtacattatctcatttgcgcctcacaaattccttttacggatagaatacttccttttcagtctctagactctccatgtgcagtctcgtccacacccaacaggccatcagatctcagccatcagatataaaccagcagctccaggatctatattctaatgctgtacttttcaacatgtaactctgaactagtcttcccttcccactgtcagcttcttcagaaactggtgttctctttctcagtgattgagactgccatctctgtccgaaatctagctattctccttgctacccctctacccctttccaaactctactgataccagtaacttataagttgggattccaaacttgctgtcttggacattgttctggccttcatttggcctgtactgcttcaagcatatcccaactagtctacttgcctctgtgttccacattgcctctggaatggtgtatctgattcctatgcaagaaactccgtagtggcttgccatggtctacagctaaatctggcacttcagaatggtagatggctcatcctcatagtctgccttgcttgcttttgctacttcatctctggccatttttctaagtgcagcttggacttcacctccctgaaccattggtaggtgctgaacctactatagtatttcaggctgccatccctccatgctttaatacctttccttgtgaatatacatttgcattttcccccatccccaactcgtttttgaggctcatcttttggaaacgttttcgttatgaagtttgttgttgctctgtgtttgtgctccacttctctagtggtcagtaagctcttagaggacaagtacgatgtggtattcctctctttttctagctgggatatatacttgtgttatagctggggtatatacgtgtgcggtgagtgcttgctgaagatcgtacagatatgagtctgcacaaatattaattaaataaccaaatgtaagtaacagaaactaaataaaaaccttacattactgtcctgaaggtgtaacttggggatgaagtggggatggggacccgtgtcccgtgtaaataaagcatttaattaagtgcaattttaacatttaaagttggcacctggacaaatttttactcccaacatttacatcttaaaaagtagtaaactttgctggaaagtggtagtgaaatttctgtcattttgaaataaataccagagtcacagtagtaccaggttaatgcatgatgtttcagtggcttgtacttgcagctttgcactataatcaggttcttttaaaattagtcttacttaaatgagaaactgtctccctcctttttttttcttttttttaaaataagagcctctcccttttctaatggggacagcatccttttcttctaccatttctcccattcctactccattattggtattatctcataaggattgttttgtgttttgagaatttattttttcctcaaagctccctcacctatttcctccaaacagacagaattcaaagaaagaatagcccttctttcatccattataaatgatttttcatttgagcatgtcattttgcttttttgttccaatggagatcaaagggatacaggttcacccccagtgttcagcagttcttttcagttctggaccttaaagaaatgggatctggttgaatttgttgcagacttagatctctctccaggcatgtggcactcagatgctgggtgttgctgcatgccgagtgctgtatgtgtacgtgtgttttaagacggtgaaagagctggaaatttggtgtttcatacattttgatgcatgtgccaaagatacacatcttaaaggaatatatttgtgttgaaatattacttgtttctatttaagctaagtggggagtcctttaaagatctctatctaagaatatctgctccacagtttgaactctggcatcatgaaaattttgaatgaatattctatagttgctaggctttacaaaaaagaggtttaaaaaatattttacttctttactatgaccagaaccagtgagacccttttaaatgaactctaggtggtttatagtctcaatttcaagtcgtggtagggcaagatgaggagagattaatttttacctatacttaaaaccaagaataatgaattggactttaactgtgagacactgacacattaataaattaaaaataatcgagctttttttaaataccctgctttgtacttcattctgtgatttatgtatgtgtgtcatactattattgtgagactagtgtgagatgttaggccaaaactgtaccactactgtttgattattattagtcttcaaaatttccataagatgcatttcatatttcactatgcagtcctttctcattcctagtctcatcattgtcacctaatcttacccttctgactgatcttactctcatggaaatgccaaaatttcttttgcctcctattccttatttctccagctgtggtcaaagtcccatttttcttctagttgaattgaatggctactccaagatttataagacaaatgttattcttattgttctgatgaattgcatagtttattactgttgtctacaaaggaatgtaatattctctaaaaatctaagactccattcacttattgcatagagctaataaattaaacaattcatctatgtgttaatttttgtgcttaatctttctcattccttctctaaatcaagttgaacttccatgtatctgtttctttttaatgttaggatagcaaagtgtttacataaggattttagggactaaagaccaaaaatatttctggctgctgggaaatcagattggtggtggggtctatcttcaagtttatttcccattgacaaggcatatttgaaaaaatatgtttatttggattaagaacttgggttctgatttgttgtactattttatatgtaattttatggctgaggatctgaacgtacattagaaccctcatgtaaactctcaggtttataaactgatacccctgttgctatgaatttttttgaaaaaatcttattcaacgtaactactatattccagctggttgtacgtcccaaaagtctggtcattgtataaatggaattatttttattttcttccctctgaatatttggcatatttacttttatctatgtctaatcttatctcttatccatatggaaaggcgagtttgaagtgtccagtcacacaaatctgtctgtctataaatagacagccatactttatccaactgtgctgaaacacatagacatttaaaaccaaatgaaatatcaacccaactttcggaaaaggactattcatgtcctttttgaatctaaattaaaaaattattagaagggcctattggtgcatttgaattttgatcaattttggtttgaattttcagtcaagtttattgtgacattgttgggacaatatctgttgtgacatatatttgaaaggtgtatgctttgtgcctataagagcaagacaatattctgattgtcttgaattcctattctaagtgactgtttcattctggtgttccttcttggccgttttcagatcctgcatgttggggaatgagtaggtttttcacatgatgattgtacatgtaagttttaatgctcagcacaatcatggatggataggtttgatgaatcaacatcatttggaatgaagtttcctcattattggccaagggttgtgatttagaaaagtaagaagtagttgctttgctggtaggttgccccatacttgaaatacagggtagctatttgtaagtaaacgtaagacaaggttgggagtcttaactgtggctaaaccctgagagtgaataaaactatataaaaattgattaacacacttggattatgaagtcaaataatcagaatagtttcttgcccaagtgggaaatatgacttacgcctttcaaagccacaatggacattttgatcaaagtttatcagtagtatctgctagtaagtttgcttaaaaaaaaaaaaagtatagagaggaagagaagcagggatataatattgaggcctcttttaatgagtaggcagaatatgggaatggacctggcctggactcacatgagtgagttgcattgcagtgggatactggcagtttttaaaactctggtgttctatttggtgtttggaaatggtgaactgagtactgatgattaatgagcacagggattagtggtgatattagtaattttgcttggcacaggtcacatttaatgcctatgaacagatttttgaggcaggagaggtttggtcaacccccttcttccttcttaagggtccagtgcttgtgctgtacccgccctttgtcttcatgtctacccacaggtctcaggcagcttcccaggcacacccatgcttacctgaagccattgcctccttttccacgtcctacctcctgcctaccaagctgggaacagtttttttcctttactctgtccatttctctttgtgagcttaagaaagctggtcaagtctagctcagctatacatcacatcaaggaaaagctgtagaagtgaggcagctcttctctgcacttcttatggactgtttctagccgtgaatccttgggtagtcatttgctcttgttaagtctttctttcctcctctgaatagagatgtggcgtaaagggaaggatttctcaagtcctctgaaaatataaattctttgtctgtggaaatcataagatctgtagggaaattagacttctcaccaacccagtgtcatcatcctctgagacgtggtgataagaagtgcccttcaggctttgcaggctgccttaggaccattttctaatggaaaaatgcattcagaattccaaacacttgccttagaatttagtcctcagaaaatgacttaatccttttttgtgttttgttgttgttgttgttgttgttgttgttgtgtgtgtcatatatttctgttttgtatttaataaaggtctcaagctcttctttatttcagtatatttacctatcaattgggattgttgatacctccttcaaataaatattgggtttatttactgtttacttttaggatgagcctaatatgcagagacttgcagattattaatcttattactttgaaaaagaactgtttcaaggggtgaatactgaaacttgtcccagtacttggaattttcttgcttttattacatttcctaaatgaaatttcagagcctggaggaaagtagtggtgtaagtatatttcaagtatatataattggtttgaattctttggtagagagaaatttataaaattatagtatcattatgagtgtagtttaactttttgcttaatgtatatatagaccctcaaatcttttttaaattggagccataatttactcaaatataataaaagagcgaaaatattgttcagtttacatatatcagtgttttccttctcttgttctatacttaatgatattccatgggttttgcttcttcctggtggtgatttatcttgaggaaatggggcatgatagctggaaaataacctctatcaattgccattttatccaaagcaatgcccgttactgtactccttccccagccagtactggaggtaagtggacagaaaataagtgatgtttagaattatcaacaaagaagccgagctgtctcagcatgtaaggtttgctgttttcattacaaattataaggccaggttttttttttttaaggcagtctgtagatagtttttttctttgatctgagactacttaaaaaatacagatgcatataaacaatacaacaattaagtgaacaatgattacatgcttattttgaggcatagcaagcctatgattctaagtgaagtaccaagcacctgaacttgtattggatgggccatttgtttacttgcttctaaaacacacaaaagcattctgtcagcatctggaaccttcatgaccatttttgctttttcatgacgacagagtaaacaaataaacaacaataaataaaacaagttgagacagtatttgtcttgtgtgtgttcggtcattcagcgaatgaatagtgtatttaaatcatctgtttctctgatttttgggggacttgcatgtcagataagcatctcctttgtattgctatttattttcttccccaaagtgttaggaaggccaggttttctagttttgtttgtttgtttaagcaccatattctctattagagcaggggccagcaaactttttctgtaaagggccaggtagtaaatattttaggctttgcctgccataggttctcttgcaattcttatctctgtcattgtagcgtgaaagtagcgacagaaaatgagtaatgaatggatgggttttgttccgataaaactttatttccaaaaggcaagatttgggccatagtttgttgatgccagcattagagtgacaattcttgttctttgtgtattcatttatacagccctgctccatggactactcatgttataataaagggatagagaagggcatgatgacgatgtgcgttcccagtgtgctagctgtggctctacccctttttctctcacttaagaaaacttcccagaaacccgagaagtgagagcattttcccccagggaaaaccttgaattgtgtaacatgtaaatccatgggaatcttcagcactttattattagcatcagattttttgtcagactcctcacagctgtccaacatacaccaacttgtagctatatggtcttttagaagtggtgttagagggctagtcatttggagttaacggtttgggtcccaaggagcacagtcgccaaagctgaagcaagacaagacatctttgctcatccagtagtgtatcatgggccactcaaagcttagtgtgcacgaaagactctcatttgttgtttatagaggcgtgtgactaaactgagcccaacagcagtatgccttgtgtttcatattcttagatcttttcctgtctctatctcttgcaagttagaattactacagatgttgaaaacatttgactggatttagccaagttgaaagtatattttataatattttggtgagggagttagatcaacttgtcgtagattactatttggtcaaggaaaggcagacaatttatgtggggtcttctaagaataaacccaactatggccgggcacagtggctcacgcctgtaatcccagcactttgggaggccgaggcgggcggatcacgaggtcaggagattgagaccatcctggttaacacgatgaaaccccgtctctactaacaaaaatacaaaaaattagccaggcatgctggcgggcgcctgtagtcccagctacttgggaagctgaggcaggagaatggtgtgaacccgggaggcggagcttgcagtgagccgagatcgcgccactgcactccagcctgggcgacagagcaagactccgtctcaaaaaaaaaaaaaaaaaaaaaaaaaaagaataaacccaactatataggattagagtaaaattaatgatgatgatgattcagatacagtataagctcttatctgaccttcacagaatctacctcgtggagaaaacagcttcccattccctcataagacttgctttgcagtgtccatggcacattgatgctcatcactggtagactttctgacactcctgtgcgtttcttatctgttaagtcagctgcttaccaagtcagttgtgcttgcttattcacctatttgccagtagtttctattacataattttattaagtgccatgtcagctgtagctgtttctatgaaaaataagaggaatgctttgggaagacttgtaaaggtgatctacttaaaaacttgctcttgaattaggtataggcaagaggactgtggaggattagggggaaatctagaagggttctgcactcagattgagtcttttaagtcttttagttctcactgacctttaaagaaaacagttgaaaatgtagataatctgcagagaactcagcagaaccatactggaggaaaagggctgatactcatatgagacaattgggaaataatttgttacttagatatgttattgcaactttattgtgaagtacatacatatctttttaattgtttttcacttactggtctcgattgtatctgagtgtttcacaaatgtgtcacgcactgtgccagggctttacccaaactctcttatttaattctcccagcagcccattgaggagggtccgatggttagcttcattttactgatggggaatctaaagcctgggtagcccatgaagtcttcccatggtcctaaagcaaataaatgctagatctgagattcagtttccttctctccctaattatatcatccccctgccagcagccaactcaaggcttttcaatgctatagatttttttgaatacagtggtaggtgagatcttaactcattatgaatcactaagccagtctttattagaatcaaacctgggggttgtcacagaatgaattagctttagtttagtgcagagaatatagacaaaatgacttaaatcttcaccgtgttgtccctatgtcttttctttgctgcgttctgatcttttctcttttgtttgctcacatacctgcttggaatggatatattgtttttacctcttaaacatgcttttatgtatataatttgatgctcaaaagatgagtaataggaaaggtttttttttttttttttttttgagatggagtctcactctgtcacccaggctggagggcagtggcgcgatctttgctcactgcaagctccgcctcccgagttcacgtcattctcctgcctcagcctcccgagtaactgggactacaggcgcccgccaacacacccggctaattttttgtatttttagtagagacgggggtttcaccgtgttaaccaggatggtctcgatctcctgacctcgtgatctgcccgcctcagcctctcaaagtgccgagattacaggcgtgagccacctggcacccagcctagggcaggtatttttaggtccatttttttaggtgaagaaactaaggttcaaaaattaaaatgaaccacaagagtttagagtttaaatatataggaaagatccacattgcagttgaaaagttgaataaagaaatgtttggctgtataatacagatacttagttaaaagaggagagggttgaggggatcactttttcctactatgtgcagaagtatgatatagaggattacgactggctcttttctagttatgtctgagtatgggattaatttttttttttgtaagaattcaatttcagcaggggggatttagtttaaagatggaaactagttcccccttagatggaaagtctgttgtttaatctttttccatagggttgtatataacagttttagattctgtccagattcaaaataataaactagacagcagggtccaaagttctaccattatatctaatgattgtaatttttaaaaacaacaatgcagtcataaacttggattcagtctgtaacatttgcatgcactcagactttattataaatgcagtaatcttcccttacccactgaggattccttccaagacccccctgtggatgcctgaaatgcagatggtaccaaaccctatatgtataactttttttctccatacatacatactgtgataaattttaatttataaattagggatagtagccaggcatggtggttcacacctataatcccagtactttgggaggctgaggtgggaggactgcttgagtcccagaaatttgagaccagcctgggcaaatatagagagaccccatctctaccaaaaataaaattagctgggcatgatggtgcacactggtggtcccagctactcaggaggctgaggtgggaggatcacttgaagccccggaggttgaggccacagtaagccatgattccaccactgcattccaacctgagtgacagagtgaggccttttctttttaaaaaaggcatagtaagagattaatagcaataactaataataaattaaaacaattataacaatatactgtaataaaagttatgtgaatatcatctctctcactcaatatcttattgtacagtactcacttattttcggactatggttgaccttggataaagggggaactactgtaattttctaccatgttcttttcattctagagcaaataaaggatggtgatatgaaacaaagtatttaggtaaaaagaggcttctcaataagatttcatttatatcagtttgtaatattgcctactgagcaatttagttatatttctaattctgtgaaagagcactttcatggtagacccagacaacagtaaaggaattaggatgaagagtggaactacacataatggatttaaaattagtagtgtggatttttaaaatcaaaatggaattcagagatgagaagggttgtttaaccagatcattgggaaataattagaaaaacagacagtcagtagacacaagaaacttggaaatctaccttcagtggggaggcatagtcgtttgctgaaccatcacccatatgtattgattctgcagtgtgtgatcccagaacaatgctcattttgctttaccaaaaaaaaaaaaaatttttttattaaaaaattaaaaaaaaaccaaactcaccacaaagcacaatattacacacaccaactatgtcatgtccttagtacccattgttccctgagttcacaaagttaaacattaacgaagaagttcaaggattggctaggtagcaataggagcaaagattaaaagaatgaagaatgtatctgctaagtcagggataggaaatcttctctcttaagtactatgaattatcttgagaagaaaagaaatcagagcacaagtaaaatagttggggtgggattaatgcttagggatttttggagtcagaaatttgaaatgctcaattgacctattttgaacttcaaaacaaaacaattcacatatgttttagctcactaagtgcaagaacaaagagtgaggcaataaaattgtagaagaagaaatgagcaaagaaaaaaagatacaagagagtggaaaaaagtttctggtaagtggaaggatagataagggaggggacggatatggggaacagctcaaaaggaaagaccagagggaaccgtgcaggagtgagaaaaatcatcctcatctgccctccacatgccacttccagaactttcttatggttcccggcctgtgtttctgccccctaactgggctcagtctgttttaaggtgtttcccagttgtcctgtccctgaccccatgtttccccaaagtccgttcctccttaccatagctcgaaatccttgctgctctcttccagtggatgaccttgagagcttgttgaggtaaataggattgcagagtgtttttttgttgatttggtttttttttttttgagatggagtactgctctgtcacctaggctggagtgcagtggcatgatcttggctgactgcaacctctcctgcctgagcctccctaatagctgggactacaggcgcctgccaccacacccggctaatttttgtatttttggtagagacagggtttcaccatgctggccaggctcgtctcaaactccggacctcaggtaatctgcccgcctcagcctcctgaagtgctgggattacaggcatgggccaccacgcctagcctctttgttgaacttaatattattcttctttattttcgctttctcagtgaagctttcttcctcatcgtttccaagttgttgtgtttcggtaatctgattatctgtcatttcagagtccctgtcctcccactgagccacatgcgcacacacatctctgtcaggcacccctgtcatgtaaggcacgttgggtctgccagagcggcaccccttgttccaactttcaggtttaatgcttgagaacatttgaaggctgttgtctggaaaagataagtgtttttatatttctttgaattttaggagttgtctaccacaacaaataaactagatcacactttttaagttcaatacttattatcctcattctgtggaaaaaatatattttctattaatcatgtacataatagtactaattatgggccactttggctgaacacagttttatgcttaggcttacataattaaggttgtaatgttatttctggatctttgaggcattagtagagatcactgatgaagtaaactgacaaacataactccttttctttggaaaagatggatgctgtctgctaaactaatcaagttatagagccttaggccgggtgtgtcggctcatgcctgtaatcccggcactttgggaggccaaggtgggcggatcatgaggtcaggagtttaagatcatcctggccaacatggtgaaaccccatctctactaaacacacacacacacacacacacacacacacacacacacacacacgccaggcatggtggtgggcatctgtaatcccagctactcgggaggctgagacaggagtgtcacttcaacccaagaggcagaggttgcagtgagccaagatcatgccattgcactccagcctggaagcctgggcaatagagcaagactccatctcaaaaaaaaaaaaaaaaaaaaagaaaaagaaaacgtttacagagcctttttctgttgataagtacaccttgaaatacctggctccgaagcacccattggctggatttgctgcctaacagtgtgctgtctcagcgtagttgcttcccagtgggtcccattggtgtcacgttattgtcagtctcttcagtctatcttaaaagcctttctttccttccctctgctgctagtaacctggcctgagccccctgtggtgcctctctgtgcagattccgctatcattcattctccacacttgttcatcctggacatgatgtggtaagaaatcatggcttcagaatcggtagacctccctgttgcaggatgtggatatttggtgagatttttcttggcatagccaatgtaaagaagactgttcaggtactcttgtgtgtggccagagcctgagtgctgcctatgcttccacctttagggctttgtgcattctattccctctgcctgggggacctgtttttttgcctgatggatgaattcctacccagactcttggattcatctctaaatttacctcccttagggaagccttttctgactccagaggcataatttccccttctctaaagttccatgcctcccttaatcatcatattatattgtgacttaaaaaatttatttgtctccccatttgactttgagatccttgaatcagggtttggttcatcattgatagtacctatcacagtttccagaggttgttggacttgggggatagccacatttttggcttcgttgaagcagaggaaatggaaggtggattcccttcactttggaatctcaacattctttttctctggcctccttcagcatgtgtccttgacacagttggggttttgatttattgatgttctgggtttttcatcacatggtagacagtgtcatttgttgtgatgttctagttggcacagtgcatgtgggctgctgagcagaaccaagtattgtcattgtggcagttacagtttttatttaacaaacatatagaaaatttaagcagtttacatattaaaccatttgacctcataacatctttatgtgggaggtactgttagtagtcccatctttggccgggcgcagtggctcatgcctgtaatcccagcactttggaaggccaaggagggtggatcacttgaggctgggagtttgagaccagcctggctaacatggtgaaaccttgtctctactaaaaatatgaaaattagccgggtgtggtggcgcacgcctgtagtcccagctacctgggaggctgaggcaggagaatcacttgaacccaggaggcagacattgcagtgggccgagatcatgccactgcactccagcctgggtaacagagtgagactttgtctcaaagaaaaaaaaaatcctgtcttatagatgaggaaactgacacacagagaggttaaagtaacttgcccaatatcacatagctagtaggtgggagagccaacatttcaagccaggaaggagctctggctatgggctaacatgtaatttactcccatacttcactgccagcatcattttacctttaaccactagtagtttatctgtcttcttatttcagagaagggaggatgtctcagatcagaaccttgggccaggcaacagttactaaccagaaattgtttccattatattttccctattatcttccacttagacagttgaatctgattttctaattatggtagttatataaagacttctcataattattcaacttttgaaatagagctaatttaaagaaaaatatcaagtgaatagcagtaggtattaaatggtggcctatataacaaaagtcctgaaggtgatacattacatattaatggataggatattgtgagtagttgcttacagagggtgaagaattatgaatagggcagctttctggtttggccgatgtaattcacgtttgttgtgtttgcaaaggtaagggaacctaaagatggaaaacttagtagcaattgaggggataagagggcatagaaaggacatgggtagacatgttaatgttccattattaacctacattgcatgtgtattcaattattcagctccgatttggtttatatttagtgatctcactcataccaagggggttctactggatagcaaagttttatacatttgacttgctttgggcaataaacatggggacagatgataaaagaagggttatggagagccaaaaggcagttgctatgaagccatcacaaaagacactaaaccgatggggagcagagcaaaggtttgtctggaaaatacaagttaggctgaagttgggatgacccaaggtaagttttaaatataacggtacatgctacttgtattttcccaaatcactacttctgcacttctacaacaaacttctgctttctcacaggacttttatggaaggaagaaaagtaatttgaatcccttgggcctttttataggtccattgtcagcgtcttgtgtctgccttgacccatttgcattctggtggttgctgggaacagtaagataacctatgaatagtccttgtccttccagtgtgatctgaaaggtctttgctgctctgtgcctgaagagaacattgacaggtagttaatgatgttctcgggttgcttctagctctttgtagatgggggtggccagtcatctcatggctacttccttgactgggaccccttcccatattgttcctattagtttttaattccaagagggtgggctgctctctgtccttgctttagtgttgatgtgttcatttagacactgggcatgccttgtgagtctactggactgtgtttgtggaactcccatctcttcttgcccttttaacccttattcttcatgactgagaatgggccatgcttctttttgagcctaatctgttattgcatctgctgctcttaattatgctccttttatgcccttaattactcctcttggttttctgttagtttttcttctccttgtgttactctttcacccttagcatatctgacagtcaggatagtactgtggcaaactgtcagccagctcccgttgattggtaatgcttacgtagtgagctgtgttgggaaaggttgtgtagccttactcagactcggtagggtcaggaaagacagtgctggctgagcaacgtctgctatgagcatgggagtcaggagcagtgacatccttgcctctgtcttccatgtcttagaagcatataattgctagcccttttctgatctgtaacgtgctgctgtgttcagtttgagaaagttagagggggtcagcttggatgaagagaaatggaaatagttaagctgcctgcttagagctatctcttggcacaagagagatggagaaaatgacacatagaagtgttcaatattaaactgagagacagatatacaaagggaaactgcagaaatatactttgttctattcaccattctctgtcaaaaatctgcttgaattcccaatagtttattagtataagaaagttaaggaataaagagtatgcatttagttaaacctacttgtgtctgtcaggagcctgaacaatacaggcaagtataggagccagggcaactctttctgctctcctagacatgcatcaagcatgtggggggcacttgttatggagttgcaggcactatgctggactctgatcatacagtaataaaaagaaataccccctgcccttggcaagttttaccggtacaaatacagttgtccctaggtatacacagtggatgggttccagggccgcccttaatatatccaaatctgtgcatatttaagtcccacagttggccctgcagaacttgtggatagaaagtttatgcttaggttttgtatcctgtgactactgtattttggatctgctttgagttggaaaaagtctgcttataagtgcacttgctcagttcaaatccatgtttcaagggtcaagtgtgtatgcttggtaccagtttttcatgggaaagctcatacctgattattttctcattcttactccagcctctaagcaataacactttgtacattgcctcatgcataggagtttctctgtaaccattgctgaatgaattgtgtgctgtaggttgcaagtgccatgaagtttctaaaagaaaatggtcaatagagcctggtatggctttgtagagaagaagataaaggtagttgtgttaataatgagagagtagttgattaaaaaataaatacaacatcatcttgaccacttattggctgtgtaactgtgccaatccctttcacttctgtgaccctcattgtgctccactgtgaagttgggagtgataattttggcaagatttgtttattttagcattcctctgctatatagtattgtaggtgtattagtctgttctcatgctgctataaagaactgcttgagatttgtttttctgttgttgttgttttttgtttgttttttgagatggaggctcgctctgtcacctagatgggagtgcagtggcacgatcttggcccactgcaacctccacttcctgggttcaagcgattctcctgcctcagcctcccaagtagctgggacgacagatgcgcaccacacctggctaatttttgtgtttttattagagacggggtttcaccatgttggccagactggtctcgagctcctgacctcaagtgatccatctgcttcagcctcccaaagtgcggggacagcgtgaaccaccacacctggtcttgggcaatttataaaggaaagaggtttaattgactcacagttctgcagggttgggaggcctcaggaaacttaaaatcatggtggaaggggaagcaaacatgtccttcttcacggtgtggcaggaaggaaaagtgccaaacaaacgggggaaaagcctcttataaaaccatcagatctcatgagaacagcatggggataactgcccccatgattcaattacctcttaccgggtccctctcacaacacgtggagattatgggaactacaattgaagatgagatttgcagggggacacagccaaaccatatccctagacatagctttgagaatttaattaagacctagcattattttgagaattaaatgatataacaaatatgagataactttataacattctaaagtactacacaactattagttattattcttctttgttatttagaagcagctttccccagactcgtgagttcagggatctattcctttgcgtctgtcttccattttgttcaagtgtccacaggaccctaaatgagcctgcctggcctggacccagtacttacaagggcttatgcttgtgactttcttcttcgggtatcttagcagcttgttggagaggatggagtctttatcagaggagagtctagagttttaacctttagaccatgccttaaaaaccaagggcctcagatatgaaaggatacttataagaagaaagtgcaggttactttgactcatattttgaagatggcatactaaacaacatctcagtgaaatatctgaacaaatattaaaattaagacatttaaaaatttatatctagagccagcatgatttttctaaggtttgggactttatatagtagcctcttatttagggtaaaggacttaaaatttgcaaatttgaatttttgatggaaggacattggtacttttgtcaagttggacacaggaatactcccagttacgttttcctgcaccgtggcagcatgattctcttaaacaccagattctgaaccgcagaccaagactgatggttaaagcaaacaattcctaatacctcataatgatttgtcccaaatttccttctctttcattaattatattttccttaattaattaattttatgttagaatagcgtgactgatctcttaaatatatccgtggcctatcttcaaattgcctagtttcggtggtgattctatttggagatttttctgtggcatagtcatggtatgtattgtgttaattcttgtacatttccctgggtttttgaccgtggtttgtttttttcagttctgcagttcactgccctctcactagaatttatacctttcctttagaagatatttagaaagggctggtagaaacatagctgtcattcagcacatgcaggtcctgttatatcacacttggatcctttcaacaggccctttaatggtttccctactggcattctcccctctttctaatccatcctacataccaagattaatcttcctaaaatactgtttccattgtgctcaaaaacctttagcggcccccccatggcctacaggatgaagtccagacctcttagccagttaagtcttcctacagactagttctcacttattttctggccctcttactgtaattccctcttcaactgataggcttgctgaggcctcctttcttcccttctctgtgtctctgtttcttgtcccctttcttgcgatggcctttgaccctatctctgcccatccaaatcctactcatctggctttcaagttctagtccagttgatgaaatcctttattttcctggcagcatttactgtccttattgtatattatattctattatggttgcttgtgtttacaagctgtgcactgccctctaccccaatttataagttcctgaaaaacgtggcatctgtagacaggaatggattcttggtagttttatagctctgtgtgtaaatgggagctttaggattgtggtttatgatcattgaatgagatgcaatagacaagttatttattgtagtctgtcctgtcttgttcagtgactgagggtcttgtacaacacaggttttcattgagtgcttattcaataaatgaatagatatattaagtttattttgttcttcaggtgtgtaaattattttagcatttaacttaacatgttagcatgtatatagggtatggtttatttcctctggtgggaagagacacattcagaatgcctgagagtcatttatgggtgatcatgaattgtgtattctgcttagatcaggctttgtgtttagagctgagtaagttggtgtcctggccattctacccaccaaattgcaaagttctccaaagtgttacaggagctatttggatagtagatcaattaatagttttatgttacgtttcatctccggaggatgcaggctacctcaggtgacagaaagctacaggaggacaaaagatagctttctgcaaagacctgctaggcagtcttttttttacaaatattccagctggttgtcagctcttccttgatcatgtcatcattactgccgtattcatctgacaccagacaaaaagaaaaaaggaaaaagattggggcgggggttggggagggaattccttcagcgctaaaaccagtcttgtcacactgcaggggcaccgtgtttggttttaataatctcatgtcattattagtagtaaaatataaatctgtttcttagaactttttagaaaagaattttgaaaaggttatgaaatggtactcaatgctcatctttcaggaaagaggtggagggggtgttaacttgctaactgtcattacactgcttgttttcagtttcagattaatagcaggtggtatgcagttttcaaagcaaacaggcttttttgttcggttagaaaaagcactaattgtttactgtagcctagaatattttgtgcaaagtgacaaatggcaaggatcacaaaacatttaacatttaaaataaattgatagctggctaatattgtaaattttttaattaaaaattttcttaaattgatagataacattgtatgtatttatcatgtacaatgtgatgttttgaagtatatatcatacattgtggaatttttaaatccagctaattaccaaatgctttatctcacatagttataatttttgtggccagtgcagttaacatccactctctttgcatagtattgtaaatgtgtaaaggatcaagccagcacttcagcaaaatatttctcttaccatactaattgagttacgtgtcttggttatttatgcttaatatatttgtctgttactttccgtgaatatattttcatgcagctattttgatttctggcaatatccttttgtccactctgcagtacagtactcatctcgattagtaaatgcctctggagaggaattgcatcttagaagctctgcagatgatcagcccatccaaatggacggttaatacatgcttttaaatacgtctctgtgtatgtggtggcaggagtggggtggttggtgatgttatgtttggaataacatattaaggatttctatttttggattcttatttacaggtaagttttttttttctttaattaggcatttttttcccctcaacttttattttaatttccagggtacatgtgcaggatgtgcaggtttgttacgtaggtaaacatgtgcacaggtcatcccatcacctaggtgttaagcccagcatccattagctagtattcctgatgctctccctcccgacagccccccagcaggccccagtgtgtgttgtttccccccatgtgtccatgtgttctcattgttcagctcccacttataagtgagaacatggggtatttcagtttctgtttctgtgttagtttgctgaggttaacgacatccggctctatccatgtccctgcaaaggacatgatctcattcctttttatggcttttttaaattagtattattatactttaagttctagggtacatgtacacaacgtgcaggtttgttacataggtatacatgtgccatgttggtttgctgcacccattaactcgtcgtttacattaggtatttatcctaatgctatccctccccctgccccccaccccacgacaggcccccgtgtgtgattttgttccccgccttgcgtcaaagtgttctcattgttcaattcccacctatgaatgagaacatgcagtgtttggttttctgtccttgtgatagatagtttgctgagaatgatggtttccagcttcatccatgtcctggcataggacatgaactcgtcctttcttatggctgcatagtattccatggtgtatatgtgccacattttcttaatccagtctatcattgatggacatttgggttggttccaaatttttgctattgtgaatagtgctgcaataaacatacgtgtgcatgtgtctttatagtaggatgatttataatcctttgggtatatacccaggaatgggatggatgggtcaaatggtatttctagttctagatccctgaggaatcgccacactgccttccacagtggttgaactagtttgcagtcccaccaacagtgtaaaagtgttcctatttctccacatcctctccagcacctgttgtttcctgactttttaatgattgccattctaactggtgtgagatggtatctcattgtggcattgatttgcatttctctgatgactaatgatgatgagcattttttcatgtgtcatttgcaggtaggtttttaagaatattgagatattgcttagtatgctaactttaaaatgtgagtcagaataatctgtattctattcttaactcatgactagttagctttgtgatcctaaaagtgtctttaacttctaagggccttggtttctaaggtatattcctgcctctgccttaaatatgtaaaaaaaagttgtgggttttttttttttctagacacaaagtcttgctgtgtcatccaggcttggagtacagtggcatgatcatagctcactgcagccttgacctcctgggctcaaatgatcctcctgcctcagcctcctgagtcactgggactacaggcgcatgccaccatgcccagctgatttttttttaaatcttttgtagagatgaggtctcatgttgcccgggctggtcttgaactcctgacctcaaatgatccccccacctcagcctcccaaaatgctggcattacaggcatgagccaccatgcctgtcctttgttcaagtatttttgatagctgagaaatatggcatcagacgtcactcatgtttgtcattaagatgattttacatgtaatatactcacatgcagtttaaaaggcttaagggtgggaatctctttcctctggtctggaatctgatcagttagttcctcagttcgaatacttgcgaagagctttctagcatctgatcaaatgatgccttaatgaaaatcctacccacagtaagatgagttttaagtcagaaaggcaatatgtaattaaaacaataactatagccataagcaggccggatacccatgccaggtagttaagaatattctgacttccccagaaggcaagaccaaacgagaattatgaggttgtttttgttgttgttgttgttgttgggttcaaacctagagatggatctgcctggtgagctctcctgggaagagtcagaaattctgtgttcatgagacagctcttccagcttgtggatttcaggcaggtcacttttctgcaacttgtttccttaactgtaagataaaaaaataaaaaggttgtgtagaaactgtactacagttggccctttgtgtccacggcttctgcatctgcagattcaaccaaccaaggattgaaaatattcagaaaaaaaccccaatataacaactaaaaagaatacaaataaaaaataaatacaggataataattacttacatagcatttacattgtattaggcattataagtaatctagagatgctttaacatgtatgggaggaggtacatagtttatatgcaaatactatgccattttatatcagggacttgagcgtttgtggatttgggtcttggggagttgtggaaccaatcccttgcagatactgagagacaattgtacttgcttcacattgctgtgcagtgaggctttctagtgtgattatatagttacaggtctttcaaggtgacaaaggatgttaaaaattgtaagttgacaatggtgatcatgtctattcctgagtaccttgacagcaaaactctggtatgacaggagtttctagaatttgggattgtggagctctctgcctcgttttggtcttcccataccagagtattgttcacaaatagtgatgtgaacaagctaagtctttttttattattttttatttttatttattatactttaagttctagggtacatgtgcacaacgtgtaggtttgttacatatgtatacatgtgccatgttggtgtgctgcacccattaactggttatttacattaggtatttctcctaatgctatccctccccactccccctacctcacaacaggcccgggtgtgtgatgttccccttcctgtgtccaagtgttctcattgttcagttcccacctatgagtgagaacatgtggtgtttggttttctgtccttgtgatagtttgctgagaatgatggtttccagcttcatccatgtcccagcaaaggacatgaactcatcattttttatggctgcgtagtattccatggtgtatatatgccacattttcttaatccagtctatcattgatggacatttgggttggttccaagtctttgctattgtgagtagtgctgcaataaacatacgtatgtgtgtgtctttatagcagcatgacttataatcctttgggtatatacccagtaatgggatggctgggtcaaatggtatttctagttctagatccctgaggaatcgccacactgtcttccacagtggttgaactagtttacagtcccaccaacagtgtaaaagtgttcctatttctccctatcctctccagcacctgttgtttcctgactttttaatgattgccattctaaatgagatggtatctcattgtggtttttgacaagaaatggggaaaggattccctatttaacaaatggtgctgggaaaactggctagccatatgtagaaagctgaaactggatcccttccttacaccttatacaaaaattaattcaagatggattaaagacttaaatgttagacctaaaaccataaaaaccctagaagaaaaaaccctagaagaaaacctaggcaataccattcaggaataggcatgggcaaggacttcatgactaaaacaccaaaagcaatggcaacaaaaaccaaaattgacaaatcggatctaattaaactaaagagcttctgcacagcaaaagaaactgtcatcagagtgaacaggcaacctacagaatgggagaaaatttttgcaatctacttatctgacaaagggctaatatccagaatctacaatgaactcaaacaaatttacaagaaaaaaacaatcaaccccatcaacaagtaggcgaaggatatgaacagacacttctcaaaagaagacatttatgtagccaaacagacacatgaacagatctgatcatcactggccatcagagaagaacaaagctaagtctaaaccagccaggcctgaggactgagtcagacaagaggaccccctgcctccctcctgtggcctttgcctttgcctcagggtggcttctttaatgggcagatgatggcatgtctctcttcagtcacctccatcccagcactgaggtggctgatttccatcctatcttgtgtgcgctgttgctttctattcagatgactcgtgctttgagcgcattctcttctttccattgctcccttctaagacttctttccctttttaccatgtttaggcctcaggttatcatttgttattcccaagatcttatctcttaacttattttccttgattagataagccggaggctttgtacagaggctgaaggttttcaagaattccctcactacgggtttggggaaaactgggatgttgtaaagggctgagtgttctgttgtactttcattaccagtgacccattgtggaagatttctttagaaagtaatttttatcccttaagtgattttccaaattctatttttctttttttctctctctgttttttgttttttgagagggaggcttgctctgtcgcccaggctggagttcagtggtgctatctcggctcactgcaacgtccgcctccccggttcaagcaattctcctgcctcagcctcctgagtagctgggaccacaggtgcccaccaccacacccagctaatttttgtttttttagtagagacggggtttcaccatattggtcaggccggtcttgaactcctgacctcaggtgatccacccgacttggccttccaaagtgctgggtttacaggccaccatgcctagcctccaaattctatttttcttagaatatagtagagttgcatcttaaggatttagttttaaaatcagcatgtaaggtaaacatttcttttgttcaaaattattcttttgagtccagcactgctagtttttttttccattctgggtcagtagttttctttagttgagcactagatgaaagtgctggctttcatttaaaggtttgtgaatgaatcttgtataagttcaaccactagagttccattcactgggaaaagatgctcactctgtgagggtatgtgggagatgagacagatcaagaggagagctgatgtatgcctccggtctcaggctttcttgtggagtaagtggagccctgggtactactgaaattatctctctccctccatcaccttgggcagttgagtttgcataagttaaatgtccgtatgatgtaattgtaccagcttctgtaaagaaacataaacaggatgaacatgcctgattattttctggcctttctcatttttatatagaagataagaatgagtgtgatttggttagcagcaatgagttgaggttattttagaaaagtggccccttgcagccccaatcttacctatttgagtttgccaggtggtatgaggttcaggaggcagcccagcgaatattgctaaggcttaggctctgttctagtagttgcaaacccactgctggtgccaagtcaggcagagaaggaacgctgctgccacacagtgtctgcccctggcatccaggtgtcacatacacacggttatttccaaatgttgtttaatgtgtgcccctagcatcctagcagtttggcagaagaacatacacatttattgaatttcctctggcctagctgcttagtagattccaaatgaataatagaagaaatgttgtggtaaatgtaacgcatgaaatgtgggtgttagaggggtcttagatattatttagcctatcctctgaattgtacagataagagacagatccagaaaggtgaggtgatctgctatagaccatgagttagctgccaagatggaatggaagctttaattgtctgatgcctattttgttgctttttctacttgatagaacttatggatcaaatagtattccataagttcaatcggatttactctgcctggcctgcataagtgaagcaattctaaagggaactgatacatacaaacacatgtaaacctcattctctgctggtttacattctgtttgaagtggaagttgatgtttgctgtcatcattttgttttgtgttaattaacaaatctgattatgtggcggccataggagcgtgccctttagctctatgtttaagagaacctgcctcaaagggtgtggtgcagttagctgacagcatcgagctgctgcacctttgggatccaccatgcgctctggggctccccatcagcctggctaagattttcccagagctgcgtatgatcttccttccttccctcctgttgctggtgtcagacctgcagcacagtctgaggctctcctgctttcttctgctccttctctcctccacccttcccacacatgcccccataatcagtctcttgtactttatgtcttagtgagaggtgacagcgtgctggcagtcctcacagccctcgctcgctctcggcgcctcctctgcctgggctcccagtttggtggcacttgaggagcccttcagcccaccgctgcactgtgggagcccctttctgggctggccaaggccagagcccgctccctcagcttgtagggaggtgtggagggggaggcgcgagcgggaaccggggctgtgtgcggcgcttgcaggccagctggagttccgggtgggtgtgggcttggcgggccctgcactcggagcagccggccggccctgccggccccgggcaatgaggggcttagcacctgggccagtggctgcagagggtgtactgggtcccccagcagtgccagcccaccggcgctgcgctcgatttctcgccgggccttagctgccttcccgtggggcaaggctcgggacctgcagcccgccatgcgtgagcctcccacccgctccgtgggctcctgtgcggcccgagcctcctcgacgagcgccaccccctgctccacagcgcccagtcccatcgaccacccaagggctgaggagtgcgggcgcacggcgcgggactggcaggcaactccacctgcagcctgggtgcgggatccactgggtgaagccagctgggctcctgagtctggtggggatgtggagaacctttgtgtctagctcagggtttgtgaatgcaccaatcgacactctgtatctagctactctggtggggccttggagaacctttgtgtccacactctgtatctagctaatctgatggggacgtggagaatctttgtgtctagctcagggattgtaaacgcaccaatcagcgccctgtcaaaacagaccactcggctctaccaatcagcaggatgtgggtggggccagaaaagagaatataaaagcaggctgccccagccagcagtggcaacccgctcgggtccctttccacactgtggaagctttgttctttggctctctgcaataaatcttgctactgctcactctttgggtccacactgcctttatgagctgtaacactcaccgcgaaggtctgcagcttcactcctgaagccagggagaccacgagcccaccgggaggaacaaacaactccagacacgccgccttaagagctgtaacactcaccgcgaaggtctgcagcttcactcctgagccagcgagaccacgaacccgccagaaggaagaaactccgaacacatctgaacatcagaaggaacaaactccggacacgctgcctttaagaactgtaacactcactgcgagggtccgcggcttcattcttgaagtcagtgagaccaagaacccaccaattccggacacattagcatctgcattccagaagacctgaaccgacatagtatacaggtggatttgaagttatttttagtgtagtgtgcaataatggttgcagaaaatctttaaaaacaaatctttatgttgaatagggctgaaaattgctacaaatgtttgattagtcattttttacattttcttctcttaacttcaagccagcatgagaagaaataaagtcagagcaatgggaagtacactgctgtcaagaggcaggagtcccagaaccaattctctttctgaccttcaagaattcccttagcagacaaagagcttggagcctcgcttacttcctagaaaatgaactgagtgatctctggatgttttcttcagctctgaatgtgaaacagattgcaagaaaagaggttgagtggccaattggtcccaatagtgtgaacattaagtctaaatttaaattgaacaaatacaagttagtacaaagaaaaggaattcagaagttgtgcggtaattgtctccatgttgttgtccaatttacttgtcagttcactgacaccaaataccttggtgcagatagtgcagtttaactggcgtctctatgtcagagtgcttctgagatttttaatctccatggtaaaacaagattatatgtaagtgcctggaaatggaagttttattccccacaatatggaataagaagatagagatatttgagtataattgcaccttaagttatgtaactcaaaatgcttagtatttcttcccactctgtactcacaacagctgtggtttagagttgagaccaccctgcttttaccagtgatggtagcattcagtagttgataacgccaatctgtgctgcagctgcctttaatagtaaaaaccccttcctgctctaagtccatataatcacacagttttatagaatatggcctcttttaccactttttcctctttcagtgctaattcttagctttgaagtttttaagtttgctagtgatactgtgacatacagtccttaatttgttttatagaatgtagctttttggagctgtgttttatattcagttgctgaatttgattcaccatggtcttttaggcttgttagctgtttatattcacttgtgtctttcataaacatgtagtagctgaagccattgtcattagagaagataagactgcttgtgttagaattctgaaaccctagccattcatttgagttttgattcagcatttatttaatgtttcttatgggttggggattgtgacgagtgttcttgttttaaatggatgttgggcggagagcacagagcatatgccactgaactgatgcagtgatatgtttcagcacctttcatgttgaaatgtcatgttactttgtaacatgaaacttgtaagttataatggaatcacaatatgccttgttctcaggaattatatataaaatatttaacaacaggtatggcatagtcactgcccaagcagaacaaatgttaaacaaccagaaccagtttgtgtcaatggaatctcagccttgcctgatctgaacataagttaaatggattcaaagtcttatatgtgatagaagctttgattctagttttaccagaagttgtagaaaagaacgagcttttgtacatattttatatattttctcactggggaatgatttcattacattacaaagatttgagccactctcattgcttttgtaccttacgcctttgcaattcaacccaaccaccagatgatagataacacaagcagacccaaccccaatctacaatatgtacagacatttattgaacaaaactttattagaaatccagtacaaaatgattcatatgacccgttttgtaaaactcaatgaagttgcagttttctgttcttttaagtattttctttgcaagaaagtttcacctgagacagatgaggctttttgtatttgatctcaaacaaccaacaatcctcttgtagtagtctgttcttacactgctaataaagacatacctgagactgggtaatttatgaagaaaaagaggtttaatggactcacagttccacatagctggggagacctcacaatcatggcggaaggcaaaggaagagcaatgtcacttcttacatagtggcaggcaaagagagcttgtgcagaggaattcccctttataaaacaatcatatctcatgagacttattcactgtcatgaggacagcacaggaaaaaccttcccccattattcagttacttcccagtgggtcccgtgcatgacacgtgggaattaggggagctacaattcaagatgagatttaggtggggacacagccaaaccatatcacctcttaaacctgtggttttccacagaaggcgattttgcctcctaggcaacatttcgcaatgtctggagacattttgcttgtcacaactcagagtagggggtagtgctgctgggctgtacggattagaggccacgagtactgctaaacattctacagtatgtaagatctgtctccataacaaagaattatctggtccaaattgttgatagtgccaaggatgagaatctttgtcttaaacacatggctggatacagagctttttagggatcaattctgaggtaccactcctacagtaaaagctagaggcctcattggatttctttaacctgttcatgcagcatatgtaggagtgtctttataatatggcagctaattctgatatctttgtgagagctctcattttactgataagaactcatatctaacatttatcatgctggttaatggaccattttcaccaataaaatcccatttccagcagtcattttgctaattagcaaaacatcactgttgattaagacatggatgactgaagcccttctagtagcctcctacttttcgagcttctaataagaatacttgctgattgctcctggattgtgcattcctgagtaacatgctggcagcacctaattcagagcttacataataatgtacatacataataatgtacacataaaatcacactgtatatcatgtggtagtttgaactaaatcgtagacattaggacagatttccttcccagaagctgtacctacttactttgtacaaactcttgccctcagtgcagttcatttgattcagctactgtgtactgagtgtttccttgtggaaagtacagatctagcttgagccaaagatacaggcagagaggaggaaagcccttctcttgtctcagagagtttacagttaaggagaggagtagtgggtaagtaagcatgtatcatacaaggtaaaagcaaaaacaagtgccataggaaacatattgaaaggttttattagctgcaaaagtaggagaagcagctagggtatgacttggcaaagactctggaagtaatatccaagagtggtttggaacatgggtgcagggctgggtcagtgcatggtgatgtggtgattccgaagagtcaacatgggcacccaagtcttctgtctcctcactgagtttcttactgtgtcatagtgctaataacatccaaattatgaaataaaactagaaaactggaggagtaaatgtatagtttacaattgttccctctctctcaagctatagaagaaagtttataaaattggttctaatttcatccagcactgcattttgcttcttttgttaagcgctatgatatacataaaagttatgagagaacttctgggataatttaaagcaaaacaccaccagatcactttctattcaaaatttgtgtactccaacaacctcctgtctttattcaatgttggctttactttttaatttcaaaaatcattcatttttggctctgcattcttatttaagagaatagcagatatacttttgcattagtccattttcacactgctataaagaaatacccgagactgggtagtttataaaggaaagaggtttaattgtctcacaatttcacatggctgaggaggcctcaggaaccttacaatcatagcagaaggcaaaggggaagcaggcaccttttttacaaggtggcaggagaaagagcctgtgaaagagaaaccttcagacacttacagaaccatcagatctcatgagagcttgctcttgatcactggaactgctcgtgggaaaccgcccccatgatccaaccacttcccaccaggtctgtcccttgacacgtggagattatggagattacagtttgagatgaaatttgggtagggacacagagccaaaccatgtcattccaccctggcccctgccaaatataagattctttttacatttcaaaattaatcaggccttcctcacagtcccccagagtcttaactcattcaagcattaacccaaaagtccaagtccaaagtctcatttgagacaaggaaagtcccttctatgtaggagcctgtaaaatcaaaagtaagtaagttacttccaagataaagtgggggtactggcattgggtaagcgctctcattccaaatcagagaaattggccaaaataaggaggctacaggccccacgcaagtctgaaatccagcagggcagtcatgaagtcttaaagctctaaaataatctcctttgactccatgtctcatgtctagttcaccctcatgcaagaggtgggctcccatggccttagatagcttcgcccctgtgtttttgcagggtactgcccccatgctgctctcatgggctggcattgagtgcctgtgacgtttccaggtgcactgtgcaagctgtcagtggatctaccattctggggtctagaggacagtggccctcttctcacaggtccactaggcagtgccccagtagggactctgcgtgggggctccaaccccccatttcccttctgcactgccctagcagaggttcttcatgagggctttgcccctgcagcagacttctgcctggatatccaggcttttccatacatcctctgaaatctaggtggaggttcgcaaacctcaattcttgacttctgtgcgcctgcaggcccaacatcacatgaaagctgctaaggcttggggcttgcaccctctgaagcagtggcctgagctataccttggcctcttttagccacggctagagctggagctgctgggactcagggcaccaagtcctgaggctgcacacagcagcagtgccctgggtctggtccaggcaaccgtttttccttcctaggcctctggacctacgatgggaggggcttctgtgaagtcctctgacatgccctggagacattttccccattgtcttggtgattaacattcagctccttgttaatcttacaaatctttgcagctggcttgaatttctccccagaaaaataggtttttcttttctaccacatggtcaggctgccaattttccaaacttttatgccctgcttcccttttaaacataagttccaatttcacatcatctctctcaagttcaaagtttcacagttctctagggtaggggcaaaatgccaccagtgtctttgctaaagcatagcaagtgtcacctttgctccagttcccagtaagttcctcatatctatcttgagaccacctcagcctggacttcattgtccatatcactatcagcattttggtcaaaaccgttcaacaagtctctcagaagttccaaactttcccatatcttcctttcatcttctgagatctccaaattgtcccaacgtctgtccattacccagttccaaacttgcttccacattttctgtatctttatagcagtgccccactaccttggtaccagttaactgtattatttcattttcacactgctataaagatactacccaagagtagttaatttataaaagaaagagatttaattaactcacagttacgcttcctgggaaggcctcaggaaacttacaatcatggtggaaggcaaagggaaagcaggaaccttcttcacacggcaagccagagagtgaaagagcatgtgaaggaggaaccgtcaaatgcttataaaaccatcagatcttgtgagcacccactcactatcacaagaatagcagggggaacctcccccattatccattcacctcccatctggtccatccctcaacatgtggggattatggggattacagttcaagataagatttgggtgcagacacagagccaaaccatatcataccccaaggtggcaaaggacatgatcagttggctgttttctgtatgttattagtatgaagaaacttaaaatgtcgatcagggctcttgaaactctgagaaggggaagacaaaacaagcaccaaaaccagctgccttgatctaatcctgggtgcttgggtttgagttccagacttcagattaggaagtctattggaagaatgggcttttgtatttcatctctctggtctatgttcaccttatattaggtgttatagtgttagtggacatcagtgcagtttaacatttccagctgggatctgcttatagctgatgtttatgcctccaaatagtcattgaaaagtatgataataggttggacatcatttaagttcacctaggtgagttaccctactgaaggtcaccctctgatatggtttggaaaacagtgctggaagtataatactttgtgtattaatgccacttggtaaagactcattgaaccctatgtaatttctcctaacaaaagcctagaattcaattaattgaatacatggctactttaattattctgttaacagctaattgatattcacagtgatcatgttttacagcttctaaatgcaatattaccttacaagtttatggttcggcctcctttgatatttcagttctttttctgttttatgtcagcatataattttcttaggttcgtatatattgcacctcatatgtagttttgacaagaaataaagctctttttcctactcttatttgctcatctgcctatgtgagttgtaaaacagattttgcctaccatagattatccatattatagtgaaagattagtctttctcagttctttatatgtatgcttcagattgttaaaagatttagaatgaaaggatatatggttacagggatgtcctgtttatattgttaagagagttgttgccttttctaaatcctagtaatctctggcttcatagtcttatctcatggaaagttgagtaggtacctgctttgttttttaccctgagctattaaaaatggaatactgacatttcaaggaactttgtcatttaaaatatacaagctttgcccatagcacagaaccttgccttaaaatgccttgtgcttgatatacaaagtaacagtacattatctgtgctaagtggttgtgttgtcaccgagttcccaatgccatgcagttggtgccacacttgagtccccaggagcaaccagggctaaaagggcgtagtaatgccgaaaagtgtgtgctatgaagatttagcctggactattcatgggaaggtaaagtttctatcagcccagtatgttatattcataatcccagttttctcttgtataaactttattatagcctttgttgtaaagccccttcaagtctattctgaaaagagacaagtctttaaggaagtaaacatacgtacttcacttttaatctagctatcaacaccaagttaagacatcaaaatgttcgtgttgggttccttaaacttgatttccatattttctttgtttctcttgaattataggatattctagttttccataatgatccacttaagtacattgtgtcacattttccagcccagttacgttatcccgaatctggcaagatctgaaaactattcaatacatatttcttctaggaatagcaaatagtagatggggaaaaatgttttatattattttttcccaagatatggttctatatcaataaataatgttgtagtcctctttgtttttatttgttcatttacagtgattctctgttagagagctctacggagtttcatttccttgcagtaggtttactacttttttaaagttgaatgtgactctccatcctcagcagctattagcttagtcaatgtattctaggcttatttaagtttcaggattcatatcgtgtgacttttcctcctagcatcatattaactgtttcaaagcaatgtgctattaaagtgttgtggccatgtttcttactttgttattcttcccagtggatctcaaactattgattctgtttgcaatccagggaaagatgtgtgctgctggcctataacttggtggtgttgggtcttaggaaatattgccctctttggtctttagtgtacacatctgagctttggacatgttattttaaactttttcaaggatcatatcttagaaaagtgagtgagcatatagctgtacaccctttatttaggttgtaatcagctcttcaaaattaaatttgttgattgatgcggtgtcctcagcaggctcaagtgttgaattctcttagtgttttctaaataatgataatggaatatccattatgattttttttgcattttaaaaaatctcactttgtgaacaaagggaacattacctagtatgagtgttttaatagccagggtagataatgccatacattgaatgggggagaaaaccaggtgctgatacattcaggatttagtaggtaatacaatttccatgctatctataactgttcaagttgttaaattttttgaattgttaatataattatttaataggttcactcttttagatgccctcagtgctacatttccatctcatagtcaagtgtaaacatatggaatattgatgtttaaaagattttttctgatcacagaagtactaactgttcattataggaaataagaaacagtccaaataatatatcccactacatatatcataactactataacatcttaccatactttacacttttttccatgtccatataaacaagtactcaaccttctctgtccctcccttctgctcctccctcccccatttctcatgcaaaattaggagcttagggcacatgctattttatgacgtgttttttttctcacttaatattttgagttttaaaaaattaattttctgttacgatatcagctttcaaggactcttactgtttgattatatggctggatcaaaatctttataatcaatatcctattgtcagattatatcttatttacccaaacatctattgttcactcttagttgttgctttaaataatgctggttgcattttcttagatgtaaatactcttatattttaatatttgctaggattgaatgcctggaagtgaaattggccacataagaagattaatgataataatgatttatacacacattcacacatttatagttattattataaattttagtatacttaatttatattcatttttaaaatttatgtagttaaattcattctttctgatatacagttctatgagttttgacaagtgcatgtaattatataaccgccaccacaatcaagaaacatattcatttgctcaccttaaaaaatttcttccttttgccccttgactataaagtatgtttctttttaattctgaacatataaagaagcaaaaataagaaaatagataccgcccataagtctaccagtctgctgtaacctctgttgacattttgtaaaatatccttctgcttttttgtttgtttttgtttttttatttttgttttttctcttcgtcttccttacaaaaaaagaggttatactgcctttatatagctttttttcttttttcttttttaagtggtatactttgagtacatatttcatttagccattggattggtttgtttttatttctctgcaattctaaacaaccttgtaatgaagtttaaacaaccctataatgaatatctttgcatatagtacttgagtaccataagtagagtttttagatctggtacataggtatattttaaagacttgttaattttatccagttgatttataaaatgggtataccaatttatattctgaccagcagtgtataggagagcctattttcttatatccttgccaatattgagtatttttattttacatttttgttaattggtagatgaataatgacaccatattaccttaattggtattatctgatttgatgtggggttgggtttttctcatgtgtttattatttgtatttttcgtgtgttgatttctagtttatattatttgtgtatatttcttttgttgtttttcggtggggagaggagtgggggatgaggcttcttttttcagtgctctatatgttaataatattaactctcccagttacatgttgggatttcttttcctgtttttgttacttgcttcttctttggattttataatgcttttgttttatgcagtttcttatgagtctattctttttcattttctttatttatattttgggtttttatgttgaatttaaagaggtcttttctctttagattatgtagtcatgtatattagatttgaaattcatttactttttgtttcatattcttaacagtctaataaaatttttactatgttgtaccagggagccatagattatatacttgtatatgaatgtactttaatctaatcttaacattgtatttgtttttatttattcatatgcttccaagcagcatgtacttttcattgaaatcttctattcaaactgtaacagcatagtgacattaaaatgtgtctcaagttaagcatttcctttttattttttctccattaccttctttggcttgcattttaaatattatccatcagattttgtgtgtgtgtgaaattaggaaaaaacagtacttatgttgttaaataactgtttattttatttttaacatgctgcaggatattgaagacaaagtaagtagcaaaacaataacctataaatgtgcaagtagttcacctaaactaagcagatagttgagtagacaggcaccttgacatctgaaacagacaatacttgatcatttagcaaaagaattttggtgaaatagcacaaggatgggaatgcctaaatatatacttgttaatggatggctggatgcatacaattaaagaaatgtatacactttacatattaaaagtaatatatatactttgtttattaaaagatacacacaaaaaatatatatatctatatatagtgtgtgtgtatatatatgtatatatacacacatatatacatatatacacatatatatacacacacacactttcttataagttgtagtcaggcatatattcagcattcactgagcaaaaaatatgttgaaaacaaaatctaactcagagtgatataggaaagtctcatccctcagagataaaggccaattaaacataatattcaagataccaacattagtttaagaaatgcatttttttttacaaatcttgaaaaatatcggtaagtagccatcttcatcattgtttaaagaaccaaaaatattatacttgttttgattttgttttaaaaaatcttgtaaattgaaagtacaataactaaagcttttaaaattacttttaaatatggttatttattatgattattttgaattattgaaataaacaattatggtagtttttgtttccactcttccataacaattaattctttacataaagggaaatagaacaatgtatgtatttatttgcaggtaattaactgttcttaaacacaagatttatgtacaaaatgttatttaggcattacttttttgttcaaaaaagagccatgtatcttatgcccaggataaaattaaagtttcattgtacaaaatattaatccttgaaattactctttgatagggaagttaaataagagtctgttatgtgctgtattctgacgtttcctaatatatttggacaaaataggacacagctgttacagcgggaaaaaaaatacaatgcggacttcttctttacatttaaatacagcaatcatcatcttaatgtttttctatggcagagacctaatagattgcaaaaatcttcagatttgtattcttatttctaatgcaatttattcttgacttttgctttgctgttgctgctttttcttgatatagtatattcctcatttctttttttaggctaggcagctggaagagaaagaccgagtgctaaagaagcaggatgcattctacaaagaacagctggctagactggaggagagggtatgactattttttatcattgattctattaccacatctgctgttttcttgtatatttatttagaaattaataaattagaacttcaactgcttttcctggttgtaaagtggccaggaagtgaagaagcaaagcaggtagttagttcgtcctctgtaacaatgtcattttttctttggtcactttggaatggttgcgttatttgttcactgatgcattttaccacttgggacctaccgcaaatacttttcttatatgtttagaatctacatagcctccaggtcagacagtacactgctactcttatctctcccagacattgactaaactttagtacactcttaaaaatggtagtgttttaaaggatatatttatcttcttttatcttttctttttttgcttttttctttttgaaatggaatctcactctgtcgcccagactggagtctagtggcatgatcttggttcactgcaacctccacctaccaggttcaagtgattcccatgccttagcctcctgagtagctggaattacaggcatgcaccaccatgcctggctgatttttgtatttttattagagacagggtttcaccatgttggccatgctggtcttgagctcctggcctcaagtcatctgcctccctcagcctcccaaagtgctaggattacaggcatgagccactgcacctggcaggatatatcttctttctgaaaactcagtttcactgcatttgtagtttagaaatgaatgtctccttcaggagaggtagataggagctgaatagcagaagttaaacatgagttaggagaaggaaaagagatacggcgtcaagtcagcatgggtctagaattggacagagatggacaaaagaaggcagtgagtttaagaatgagagtttgagcaccttatcagtgcccttttcaataaagtagattggttatctagattaatttcatacatagaccatgaggttgcagagtaagctctctctcttttgaatgaaaccctccaaattttatttgttgaaaatgttatttgataagaaaataggaaaaaataagaaatacactattaaccctcactcagtacagttatgtatatgttaaatgtgtttgctgtctccatatgttaccgaactgagtacctcttgaatgtagggagcattttctcattcatgtagcagatatttacttaagcaccctggtcttgtgccagcagctatgtactagtgaagaaaatgaggtaaacatctgtcttcatggagcttaaattcaattaaaaccagaatacatattgtatggcaggttatgataatttcgggaggaataaaatgggaaaagagagtcccagggctggggtttaggcatggagttgggtacagagggaagaactctctgttgagatgacatttgggaagaggcctatggtaatagggaagcaagccattgccaaaaccgtgaagaaggcgtgaacttggcatgtttgggaaggctggggggtttgggagcagatgaaccctctggctgctgtgttgggcaagagttgaagcaacagagaattagtaagaaattacggcagtaattcggaaaagggatgactggtgtgggtctgagtgccgacaggggaagtaatgaaatgtggttcggtattttaaaggtagagctgaccagatttgctgatggctttgaacatgagtgaagaaagaataaactctaggtttatggcttttataactagaaggtttttccacaggtgaagattcttaagatatggattgggatgttggtggtggaggaaatcaggagtttgattgtggatatgttaagctcaggacacttaagacattgaagtagagatgttgaataggcataaagtgaaatggtttagagaatgtcagtaatttttcctgtaaagggctggatagtaaatattttaggctttgcacaccacatttggtttctgtgcagctccccacctctgcctttgtaatgtggaatcagagaaagccaactgtaaatgaatgagtgtggctctgttctaattgaaagaccctgaagtatgaagctcatatagttttcacacatcacaaaattttgcttaaatttttttccaaccacttaaaaatgtaaaaccaaaaacaggtactgggcctgatttggctccctcgttgtagtgggcagaactctgatttagagcacaaggctctgatgtcagatgccttggattcaaatttctgacctggcatttccctgctgtgtaatgtggagcatcttatttttcctctcagttgtttcatatattaagtgatgatttaatagtacttacctcacttgttaaatgagctaatactcataaagcacctgtaatagtatgtagcacagagtaaccattcacccactaattgttttacttctatacctagagcattgtacatggcttagagtttgtattagtctgttttctcactgctataatgagctgcttgagactgggtaatttatgaagggaagaagtttaattgacccacagttctccatggctagggaggcctcaggaaacttacaattacggcagaaggtgaaagggaagcaggcacctttttcacatggtggcaggagagagagaatgcgtgcaggggaaactacttttaaaccatcagatctgagaactctctcacttatcacaagaacagcctggggaaaccacacccatgatccagttacctcccaccaggtccctccctcaacatgtgggtatcacaattcaagatgagatttgggtgcagacacagagccaaaccatatcagagttagtaaatgttaaatgagtgaaagtgaaagtttttgaggtgatatacttggcacctgcttttcctcacccaatgacagttttctttgtcatcaggttttactatgttaggtaccttataaacttgcctttaattattgtcaggttcaagaaaaggcactgaaaaatattctcccatttctcatagactcaccaatttgattggtacaaacgtctgagaagatttgtttctggcagattgaacttatctgctcaacaactgctcaacaaataaactgttaggctttttggcaccaagtagaacaagtggtagaagattagatagacacgatatgataagatcaaattattgtgaatatatatatatatatatatataatatattatatatagaatatattgttttcctttttgaagatcagcctgggaagtggtcatcctacagttgaaactgaaatctgagaagcaccagtgagcttagaaagctaaggtggaatatatacactgctgttacttaatactcgataactccacattaagtaaaagaaagaatgttagacaaggagtcagaaggtatgcttttgtcatgtggctgttcggcaattcacctaatcccttgtggtgtctggttctttatctgcaaaatggggatatactctgttccttgctcatcttcatggtgattgggggtagatcagatgagtgtgtaaaagccccttgaaagctggaaagagcttaacaaatatcagctgttgccatgaaagaatatttgcttactttccattgtgtataagataacgataatcatagaattaatattattcaacttccttgtgtcttttgcacatttctgtacagtcctgtttttgtttgttactgtcattctcaaagtactcaagttgaattttgtcactttggatttcttccaggaatatgtgagagacatttaggtctctaatgatgaagtattttctaggcgtaatgcaaaagattgtaaagagattttcttctgtattgtgatggcagtgagaattacaatgtctaactatttctattaggaattctgcacacacttttgtattagacagtgtaaaaatgctgaatccattaattcgtattgtaagaaatgattctaatattaatataatttgcagaatcatctaacttactaggaaatccaggttgcctgtggtttaaaagtggacataagcacatatcttttcctcttttaactaaatgaagtgatgaaactataaagtagataccagatggtgtatcattaatggagagggatgttgcatcaacgagtcttttacagaatcattctgagggagattcctgagataaccttaccatctgcgcatcaactagattaacacagcaattgtacacgttatcactttttgatgacttgaactattcatttatattggcttgatgcagatttcttttgagagtatgaatcaaagtgcactgaacatgtgaagtacatttagttctgtaatacagcttgatttgcctcttggatctatttcaataaactgcttgttaattagataattcccatgtgtgaatggaactccctctacccaggtatttatattggccacttcacccaggagtctgatataattttcttctttcactaacttgttaggagtaataagtgtaatttaactggacactgatttcaccctttttagaatgagttttcaaaagcagcgacactttactgagagagaaggtcaaagccatttgaaaagattttttaagtccttatttcatactcaaatgttgctaagttatcaatggcatctctgtgaacattagagatatcacatttaggtgtcttgcctaattgaaagatacttagagagtattaattcctgattattggtataagagacatagatagtattaattcctggttggtgatttcatgagaggaagttgagaacagctttcaaagagaaggttcttaagtgtttctacgaagtagtctccaagtctcacagggaattctgttttttttgttttcccaactttatttttgtttgttgtataattgacaaatatgtccataatgctttatacctctttatgatagccacattttgtttataatacttgtgattagttatgtgtgtttatcttgtacactcctgaggacacagagctaattttcatatttctgtattttctatttttttcttttgtttttgaggttccataacttgcatatttctgtattttctacaaatagcacagtgaatgaatcctagattttctaagcttatactatgaagttatgtttatgcaattagtgtatagttttaaaatacacacaaatgtttagtatcttcttcactagccatttaaattcataatttaattctatcctgggagaaagtcaagtttaactttgaatattttgttattgtttatagcatccttattaacatgctgatgataacatttactgagcatttacattgtgattggcactttgcatggattgtctcattttatacttaccaacaaccctgtgtggctgtgcgccctattgtttaggtgaaggcttaaagtaattcacctaagaacatacagccaaaatatgatagatctggatttgagccaggttccatgcttaagcatttagctgctgtctagtaccaacttgaagatgttcattctgtatgtaaatcctgctgattgtagcattagttctttgtgtggtaagttagctcttaccagcttctaatacaactttttgggtcctgacgttatgatttgattaatgctacctcataacctaaaagtgttaagcattcaaaaatgcataattttctcccagaatttgacatttcctgggaaaatttgaccaaaaaagaataagtaaggtcttattacctagcgattacagcatgatacccctaagagttattttaatatcgagttgtgcttctttcacgttgaaataagaaatttatagtcattaaagcagcttaaaaatttcttcttgaggtcttcattcacttgctcatactttgattaatactgccttccatcttttcatctctttccatcttctggaaagaaagcaaaccttttttttttttttttttttttttttttttacttttgacaaagtgttctgatagttatttcatcagagtttggatcgttgtgtgttcttcaggaaaatgtgtatttttcaggagtctgttggtcctgtgggagggaagcgaggggtaggaccgtggttatcgtgtcatagagggcagaagccacagtctcccatgggtcttccaggatgaagggccttgtctccccaggacatgttgaagacttgagctctttgataatgtgttttgcatgtataacttctccattatgaatttgaattgatttgctctatggcatccactttgctcttggctttcctaagaatgatggggttttggctcagcatgaagccctcttggcttgaggagctgagggaaatcagaaaatttagttaggtataatacaatgttgagtaacccagtgatgtggcatgcatttgttctttgagaactcctccctacacctccccccactgcatttacaatttatttgcattcttaaatatgaagatatgtttgtaagatgggccacttaaaatattattctatgtgctgtatgtaaaaaatggaagactaattttattaggttagttttccatggcatataatcaaatagatgcctccttgtctataaacatattacctattattcatcatgtgcttactatattgaagatctgctaagtgtataccatccttcaaaattctttcccatgtcaggatctttgcctttgttgttccctgggatgctgtttcccacctctgaatagctgtctctgactcccttacaagttttaggctttcctaatgactatcagaaactagacttctgaaccctgtctctaactgtcatatcaacctatttatttgtttgaaagcactcttccagatctataattagtttactcattatttgttaacttgttcatgactgccttcccagtcatccagtagaagttccacgaaggcagaaactttgtcttagacacacctgaatcccttatctggtgaatcataaatgccagtgtggcatggattgctttcagttttcagacacctctggatttcagcagcaatttgcatacagactgcaggaaatctcacagaattaaaagggagagagaattagataagctgggcaaaagagaataatacaaagagaatggtgaaaaataaattgccattaagaagaaaagtatattactagtttgtcacctgtggagagagttgctaattaaattctaaggtcatgcttacatcaaatgagcaatttttaaaagtctctcacttatggcagatgacatgtcttttattgcatcataaagtgttgggctcatctgtatgattaattggcttttgattgtgtgtgacttcttctttctcaattagtacctttgcttctgtgctcctctgtgtgaagcttggggaaaaaataatgccaacaatgataataatgagaaatgacaacagaacaggttattgtcagcccagagtgcttcttatgggaagaaattatgtatttttactaccaggtgaagtctgtcattgtaaaatatttcagtgagtgaagctggatcaaccttttcaagggattaatgcaggatggattcacaattagtctactgacatctgagatactaaaatataaacagtcgttttttggagatggggagataacttaaacttggtttatgggattaagaaaccgtttgatattcccccctgcgacgtgctttctaaacagttgccaatgattttaggtgatgtggttaactcattttggccctgcaatgtgacagagtaaatttaacatgagagttaaaaatgtaacttcctggtagatgtgcctacgtgggttatactagtttgcacttgtcaacctagagagatagactattcctttgacactgggaaattttgtactggcttcttcattcatgtggagatcagggcagattccctgtggtttctatagttaccgagagctacacaaacagagatgaggttctgtagtccacaggtttggatgttgaagttaatagaagcctacaccacttttaattgtaatgtcacaagcaacagaggttttattaaagtggcttggattgtgtacattgagttactctcaattttttttatcatcaacaagtaatgatagtttaagtaaatgcacttagatgttaattgttctgtagaaaaatgaataaggcccagtatcagcatatcttttgttaacataattgacacatttataacttaggtgcaaagatggaaccattttacaatctacctgctttcctaaaggaagtttattattgcagatattccaaaagtagcaagcaagatattttttttccctagtttgtgctctggggaaaaatatcaatacagtatagtaggatatgggggtcttatccttaattcattattcaacaaatcctcaaaatgcgttggcttttctgttaacctctctgaaatttcgaatgggaaatgtggtttaggtaaccttgagctgcttttcaaatctggctttagggatatgagacttactttttttctagggtgagctgttaaaagtgcatccaggtaaaatgatccctttaactggagtcagtttttctatgtctaactttagaggaaagatttgcaaatcatgggatcagcacttaatttggggctctatttaccatgtaggctgtcaagaagtattaaccttaaggtaagatgagaacatggagtacaaagctgtgagttgatggcatacagtacagcggtattaaatagcattatccatcctgcttgctacagtaaataggatttcactattatgatgtgtcagggctttcagtaaaatcaaatttacaagacactaaactgccatcctctctgctgagcagctttattctgggatcttgctttcatattaatcctgttggtaggaaatacttgtaccaattgtgcatggaaattataatttaatgatctcttccttttctttattcagagcttagaatggactactgtgctttgcagtgatagccccagggctctgagaaagagaaaatatacagtgcagctttaaagcccagtattgcttttttgtgagtgcttgtaatgatcataagtgctgagatgccaacaatatgggttgcatactttctcaactcttcacatttcctttaccttttgaaaggctacacaataaaataattagattctgtttaccctgatggttttaaaaaatgatatgccacttgaatatgtaaagacaaggtaagaaataaagcattgtgaaatcaagggaaaattaattccacttttaaagattctttacattttaggaaggctcagcaggctgttttatttgaaaaacaattatttactcactttactttctttgagctcctttcttgctattgataagaatattacagccaggaaatcattatgtttcctgcgtatgagattgaaattggctaaatcctttgaattttcttcacatccaatttcaaagttagtgattgttttgcttcttgacatcttgcttatttataaatttcaaatgtacttcatttaggcagaccagccaatgcgtattttcctattttactgactgaaaaattaaagtacatgaatattaaattttttaaaggaaattgcagtgcttctgttagaaagtgctcttcaatcccagttttatgttcagaccatgagacagctgtgcgtctgtaaggattacgtttcaacacattagcttcagttaaaaagatatatttggtcattaaaacatttgcaaataatattagctcataacatcatcaaatagaagtgcccacatctgaatttggcatataaagcaagtttgcacagtaaggttggcatttaatgaagggaacctaaatccaatttgtccgtgtagactaagataggattttaactttggtcattcttatcagaattttggggactagagggagtccttggcattcaccactcattcaaaaacacatttattaatctcctacagtgagccaggctctattcaaagatataatgatgaatacaaatggcacaaaagcccattggtatctggcacggagctttcagttgacacagtggcgcaatgggcccatggaggctgtgtgttttgtgaagaacactacctttttactacctttgtcccttcaagagctaaagatcatgggattttggggggaaagttagtaggttagagagatccatcaggttaaattatcagatgaagaccccaatacattggttgcctcaagtagttctttctgaaaataaacattaaataggtaagttcctttgaggaccggaactcattcccctttaatcactgtgatagtgcctggcacataataaaccttggataaatttttttaaaattaatgtgttcgtccaggaatggggtgggttccatggccaaataattttgaggaatgttaggtttcacaaagctgaacagatttcttttctacaggccttctcagaagttacgtacacttagagcctccaggatgaggatgctgcatgatgtgtttcaccattatacccaaaacatggaattgttctgagatgaatttatcccagtatatcacctgagatttctgtgccctgaataatgctagtacctacattttttttagtccttcttagcttgcatcctaggatgtaaaagtagagtagccgtagaatttcactgttggaattcctaatctgagggcttctgaggacctgaaagcaccctgggattgccgccctttgcaccatgttccaaaagcataggtcaatgagaagaggctgcctcagggtcctaaaggtgcggtgctctgggatagggttttctttctctctgaattctcttcctaatcctcaccctttccaagagtctttgagaaaactgtagcccaaggtatctaatttttgtgtttaggtgtccattgattcaagcttgcattattccaacctcctcagaattgggagcaatgggtagtggggtttctccttgatcttcccatgtcaagattcagcaccatgcccattaacccaagagttgtacatacttgcctgaagaaccaggcgcaggtttcagtagcatgccaccaatggaaagtctgaaccagaatattcttcccttttatgaaatgaagtaggaaggtaattaaattggataaattactcctgtggatctctacaaatcttcccgcaagtgttgccaagatatggtgctgaaggagcaagtgaaagagatatcaacatcttctgttccatcagagcctcaaggtttctgtgaccctctagaaagaatctataggacttgctattcttttgtgaggaagcagtaaggtttacttacatagcgtagaaagtgcgcctttgtatctggagaataagtttgatgatggtcagtaatcacatgctctgcaatttaatttgtcttcgtaaaacgtttagaactggagttcagagagaatggcatgatcaccacactgtccccttgtgacttgtagtgtttgtataaactctataaaagcagggaccttgtctgttccctgctgtatccctattacctagaccagtacttggcacttagcaggtgcttgttaaatatttgtcgaatgaatgatgaaggcattttcagcgggtcaaaaatgtccacgtagcctagagatgcatcttccaaattgcttagtgggcagctcgtctcaagttagaccttattctgcaggttttctgaaatttaggtgagggtccttttgctccagtcatgctaacttctgctattaatgcaacaacataccttatttatgtaaaattaaacatcagtgtaattactactcctcaagcaagcttttgaaataaattaaattatttgtctaagtgatgttcttatccattacttttacatgactggggagaaggtgaataatgatgatgatgatgatgatatcaattttatccacaatctttaacctaaatagaatgcccaacttcatatattatcccaaaacctggttttgagtgacagagtgcccctgggtactatgcattgtgtacatccttgttccaagattgttgggaaagaaatagtaatatcagtgtcagtaccatcaacgtcatcattaaaacatccaccatcggcacccgcctgtagtcccagctattcgagaggctgaggcaggagaatcacttgaacctgggaggcagaggttgcagggagccgagattgcgccactgcactccagcctgggtgacacagcgagacccgtctcaaaaaaaaaaaaaaatttaccatgaattgagggattattataagctaggcagtgcttgaaattagttaacataatactgtattctatccctagaacaaaccattaggggaaggtatttctttgccaggcaaccagttgatttgttgagtctgaaagacattgagtaacttgacctgggattcttagctggtgcacccaggcctctgtcttcctcctcaccaatggcctctccctctgtgtcaccagtggtggactattaaattttcactttcagtctcatatgattccactccccttttcatcctccccctcttcatttttatttatttatttaatttttgagacagaatctctctctgtcgcccaggctggagtgcagtggtgcgatctcggctcactgcaacctccatctcctcagttcaggattctgctgcctcagcctcccgagtagctgggattacaagcgtgcaccaccatgactggctaatttgtagagatgggatttcaccatgtctgcccggctgatgtcgagctgacctcaagtgatctacctgcctcggcctccctaagtgctgagattacaggcataagccaccgagtccggccctccccctctttaaaaagatttttggtggaggtgggcctgacattttttgtttagaaccactagagtcaagtaacagattctcaactgagtttccctcagcaacattcatacttggttttcttccataagctaagcgcccattgttttatttaatagtgaatcttgtttaaagagaagttgaaccagctttattacagggcatgattagatacagttaattagtacggctatagcgtataggctaaattgataggaaaggtgctgaaagtaaggaaattgtaaaggatctgtgaactgggtcttattcctctgaggggatgcagagaaaagaagctggccctgtactgtggggaaatataaccagaaattgaagtcacaagcgaagccaaatcagcccaggtaaaggtgatgacactttctgagatggcaactagtagctcttaagtagccttgaaccatggtgtccacagcagcccagcacgcttagcttgctatgcggattgtacctgtggaatcctggggcataacttcctgcaaatttaggtttagtcacacaagtttactgtcactttccattctaagactgagtgtgcacttgtttcaactctctcgtttcaggtcagagatgtttctcctatcctagaactatttgaacttcaacttccccaggctctgcctcaaaattaactttagtaattaatgaccttcagtacatgtaccactcaattaactaccctcaagccagccgtacttttaaccttcctcgatggcagattcttgtccatctcctgccacagcattccttcctaggagatctccatgcttgcgttctctctgcagattgctctgcctgtgttgggcatccccttatttttacttttttttccccaactttatttttgtttgttttgtataattgacaaatacatccataatgctttatacctctcttgattatagtcacattttgtttataatacttgtgatgagttgtagatgatgaggggatgttgagcatctactgtgtgtgcagatattatgcatggtaggtacctgtgacacacagtcactgaagcagacacagtttacctgtaacatctcatcactcctccttgcttgctacttcctaatattagaatttctagaacttaatcatagtgtagtttccaccttgccttcatggacgatctgtgatgtgacgtgggcagcggaaatagaagtgagaacggagtagcactgactgaggggttgtctccttgggcaagcagtccacgtgttgagaagatttgtctgcttatctgtttatcctcattatcattaaaatgaaaatgtaactagaactacaacgagcacttctgtagctcaagaaaaataacccataataaattgtgaactgtctattctctcatggtgtagttactctaaattgtggaaatttggcagacgtccctagaactatttgttaaaattcaatagtatgtaattaaagacagagactgccattttgctgttgggtacattaaaaaattatattatgtatcatttggatttgaccctgaacttatttcccaaaagattaatgccagaaagacaaaagtatattttagtctaaatagaggctcaagttatataaagtaactaaatttatggaaatatcagttagactctagctatttaagagtaattatgcaaaagatagttttgaacgaatattcctctagaaatagccaaatggacactgtaattatgatgaaattctgtgcttcaagtcttgccagacaataaaacaagactgctgatattttaagcctatatcattaaaactaatattgatacaacaacctggataatatgtcagtgaaatggaatattttatagatacacaaaagtatactgctccttgaaacgttagcattcatctagtataaaattacacttttttcaagcaatgaaacagaaacctagaggcttgaaaattgtttttacgtggttgggaaagggaatggtggcactatttacctagttatgattatctcatcagataagttctaggcaagtgagtgggtgtttgtctgtttaggttcctgcaattgatttgtgttggggtggccctcccaaatatagacaagtggatatggattcatatattagacctcctagttattggctatttattcttagataaatcatgtaacctgtttgaccctcagatccctcatctgtaaagtggccttcatattgtacttccttggggatgtggagattaaataaaatattatgtgttaatttatacatactaaattaggataaatatcagttatcagcaccagtctctaggaggttgataattatacagctgtttgaggtagcttgttgcggggagaaagccctagaatagagtagagggattgaatctggaaacacaggttgaattctatttgaagtatttatctttttttttttttttttggtgagataggtctcgcactgtcacccaggctggagtacagtggcgtgatctctgttcaccgcaacctctgcctcccaggctcaagcaatcctcccacttcagcctcctgaatacctgagactacatgcacgtgccatcacaccgggctaatttttgtatttttttagagacggggttttgccacgttgcccaagctggtctcaaacttgtgagctcaagcaatctgcccactttggcctcccaaagtgctgggattacaggcatgagtccctgtgcccggccattattttgttatattgaaatgttatattgaattttgccagaaggaatggaattattggctcaaccataaaactgtttttataatatagatacaataattaaacctacaattaagcttatataatctttcaggtttttcagaactctttcatgcatatcattttatttgatgaaatgggatttctctgccaggtatggtggctcatgcctataatcccagcactttgggaggctgaggcaggaggctcgctgagcccagaagtttgagacaagcttgggcaacaaagtgagaccttgcctctacaaaaaataaaaaaaattgccaagcatggtggtgtgtgcctgtggtcccagctactcgggaaactgaaggaggaggatcagctgagcccagaaggtcaaggctgcagtgagccattatgtcgctgcactccagcctgggcaacagagcgagatcctgactctaaagcaagtcatggagggtgggggcagcagatttatcttatatatatatttgctttcgaatttggcaaattgtgtatatcaaagttagaagtctgataatttagtgcacataagcttaggtctttctgtcatcttttgagcagaggctggtttgaatctgcatctgttttgttgaatcaccctagctaatgagtgggaaatttaaaaaaagaacagagctggttgagctttcacttctgcatattcaatcctttggtatgtttattaaattctatggtattgtaatattgcagtctagctcttccagaccaaggaagtaggtacacagagaagaaaccaggttctagaggttgtggttgtgacatttggggatggcagtgttaaggaagtagccagggtgtggggactgtgggactgtaggagaccttagcatcagaggaaatgctatacaggtgccctctaataatgtaatgtgagcatgtcttctggaatttttagttttgtgtttgaatgttccatcagaagtgtctgacttaggatatcagtgcagaacaaggatttgctttttcgtgatgcattttgggtcagtttttttttgttgttgttaacatcgagtaagtacagactgagttatattttccatcttctccattaagatgaaatggacaacaagaggaagcaaacatgaaagcttgggtgagggtgggtcaccaggctgtggtgggcaagagcaaggagccctggggaaagtcgcacagcagttactctccgacagccactgagctttgtgggacagtgttcacaattgtgaatagtcctggttaaaaggtcttttcttgaaaaccaagcttttcatttggattctattccagaggcacaaaacaattctggggtcttggctttggcaaaatgacattgggatgtttatatcaattttctttagaaatgaaattttcatttctaaagaaaaatgtactgggtcagacttaattctggcacatctcatcattttgtgcaacttatgcaagagtctattaaaaggactcaccaaagagcaaaatcaccaaagcccttttcgttataaaactaaaggtctcagcatatgttggccagctcagaaaaccttcacagacggctgtgttaaccttttttaagaatgtaatttttttgactaaattactcaaaaggcattctgagtttagagaatgcctaatcttgttgaaattttaatttcattaaaattaaatgacaaaaaactccagtctttaagtcatcaagcaataacttttcaaaaagatctgtataaacatctaataatttttttctcttgtaatttaaatttatttttatgttcctcccacaacttcccgtcagctttgctgcttctacctaaaaagcaaaaagcaacgaatattggttagttaggccttttaaattattttttatatttgtggatcttatttgtatttttaatcccttaagtcaaagtgtattgtgttcatgactgaagtatgcagttgttacagtataaaattatgggcattataaggattaaacctagcttgtcaattgtgggtgaacgtcttttttattggagtatgctacagtgtaaagataaaggcataacaactgttttaaattgtttttctttctcattttctctgtggtacgaaatatggtaaaaatacctgctaacttgccactgtgaacacccactctgcagttaaaacatttcccatagcctattttatataatgtactttctggatcccctcattatccagagaaaatcatttttcttttgagaaaattttttcttttgaagtttatccacatagcataacagggtattggtataagtctttctgccttatactttctcatcattcatttactctaaaattagtaaaagcaataaaattctgtatgtgcatgatacatattttaagtaacctggaatattgactttaatgtatttctattattgtattagtaactttctttatctgtggacgttttaaggagagagaagggtttgctgatttcaatcaacaatcagcaactgaaataaaaattctaaaccatattttctcaaaaacctacctctgtaagttctgtaagttttgctgaattcaagaataactattctctaatttcttagtctcatctgtaatttagaatactttcaaataattttttggacttttataaagctttaaaaagtaataccttttaaggctttaaggttttaaaaggtatgactttaacaacattttaatgtaatttaatacccttgtttctaacagtttaagacttttgccaaatgtctttttattttttagtgttattttttgcactagtagttgttcatttcataaatatttatttagaacctactatgtggcaagctccattttaggttctggggatatagcagagagcaaagcagacagaaattcctctggttctgtagagctgacaattcattaatgtgaggtagtcaataacaaatatattttatgtcaagtggtgatgggttctatgaagaaaaatgactcaataagaggagagaaaatgatggtatgtgtatggtgggtaggtgtgcgtgatgctgttttggatagcgaggcctccgattagatgctacgtgagcagggacccaaaagagccatgtgtttcatctacctgggggagaagcctgctggcagatcctgttgaacactcgttacctaaatctcttgcattggctccatgtcatttattgctctagtgtattcttcactatcttttcagaaagtgccaggtttgcttttcaagtatagtatctgtcttgccaagtctggcagacagtgcttattttggtctgtactttgttagcagatcagttctatgttgagttcaaatgacactctggtttcaagagtgactctaattctttttctcctagaggaatagtaaataagccttatgaatctggtcagtgagtattgaagtattttaaaaattccttatccagtgaaaatgcatccatgattctctctgtgactttacacacctttcctcaagcctatcccaaacccaagtcaacactaacaatcctaccaagctattcaaaatgaagagtaacatttattgcaagttttcttgtatgtatgtcaatgtgtttgctagcactgcaatgctgagttatttaattaaacctttccagctttctaggagtgttatcctcatgttttagacaagtacagtgagacacagtaagggtatgtactttatccaaggtcgcgggaatagtaagtggcaaaaccaggaagtgaaccctggcagtctaagctcacatactctctaagccacacaacacagactttttgagaggttgtacttggaatgggattgcattagccagaaaggggctgagtgggccctctggttcagtgttctaccaaagttaaataatatgtgcatgggccacataaatgttttaatatgaattgggtgaaagttcctcctttaacgttgtccatagattggaaatggttcctgtccacaaggttgtgcagttgatggttgttacaggccgaaagaatgaggggtcgtgatcaactcactataccactggaggctatatgagtaaacagcaaactgttctcatgaaagcaggatgttggcaaaatgacaaactgcgctacccagaaggaatgctgagggcagtcacgacccaggcacaagtgtttcttgtgattaggcacatctgaagtctgttagcaataatctgaacctgtgatcaattaagcagctaaccaatcgttacctcctcctccctgctcttgctacccaataaataggaacagtggtagaagctcgggggctgcctttgctcgttagaagcaggaagctctcttcttcttccctggttccccttcctttaaaacagtttcttttgtcttaagttttcatttctaggttcctcccttccttcagtcttgtaatgatggtctcaagcagtaacaatagtaactgctgtaatgacgatctcaaaatagtaaccatggcagtcggccacggatggatctgtattcaccacctccatggtccctttcctgcttttgttaatctgttcccctattaaaacagagaaggcctgattgctgttatttgcacctgtcatctttgcactgagtccccagtttttgtggtgttccccccaaccaccaccttggggtgaattctccttcctggttttaggtttccagtccccctgctgtcctccaacctcttccccatgattaaaacaggaaaagcctttgttatctgaaggtttctctactgtggacagtctgccgagatggcagcagttaggtacagctaaaaaagttcaagtaactcttctggagctttgggacatatgttcactcctcatccttagcatgggtcatcacttgtttttctcacgccatataattatttctcaggtttagacccccaggtacacaatactgctttccagtatgtttggcataattttattaggtatttaaagcatctttgtaccataatcctccttatctgacaaattgaaattcattttaatggtttcttttaccctatgaagttttaatgaatggggtctatggttggagctcatctttgcaatgagtagagatcgtgctgacattgtatttgaaaatagtgtttattctgggaaggatgttatgcaggataatacaagagttttcagaagtttttatattttatttagggtctttgcaatgtgttgaatcactgttttagttggaaatccaggttcatcatattgccatttatttttttaaaaaattggtacatatctcggcatggaaagaggatggtattctggttcctcaacaagtatccagagaatgtaagtttttatctttgttttagacttggggtacatttctcttatttgtccaagaggtgccagatggacaaatcacagtacagacatacttcatttgcctttttaaaaaaatacaaatttaaagtttgtggcaaccctgcattaaggaagttgattagtgccatttttcccaaagcatgtgctcacttagtgtctctgtgccacattttggtagttcccataatatttcaaactttttctttgttgttatatatgctatggtgatctatgatgtgatctttgatgttactattgtaattgttttgggacaccacagaccacacccatataaaaagctgaacttaattgataactgttacgtgtgtgttctgactcctccacccatcagccatttccccatctcttttccctcccctgagaggcctccttattccctgagacgcaacaatactaaaattaggccaattaataaccctacaatgacctctgagtgttcaattgaaaggaagagtcacacatctttctttaaatcaaaagctagaaatgattaagcttaatgagaaggatatgtgcaaagcctaggtaagctaaaagctgtgccgtttgcaccaaacaattggccaagttgtgaatgcaaaggaagtgttcttgaaggaaattaaaagtgctactccagtgaacacatcaatgataagaaagtgaaacagctttattactgctgtggagaaagattcgtggtttggtggaatatcagaccagccacaacattcccttaaaccacagcctaatctagagtaagaccctaattttcttaagttctacgaaggctgaaagaggcaaggaagcttcagaggaagcattggaagctatcacaggttgatcatgaggtttatggaaagcagccatctccataacataaaaatgcaagataaagcactaggtgctgatgtggaagctggagcaaggtatccagaaaatctgcctactgtcattgatgaaggtgactacactgaacaacagattttcaatgaaggtgaaacagccttctatcggaagaagattctgtctagaacttttcttagctagagaggagaagtcagggcctggcttcaaagccccaaaggacaggctgactcttgttaggtgctaatgcagctgatgacttgaagttgaagccagtgcccacttaccattccaaaaatcctagggtcctgcagaattatgctaagtcaactctgcccgtgtgctataaatggaacaccaaagcctggatggtagcacgtctgtttacagcctggtttactgaatattttaagcctactgttgagatctacctctcacaaaaaacattttccatttaaagtattactgctcattgacagtgcacctagtcacccaagagctctgatggagatgtacagggagattaataatttcatgcctgctaatgtccattctacagcctgtggatcaaggagtaattttgaccctcaagtcttactatttaagaaatacgtattataaggccatatctgccatagatagtgatttctcttgaatgatctgggaaaagtacattgaaaaccttccgggcaagagttaccattctagatgccattaagaacattcgtgattcatgggaagaggtcaaaatatcagttaacaggagtttggaagaagttaattccaattatggatggcttgaaagggttcaacacttcagtggaggaaggagttgcagatgtggtggaaatagcaacagaactcgaattagaagtggagcccaaagatggaactgaattgcagcaatctcatgatgaaacttttaatgtttgaggagcaaacttgaacagatgatgagcaaagaaagtggtttcttgagatagagtctactgttggtaaagatgatgtgaatattgctgaaatgacaggaaagaactaagaatattataatacatgaacttaattggtaaagcagcagcagagtttgagataattttgaattttgaaagaagttttactctatgtaaatgctattaaacagcatcacatgctactgaaaactctcccctgagaatgaattgatgtggcaaacttcattgttgtcttatttaagaaattgtcatagccatgccatttggccaccaccgcagccatcaatatcgagataagaccctccaccagtgtgacttgctgaaggctcagatgattgttagcattttttagtgataaagtatttttaaattaagattatgtactttttttgacataatgctattgcacgcttaacagactacagtgtattataaacatgacttttatacgcactgggaaaccaaaaagtttgcatgactcactttattgtgatagtgtgaaaccaaacctgcagtatctccaaagtatgcctgtattcagttttcctattccagtgatatggtggttgtaaaataaaagtatttcctccctctttctctcccctcatttctccatctctctctctctgttcctctcccttctttccctcccctcccttgccttatttcattcgtttcttctttccctcctttctttcttccctccttccttccttcatttcatccatccatccatccatccatccatccatccatccatccatcagcaaacattaagtgctggatttcaagattcatagacatgattcctttttcttaaggtacagtaggttagtgggaaggaatatagggattattttatggtagtataagttctttaatacaatttatactaatcatccagtttaacattttcttacctttctattccttgacacctgaggcttaaaatttggatagaccaggcatcagcaaactgataataatttatacatttttaaatggttggggaaaaaattcaaaagaataattttatgacacaacaattctatgaaattcaaattttagtgtccataaatagttttattggaagacagccatgctcatttatgtgtgtattgtccgtggctactttcgtactacaacagagttgagtagctttgacagagaccatgtgacccataaagcttcaaatatttactctctggccttttatggcaaaagtttgtcacctcctgctttagacatcttttttcccctagaagttcctgaggataattgattgtggacatatccaactatgttccaagacatgggctggggacacaggaaaaagcaacaaacaaggagaacctgtttcccaccatcacagagctcagagtctagcgagtggaatacaatacagagaacaaaatgagccaaaatagatcatgaaaagtgtgatgaaagaaacatgaatacagtgagagaaaataggagaggggttttcagatgaggtgatctaacgacgaaacacttaggaagcacacactcacactccaaagaatagcagaggtagcggtcctgagtgctccagccaccagtcttcctccagttttcctcgggaaatggcaccattacctactcagtggctgaagctcacaatctacgacacatttttggttctcacttttcctcacattccctccttcctctccaattcatcaggaagttctgttgattctacttccaaaacatagttcaattttgtctgttttttaagtctattaccaccataaaccaagcctccatctctcttagctgaactcttgtaatcactcccttgtctgtctagtccatcttctgttccctccaccactgtctattttccagccaagagctatggttttttaagaacttgagtctgggccgggagtggtggctcacgcctgtattcccagcactttgggaggctgaggcgggtggatcacttgaggtcaggagtttgagaccagcccaggcaacatggtgaaaccttgtctctactaaaaatacaaaaattagccaggtgtggcatgcacctgtaatcgcatctatttgggaggccgaggcaggagaatctcttgaacccaggaggtggaggttgcaatgagctgagattgcgtcactgcccaccagcctgggcaacagagtgagactctgtctcaaaaaaaaaaagcttgagtcagattatatcgtttctttgctgaaaaccgtccatgcttttccatagccgttagaataaaatccaaacccattacatgcctgttaaagaagaaaggaagccaataaggcctgaacatggggattgtctgatgtgctggactggatataagatggtgtaagaaagaaagatgattcctgtatctctggcttcagcaaatgtgtgaaagatagaaccagttactgagtctaggaagaccaagaggaataagtttgttcattgaaacaaacaaaaaacaatgtgggattgtgttctctctctctctctctctttctctctctctctatctatctatctataaaaaaaaatctgtttatttttgagatcgagtctcactccatcacccagactggagtgcagtggcacaattttggctcgccacaacctcctgggctcaattgatcttcttgcctcagcctccagagtagctgggactacagatgcgcgccatcacccctggctaattttttgtatttttttgtgtagacatggttttgccatgttacctaggctggtcttgaactcccgggcccaagcaatctgcctcactgacttcccaaaatgctgggattacaggcgtaagccaccgagccgagccctgtgttttaatcaatttaaattttaggtgtttctgatacaattgatttcaataaaacatttggaccattgagtatggaatcagaggcaaggtctgggctgggtatatagatctgggagttgtcagcccatgaggggagtttaaagccatgagactggaagagcttcgctaagagaccaagtgtaggtcaaggagaaaagtggaccttgaacagccctgaggtctgaactgggggttacttcttaagggaagacaagagtccagtggaattcctccacagggactgaaggggaaggaggcaggagttgtgctaatttatccagggaagcagttctccatcatctttagaggaagtgggaatctgggctggacaaaagccaaagattattaagagcgtcttctacaaacaaagtctctggctaatctaaatttaattctggatcttgtaatatatagtttaggagttcatttaaatttaatttacatagggtgaaaataagctttgacctttataattgctgtatcagtaaagtcacaggttcattgacttgttagccaatttttcctgtgttacttttcttctggttttgttgttgttgtttcagtttgtaatatacagatttaagaacaagtgtctggatatccacaaaggcatcacagacagctgacatgtggatctgcttttgtttgtaattaaaatgggcttaaatctcatcccccttacactaagtaaaatatataattagaatttttaatatataataacttttaaatatctcattgtaggttcagggaaggtaatagtattcaattagaggctaaatgccacctcctacacaaagccttctaattgttttgtatagatggtgatctcttttcataaggcattcaatacagtgatctggaaatcagtacgttaatacagtgatttgcaaatcactgtactgtagctgttaagcatattacctctggagctcggctgcttggatttgaccctggcagtgccacagacaagctcaaatgacctggtaaattatttcattttggagggccttagttttctcatctggaaaatggggataattgtaccaacctgatggagttattgtcaggtttgcatgagacaatctatgtaaagcgcatgtcctgggatcagatttaagaactatttagaaaaaatgtctgtattaacacttagctaaaatacgccactgatttgtaaagatattattattagcatttatacctttcttgtcctcagagtgatttgatgggatatgggcaatattctaaacaatattaaatcaggaaggctttagttttctaacatacaaactctcagagagctaaagactaaaaatttatttttctttgtataaccagtacctggcacaatactaggctattcatgctttgttgaactgagggctaaaactcagaaagttgatatcagagaattaggatgattggggcaagggctggcacacgccatctgcttgaggggttgtgttagtggctgtgcagaactttccattgcatcattacttttgttttttgtcaagaacgaaaggtatataataaaagttggctcaagagaagtgaaactaaagagaaaagaggaaaaaagtgaagatgccaggtgctcatgcctgtaatcccagcactttgggaggctgaagcaggtggatcacctgaggtctggagttcaagaccagcctggtcaatgtggtgaaaccccatctctactgaaaattcaaaaatcagccaggcgtggtggagtgtgcctgtagtcctagctactcgggaggctgaggcaggcgaattgcttgaacctgtgaggctgaggttgcagtgagctgagatcgtaccactgcactctagcctgggcaacagagtgagattcagtctcaacaacaacaaagtgaagaaagaattgaaaaagaatcgaagaaagccctactctgaatgagctcaaatgcgtctcagcatagaggaatacagacaagtgtgccagttcttcttgtggagaagcactgtcccagaagacgggagttatcctgtgacctgctaggccaaataggcttttggctggactaaagtagttgagcctctaaatgactttactctccttcagctccgattctttcaacacaggggtatctaatttctaaaaccagacccagtgggattgagtggcttgcccaaggtcacaagcagtcaggcccctgttaggaagtgccccctcccatccagagatgttcagctctaaaataggctgcctaggccaggcgcagcggctcatgcctgtaatcccagcactttgggacgccaaggcaggctgatcacctgaggtcaggagtttgagaccagcctggccaacatggtgaaaccccatctctattaaaaatacaaaaattagctgggggtggtggcgggtgtctgtcatcccaactattcagaaggctgaggcaggagaatcgcttgaacctgggaggctgaggttgcagtgagccaagaccacaccattggactccagcctgggcaacaagagcagaactccgtctcaaaaaaataaatatataaaataggctgccttctgagatttgccagtctccctgtcaccagtagtgtttcaggcacaatgagaacaatcacttgtcggggatactgtaaagaagattcttgggaaaggatttgatgacctggaaggtctttacacgttaaagttcaatgattctagctccagtttcatggatttaataagacagcctctcttcctagctccttttagaaatggatctttgaaagccttttgttttatgttctatttaaaatagcaattagctttgcatcgcaggtactttacagtgcaccatgtgtattattcttgtggaatattagttcaccagatgatagcccacaattctagttacatatgaagtggtggtgtggtgaaataacattgcagctcctcactaaaccaaaaactgcagcaagcttgtcgcagagagaccctcattttcccagctgtcaacctgactgatattttaatttttttgccctgtagaaaacttcagtctcttatccaatagataaatgagtgaacccccaggaaatgcagcagaatgtttctgtttgccaatgcaatgaatgcagaagctaataaatgtctacttctatcaggaggaggcgtgtaatgagtaaatgatgagagaaagaattcagggaaacaaatgatcaattcagtctaagatgacaaacaatttcctaataacttggcctctagttggagagagggcttcaccaggcaaagagaatgcctgttgaaactaagcctagcacaaggccatttacattcagctgctgatggatttggtctggttacatttgggtcacactgagcaataaggcgacgttcagacacagcgtggttattgcagacttttctttgccctgtaatgtctatgagtgtgtactaggaaaaggaatcatttcagagcctaattcacattattcaccccgattccatttatgtttcacatttgtctttataataaaaatctttttcaaagtaaagatctagtctctttctcttgaaatgtgttcagatcacaagggtcacacaagaacctcttttgtgtagagtgaatatgctgttctttaaagacttttgtagacctcagctccctaaatccccagtgtctgcctttgtgggaactaacagaacgcatatgctttgtctctcatggatgggtgcattcttgcttataggtcttgtttggaaggacttggacctacactaggcagaatacacagtaaatgagatgggccttggaaggagacttgcagcccacatggaagatgtgagaaagtgacatcatgccagactgaaagatcatttgatgaaatgcattttattatcaccccttggtgggatctttctaagaacaattctcagaaaagccacgtggcaaagattggctactaaataccagcagttttcagggacagattttcatgaatatttctagaagactatcagacttgtttactggtcctctatagctatctttttctccccatcccacccaccctcttcttttttttctttcttttttttttttaaacaaatatgacacattctggtgtatttcagtaccacatgaatgaactgctttgctgcagttgaggggtaaaacttttaggtagagtttaatgcaggaaaatgctaaggagccaccaaatagaagctggacacaggcaatactgcagggctcttagtgtacttggtagcatataaaatacaccttagagactccggaatcctgcacactgccttctgagggagagccattatacctgcaagctaagacttttcaatgtgcctctattcacatgcatatttctctgccaagtctttcaaaaaggcctttcctttgaaatacaaaaagataaacacatctttgaaatagattgatggtcctttgccacttttgagctttctccaattcatatctgagattattaacccttaagactgacttttctgttcacctgtgtaactttacgtgtgttgctagcactagagaaaaccatgtcacagttatcattaacatctcagtttgtgctaaaattgatgaaaagaaattaaacttcagatatgtgtatcatctgcattggatcttctttttcttgggtattgtggtttggttaagaaataaatataaaccctccatggtcaacaaaaggcatgacttagtgaagtactctgtagggtaccatctactgctttgtactgaaagaactataatattttaaacctcaagacctaaggccttctagctctggacttagggactgatttatttctggcacttaatatcttatggaacaccagcaaatgtgtgaccttgtttaaacacaccattcctggtaggtaaaataaagatagtggcccctaactttacttccttcttggctggtttttatcataaaatcaaacgatatgaacataggaaatacttgattcctaacaatatttgcttttggacagtccaagactcaaccagctctcctatgctttcaactcttgccctgttagaattgtgttcccttgtataggaagaatctccagagcctcccttctttccagagacttttgaatatgaatgttagagtacatctcagtagatcataagcagtggaatcacataactaaatttaaaaaaaaaaatctaattcaggtcctaggaccttactctgtagaagttgcattcagtaaatacttgagtgaataaaaaatggacattgacccacttaacaaatggcagaagaatttcagagataccaataataaatagggctttaaccttcataatttaaaattggtttgtcccccaacccccttttgaaaattaatccccactctctcatctgtattgaccttgtggttgcataggtttgtactgtgccaaaagggtagatttttgtttttacttttttgttctagaggagagttggtacagtttggaaaatcataagaaactgttgcgtaactgtccttattcttatatctgttcaccaagggctaaaacttaaaggaatttaaacatttcttctctccttttttctcttggggaaagggggaaaaaacaaaccaaagtctaagcagccctatcattccattatatgaataatctattagttactttagctattttctgtggctaaatacttgtttttcatttttcagtatgatgaactccacaatgaacaaatttttagctaaatttttgtatacattcatgattatttcacatatttccagacatgaagcctttgagtcagagtacattcgaaaggcatttgaaacatgttgccgtaaattgtaccaatttatactcttactagcaaatgatgagggaacccatttcctcatttactcattgacacttaatgcatctgtgaaatgaaagaaagcaagtaagacagccagtttgatagggtaaaatcaaatgattttaccaatctttgtctttcaagtttttcaaatgctactatcaaggaaatgtatgtgctagacacctgcagtctagcccttccctgtcctactccccagtcaggagacttgaaagaatggtattttctgttaggtgaaatctcagcttagaatataatacaattcatcctagacttctgagagtgcatgatgccagtgataaaagtagatttacaatgagacactgtcttggatagtaattctataccccttgcctgcaccaatcccaagactgtcttcattgaatatagatattaagtgtgtgtgttaaaagagtgagcattgtagttctttttatttttatttttttgagacagaatatcgctctgtcgcccaggctggagtgcagtggcgcgatctcagctccctacaacctccgcctcccaggtccaagtgattctccagcctcagcctcccaagtagctgggattacaggtgtgtgccaccatgcccgggtaatttttgtattttttagtagagacggggtttcaccatgttggccaggatggtctcgaactcctgacctcaggtgatctgcccaccttggccctcccagagtgctgggattacaccgtagttcttaatgagtaaatctgtcttactcatttgtgtcaccttttatatgtcaaaaggtgacacagataacttcctgagcatagtgattctttgagcttaaggatgctttgccttgcgtacaccatcagagcacctcctcattaaggcttttgcttgtcactctgcagcggtcagtcggagttgtttcatcttcttattcacttagagagatgtgcacagtctgggatactgagcttgtttgtggcactcatcctttatgagaggtgcgtattttctgtggtgctggaaaggtattacttttgagcaaatagatttgattctgctggaattacagctcatctggtgctgaggagcacagcaagtatcatgcctgtgaaagagttcagaggtttgctcaatcttcaggaaagtttttcttaggtagattttctgaatcagaatgaattatttatgttggcctctattagaatgtgtctatcttttcttgctagagatttgatgcaatcttattttaaaaagtcaggttctaggcaaaagtgggaggaaggcaaactttgtcttggcctctccagctactctcctcaggattcctttctccaccaacacttctccttcctcacaggactccttctgtagtctgtacacttaacttttgttctggaaagcattcttgttcccacctgttggttatgagtctctgtagttaattgataattagctgaagggtaataactggattcactcagtttttctgtcaacctggattccaaagaaataataattcaaggtcttctgattctttatgagaatctttaaaatttgttttctctgtcctgtggttatttctatgattactataatcatattttcggtcaataggatggaccttacaaatttgagaaacactaggttggatgacaaaaatacctccctcccatggcattgacactgtaatatggagctcttgaagacaagaaagacagccaaactgaacctggttatctctgtgtactgtaattggttagctgtttggagctctctgtccaatagcctttcaagggatcttcagccttccattcctaggacttacccctggcctggcccatattagctcttcagcagtagtgcttcttgaatgaatgaattttaggttggcttctctgagggctggagaagaaggtggaatggtaagccaatatcatccaaatcagcatctgttataaatccttcagattattaatataaaattatgaatgaatgcagggctaaagagtgttgctgttaaaggagctaatgtttgtctgcttcatctacggtaaggctgatcatttatggctttcgtcttggcccacagttttcaagaggactctgtgtgcacgtgctcctcctgtagctgagcaagcacaagagagtttgttagttttatagagttcctagtcataggagatgatatgagaccaggggtaaaatggagtgcaagcctgagatgtgttggcaatacgaatgtgacacgttctgtataaagccatccagtggatgtgctattaaatgtgcacgtggcatcacctcattgagcacttcccaaggaaaacttatgacctggagagtgactgtgtcacatcacacagcccttgagagaatgggaggttcctgtgctggttccatgaaataatttaacagttactctagaggtcttgcaagacatcacagtaaattcttgtgataacccttctgataactgtgaaattgctttgtctcacccttgtagaataaacaatgagacatacaaccatgtcaaaagcagaaaggtctcaggtgtgtaatatagaagtccaaaaggtgagtgtggatgactgatactgctttatcacagggagaagagctacaataatagaaggatttgagaccttttattggcattattattaaaaagaataatagaaaaattaataccttatatttgcgataaatgagaagtcccaatctaagcatggaaaatagagaaaggattagagtcactttcccagtaatatttagataactttcatgcatgatgagaatttacttaatacctactggaaatgaaggcatatttttctaataaaaattatacatgcccaggctaaaaccttaaattgttatagaaggctataaaagaaagaaaagtatcttctcacatctgtaacaactgctccttgcagaacatttctgggtatgtgggtgcatgtatttttgcttatcattttataaaatattcaaagtgttttgtacctttctgttttcttcttagacctctttccatatcaaaactggtaggttcctcttattcctaaaggggtcagaataaacttttacaagtagagaaatgaagcttgaattgtctgacacaaatagctagagaaatttaaaggaaataagatcacaactaacttaagaactgaatatgaaggtagatacttcagagaaatatagggctttagagactcattacaaaaaccacttcctagaaataaaaaatttccacatagtgatccagtggcactgtaattctttactaactatgtatttatgtgatttttaaatttatgtccgtctccttcatgataacgttaagtttcataaaagcagggccattcatctgtttgctcagcatcatattccaagttcttggcccagtgtctggcacagacctttagtattaatagaagtaaaaaagtgaacaaataaaaggaaacttagaatgccaaatgagtttttggtgcagttgtttattttaattccccagatgaagaaactgaggcatgaggtaatgtaactaaggttttccttgtgtagtggcagggctgtcaatgaatctaggattcctattctaattagaaaaccaaatcaagaaaaaaaaaaaaacaaaaaaaaaaacctgagactctaattaatgaagtttctaaagctcctggaataaaactagaaatgccagaagcagctctaaatagctctgtttctttatataagaaagagtaaagatggaacgaaagggtaattataaaagcagtttattaattttgccaaggcacccaggagataatggggttttcatgaaatgtgacttctcagagatggtaagatttgatgctagagttcaacatggctttgacattttttaattcttcctgttctttgttggaaaaggagagaggcagaaggaaatggagattcctgacaagtagaagtgaagcattactgcaaaggagaaagttgcttccagtgtgtcattgcatttgactttattgaagttattcatgaggtgtacaaaaaagcaaacatcttagggcttacagaggtctattcctgattactttcaccctgtctatcataaaaatagaatggctgacataagaagtagatttttttcttgtttaataaaaggctggcatggtggcttcagtgtcatcagagccccagacacctattattccattgcagcaccctaacacaggcttttgctctttaaggtcagcttatgtcccaagatggctgctggagctctggccatcacatcaacattgcaggctgagataaagggctgaagagatcccctgtcagcttagatcaactccctttaagcagcctactgggaagttccatataacacttctgcttacagctcagcctcactggcagcaagcttggaattctagttttgtttaccatatatctagcttaaaactagggttatctaaggaggaaggagagattttaagataaaccagtgagagtcttgtttccataaggaatcttaatttggcttaactatggaatgtaataggatttttgattcattagaaactgctaacttggttatttattattgatgactggtgatatggatttgaaaaagaaatagggctgagacaaattatgattcactcatccatatacacaaatgattattagcagaaatttagggatacttaggataaataactaggtttttgagttcagtgcttacataaaacaaatagcaatgctgaatgttagatacatggagatgcagtttgaatccatccgcttgatgattgttcttcaggttcatgcagagttgcataggtaaatgaatggaaatccaggctctttggattacctagggagccaagggttgctggcaagaatggtattgtgatggagaaccactgccttccacaaggagaaaccaggccctatgccaagtactgaacttacatagtcccactgatacagtcatcctgaaagataaagtcctcattttagatgttaaaaagcgagactcagtttaaataacccaaaccattccttagtgtacctttcagaaacagaatactggatctgatatactgtgaatatgaaccgatgttggcaatttgcaatctatttaaattagctttgatttttctgtctgaggacagcattctcctgggagcattgagtaaagacggagggtaggggataaaaggagagagtccagtgaagtggactcaaggccataggtttaagaagtttcagtaataaaatattctttaaggtgccagctactctattggagggctgcttttcttaccaagaatttcaaattccttctgcttttctgcccacctataacagacttcagagtatacacacaagaaaggcagaattcaaaccagtcattaggttttctgatagaagaaattttaaaacttctagataaactaaatttggactattactgattaaaaaaaaccatagcttttaaagttctggtagaaaatgtagttcattgcaaagtcaatctcttgattctgtgtaattctgtaaaaagacagaatggttgacaagtcatgaactccttctgaacacctgatgccactgagtaaataactgtttcagagcttctgtgcctggaattgtatctgcgcagcaattaatgcagcattaaattgggtccccaagcgcttaactctcacctttgggaaaacatacttgcctacatctagctgattatgtatcatagttcctgggtgaggattataacaaaaactataattaagacttttgaatctggctactcaacaatgggaactgccgttatttgacattggtgtttgtggcaccctggacctctttgttggaattggctgccacctagagtgacacttgtgtttgcttgtgttgtaggaggaagaagaggcctgcagttgttagcagtaactatagaccagtttagacacaggacagtctcaccttcagccagtgtggtattgtaccttgaaggtacaggaccagacttgtttctgccaccattctcttggtgctaaggatctgtggagttgccaccatccttgaacggacaggcaatcgtcttgttcttttctgggaaatagtgtcaggccaccagaatttaaattgtacttcagccctcatgtgttacatagtcatgccctaatctccatatgaagcattctataaaagaactgacaagagccagttacatttttcttatgacctctttgatttgttctttttgtacatgcgacgggtatgatcatactagttataataaaacaagattcagaatctgagaaaatattgcacgaatactgtgtgtgtatgtgcatgttttcttttgatcaaatttagaacttgaaaacagatagttttcaaatcgagcaataatgtgtatctgtgcatgtgcattttaatatacacttttaaaagtgagactttctgaaaatggaaaatggcagtgtatcgcacattcaaaatcctgggccacggccagcccagagaaacttgggaatgatgcccactcttgttgattctcgtttccttccgtacggtctagaaactttgttcttggggatgaagataccagatgggtaaatcccccccataccccaaattagtttaaggagagattggaaagaaatattggaatacttgcatctaaaatcaaccactttgttttgtacttgattttgtgctgtcacctcagctctctgtggcaggtacaataaatttgctcagtaaacacccattccaaattctttcttccttcttctttaccctagaagtgagaaaacaaaaataatcaatttcctagcctcctttgcagctgggattcccagcctcctttgcatgatataattgtagccgaaggggtggaagtacgaatctctggacctcccccttcctccaccctgaggacatgggcataataactgcaggtgcagtagctaccttgaaccatgaagacagaagtcaactgctcggggtggctacaagggaagacagaagagggggcctagttatttgttgatacacttgcatagttatatcagccctgagtttcccatccagatttcttattacacgagaaaaataaaccccttacttgtttaagctactgtttcgagcttcaactgttactgtactattattgtagttgaacacatcttaagtgatatacatttcctttttgtggtagcattgcaggctgaagtgtttgtcaatttgtagtagatataataaaggtagtatttcttttcatcctcattataacattatttcatttactttagacttgtctctatcccatcctgttttaaatatgagcaacagttgaagtgctgtttagaattgcaggtgtcactctaacattatttctgtgagtttgtgtgtcatgtagtttgctgagtgctctaggtataatgatgaataggacaagatacctactcctaggtatgcttatggagcttatggactaggtggggaccacacagaaatacatgttggtacagtgtggtaagttataaaagtctcttctttgtaagaacacagagaaggagcataatcagttagcttttactatataatgaactaccacaaacttagtggcttaaaacagctaccattttactcacatcctgattctgcaggttaccaatttggactgttatcagctgggctcactcctgctgagttggctgaggtttggctgctctaggctgtcctcaccatagatagcctgtagtctctctcccgcttgcaggctagcctggggtgattgacatggccctgtgcagggttgcaagagagaggcccaggtttgaaactggtacaccatcactgttgtcgtattctggtgcccagagcaagacacaaacacagcccagactgaagggatggggaagtaaactccatactctcatcatgagagaagctgtgaagtcatgttgctggggtcacggatatagaaaagagtaaagcatggtggccatttttgccatctaccactgggttctgagagaacaggggagggtatagcaataattttcttagaggatttcatctcagatttttaaaattcaagataatagcatgcccttctttattaatactgaataaaaggtgataccatcaatcttcatcagttgtggaatcatttttcaatattgccaattaccttttgaacatcagtttaaaaaataacccataagaaaatgccgctttgagaaaagaaaagttgcatgccggaaagtacaggattgacatgtggttggacttttctttaatctggcgtttctcatggaccattttaggagattctcttccctcaagatgctccatgagcaaatcagtttgagaatcatgaacagtagttctcatcttagagattcacatatagagtaaaaagcaaggccttgggaagtcttggcattaaagtactttggctgttcaatgtagttaattggatttcattagtgataaggtcaaatgttattggtttgatttttttatatgggctggttagttaattccgtagctattaacgctcctgacactggtccactattgtcttcatatttcccatccgtcttaaggaacagaaaaacagaacaggtaagcagtgtgagcaacattcaccaatgtctggttaatggaagaataggcttttgttttacagatttaaatttttattaaaatggcttttttaaaaaaccaccccaccccacactatacagtttttttccccctgttcaaataatttttaataataggtcacattcctaagtccctggtgctacaaagagttttacatatattaccttatttaatccccagagaatcctattaggtaatcattgttacactagtcctgttttacagaggaaaagtaactgttgaggttaagtaacttactcagtttcacaagggtagggccatgatttggccatctggctccaaagtccatgttcttaaccaccatgctgtactgctaacaatcgcccacctaagtgcggagttctgtggacgacatatgcataggttttacaggaaacgtattaaaaagtatgtacaatggagcattcagtctccccacacagtttgttgcccatgttttcagtaattgatccatggtgccttagattggaatgtgttttaatacagaaaatcaaaatacctattgtttccaatgatgccttgtctattaaaataggtgacagaaatatcttccaaatatagagaattatattgttgttttagatatagtttacctcctaggagcttacttggcttatctttgacaaggatgtgcaagtctttatcagatggttgatagtgctaacacatctaagaggtactgtcattctactttaaatttatgagatctaccttctcaaagagtcttgatggaaaacatgttttatgcttatatcaaacaataagactttctgttttaaagaaagaaattattaaatcacacctttgatatttgaattaaatcacatgtacctgccacaaatttacattaaccgtaccattggacaaatcatgtcaagtattttttctgctgtttatggggcaggacaatatgcagagtgaatatgaatgaagatagtttttattttagactgtaaaggaccttataggcacagaagtgatatgttgttacacacaaaaaaatgattattcattagaagatcaccttagaccaccttgtaagatcatggacatctttctttctccacatttttttgttttttttgagacaggtcttgctctgtcgccaaggctggagtgcagtggcacaatcttggctcactgcaacctctgactcctgggttcaagcaattctcatacctcagccagccgagtagcagggactacaggtacccgcaaccacagctggctaatttgtatttttagtagagatgaggtttcaccacgttatcctggctggtcttgaattcctggcctcaagtgatccgcccgccttagcttcccaaggtgttgggattacaggcgtgagccacttcgcccggcccgtttgttctctttatttatctttttaaggtcatcttaatggatttcttccccattccatatactgtaagtaattactcttaacaaatttgggagggaatgtacacatcttctttggaaataggaatgtggttgttccttatttgagcacagatcatacaagtcttacaattcagctattagtaaatgatcagacaaattgatatatatcctactacgaactgcagggttaaccaaagaaaacagatgacattaaagtaacagtcatctataattaataaacaagatagcagcatgtgcaacctattaccatctcaagacaacagagataacaaaagcaacctttctgaaaatagttgtgctcctacctctcagtacccattcagggtaggaacattgtggtgttgctaggcaatgtgtgaagacagagttcttggaggagtttggggtccaccagtgatctgccaacaacattggcagaatcactaatttggagtacctttgtaaagattatagctatatttaattatgaaaagtggttatttgccatcattcttcaaaaacactgattttttttcactttgaatggcaagctaaatactatattattctcgcattgttctagaaaccctgtagtttacaaatttagtgtgtgtattcagaatcacccaagctgcttgtaaataatgcagcttcctggccccatccccagagattcaggatgtggcccaagactctactgtttaataagctccataagtgactctgaagcaggtggtccatagaccttgaaccaagcgctcacaacaaaaattagctgggtgtggtggatgtgcccctgtgatcctagctactcgggaggctgaggcaggagaatcacttgaacctgggaggcggaggttgcagtgagccgagattgtgccactggactccagcctgggcgaaagagtgagattccatcttaaaacaaataaacaaaaacgaaagaaatctatgtaccatcagaacactacagtaatcattgctgcaggcaggactcgccagtggataccaaaaggtgatggacaaaactttgagaagaaacagaccatttgtatagtctcaaagtatctcctgcaagatatcaattacaggaaggaaaaatggtagctttgttgtggagaatccccgcagacaccactttaatcaggtaatcaaggtcaacctcaataaaaagatctgttgccataaggtagcccctgaaatcaggcaggagaaaggcatattgcttctgtagaattcttcccagtagtgcataaactcttaaccatgagaaaacgccaggtgagcccaaatcacgagtcactctacaaaatatctgaccagtattcttcagaagtgtcaaggtcataacagagaaggaagactgaggaactgttacagatgagaggggactaaggagccatggcaattaatacaacataggatccaagattaagtcctgaaacagaaaacgaacattagtgggaaaactggaaatagctgaattaagtctgtagttcagttactactattgtaacattgttaaatcattacctttgataattgtattataattatctaagatgtggacataaggggaacctaggtgaaggatagatgggaatcttttgcctattttctgtaactttaaaattttttcacaataaaaatgaagagagtatgtttgcttagtattgtgtatacactgcaacagtttagtattcaagaatatataaaatccccacttagccaaccttttcaggatgtgcccgccctgcccaatacacttttatattctagccaaacaaaatcttgtattgttaacccctttggagggaggtgggagtaatacaatttttgtctgtattataaaatattaaaaaaaatttttttttttctcgagatggagtcttgctctgtcgcccaggctggaatgcaatggcgcgatcttggctcactgcaacctccacctcctgggttcaagtgattctcctgcctcagcctcctgagtagctgggattacaggcatgagccaccacgcctggctaatttttttgtatttttagtagagactgggtttcaccatgttggccaggctggtctcgaactcctgaccttgtgatatgcccgcctctgcctcccaaagtgctgggattacaggcatgagccaccgtgcccggcctataaaatattttaagccaatgtaatgactagctgcacgcccacacctcatttttaaaaatatagcaacccagcaaagcccgtgttcccatactttgtggcatcctgctccttttgtgcacttccaccacaccacatgactgctgccactcggagatcatcagtggaacttggtgtttactattcttgttcattacttttcacttttccaatcttggcataaggtgcatcgtactgatcagatctaccacttttttgctctgcatgtttgtctaattcattcctttactttgtagattttcactgtacgaatacccagtagttatccgttctctcattggaaaacagaatgagtgttttttgttgggttggttgtttttttttttttgttgttgttgtttgtttttttttttttgaatgagttctgtccatttgtaaaagtgtcttctgaggccaaaggagatctctactctttctgaactccagtaacacttatctatgacttttaactcggcatttgtgactttccatgataataattgttcttttctcccatgtcagatggaaagcttcttgagcatctgattcccaaagatggatgttattaggacagtaagaatttaattttctttcacagataagtgaatacttaaataatgaattaaacactgtctacacatagatcttgagaatacttgtgtttattcccttggttgttacatgatgttacctcctggggacttttctttgttggaaagatttatgcaatatgggaaactggttgctgaggtggaagtatggagcatacataaagcctaaagctttaatttgagaactatgtgctaagttttcaagcaacacaggtactgggttttgtgtgtgattgcgtgtgtgtgtgtgtgtgattgtgtgtgtgtgttttaacatcctataggaaagttaacaaaattagtaataattttactgcatttggcatggcaaagcagagaggaactgactaatttgtattatggcaaactgttgcttttgtgcacattgttaataaaacaagtaatacttactttttaccatttagaatctatacctagaatggaattaccctaattattttcctccaaaattattttattgagatgttgatgtactctgtgaaaacatttaacagatttcacagctctcttgcctatcttatttgatttcttcaacagctttggcagaaataagcagggctaatattatcatccatactcgatgggttaggaacactggaagggaagctgggggagattaaagacctgctcaaggtcacagaacagaaccagaaaccagatctgtcagcttagtcctgtctctctccagatattacagttccagtgcttaaactaagcaaaagtattaattaagatgttattgcttagccagcattttaatagatagttcagtaacataatacccactcaacagttcattagagtaatttgggagtttctcatctttagtgagagtaactattgttagtgattagtaactgcctttttgctacattctttgttagaagggttcaaaggaaggattacaccaaacattgcaaaagagcctgttgtgactggtgtgtattttaagggaagaaaatcttataagtgaaacagataggaaggtgtgacataaccttaagttaagtatctgagatgacaaatggttttttgatagcttgagacctacagaggagttaaaacctctcggcatatagacaattacagttgatcactcaaattgcaattttataaaatgcagcagcagtacacttagaatattgtcttcatgtcagaaatgcacctttgtgcttgaaaatgataaaaaattacaatcgatccttacaactgttctgttcatctttattgatcaggtgcaagaaagataaatcgtagcccaaataagattatagtaaatgttagcatcgtaggggactataggttgatagaaagccattcatcatctcaaatggtgacctgtctatggctctagccaccctgagtctgctatctaatcacatacctattgattttatctacatccaagaatcctggatgtgactgtcattggacaaccaagattgttaaatgcaaaggggtcactggtgtgaagaggatttcactttcattttttcaccaaccaacaatgatttattaaaaaataaatgattgcaagccatgcatttgaaacctgagtgattagagaatgaaaggtacacaatagactaccgtattgtggtggtgttttgttgttgttgttttttaatgcagtgcattttgcaggatatttcattgagtcttagggctcatggggtcatttaggccatctcctgcaataagaccagtttcagtgtagctagtcagtatggataaattttgctgccccaggaaaggcattactttgccactgcatcttggtttatgttgtttatgtgtccattcctgttcatagtggaaacattttttgttattaaaattatctaaatctgcccccttgttcctactgattagttataaatgttgttgttcttgtggtcacgtggaaatgatagaacaacttaagctccataaagaaaacttttttttttttttgagatggaattttgctcttgttgcccagactggagtgcaatggctccatctccgctcaccgcaacctccacctcccgggttcaagcgattctcctgcctcagcctcctgattagctgggattacaggcatgtgccaccatgcccagctaattttttttttttaaagtagagacgtggtttctccatattggtcaggctggtcttgaactcctgacctcaggtgatccgcccacctcggcctcccaaagtgctgggattataggcatgagccataccatcttgatgacaaaaatattgtgtagaaagaaatgatctttaatatcctagtaggaacaccaatggaataatatataaatacgaatgtgtgtgaatttcagtttttgatctcaggcatcctttgatcttacaagggtagattccaaataatggcaatctaaagaatctttccaaaatgttaggaattttctccaaaggatcaaatgataaggaattgtaactgtgaacgtttactctgtaattataatccgcataccaacaactctactgttatttaaacgagtagctttacatgtgttttataagtatccatgccacctatacaagaaagtcttctactgcttgagtggctgaaacaaggttttatgtgttttttgaagttgtaaatcttccacacattttgtcatcttggatagtgaaacctttgctatcaatctttgtccacagagctcagagttctacagagtcaccactgaacaatatcagaaagctgctgaagaggtggaagcaaagttcaagtaagtttttaatagtattataattatttactattcttaacaagatgaaagcacagttttagtgctttttgcacagatcatagtttgttatatagcactctagaatacttggaagagttttggggtggttgagatgggggccatgttatctgctatactggaattcagatgccaagacaaaggcatttgatgaaagcttgttacaaatccatgtattttatgaactagggggaaattgaaagcaatggtaatagtattatcatttgtaataatatataaaatagaatgctcttgattatgaaggtcatgttaaattgctactgtattaagggaaacatagaaaccattcacttttgtataataaaatgatgggcatgtccaaatttgggtatctgcctttctcgtggttaggctgttttcatttcttcacatgtaccttgaaaggctttaaatcatagactttacctggcccttgattatgaaggtgatgttaaattgctacctctcttaatccttggagtgtttaaatgaatgttctgtaattgatggatcaaagtgtccgtgtcccatagctttgtactttccctttgctgccagttctcacattaggttagaagacatcattcagaatttttctgagtatataaatagtcctattgtgtaacctctattagtagcacatgcgcaaattagtgaagcaaaaaaagttgttgtgacagctttagttgaaagattgcatcgggctctgacctccttccttgcacatgtttacaagcatttgataaaatgattaaaccctaaggtggaattactactttctgctacagtacaatttgtgtgttaatggatattagtgttattgtaatgtggattaaaataaaattttttaaaaattaaaggtagtttgaggtttatttaaagagccaaagcccttcagccttctgtagtgaactatctctttagaggcagcagagagagaccttccaaggatgggccacaagtctcactattagagattaatgtgagatcttaagaatttagacatattaatagaactggttatagattttttaagttactctacatatattattttaagttaggtgtttatttttctccctaatgatataatgacttttttttaggtggtaaacctttttttgtctctatcccatgagaaccttcgagttggctccccgaatatttctttattctaagacaatagctataaaaacagctaaatttcggatacattagagatcaattttgactagagtgatctgtgaagttttcataaagaagatgactttttagttgagcctttaagaagagtattgagtaggtggacgggaaagatattcagaaggaaaactgtgctctgtagttggtgggtgacaaagcagtgtcttgagtcagaaagactggtgcaagataaaactggaaaggtcagtgggtcattagctgctgggctgtgaagtttggtcttcattgagcaatgagtcatgggaagatgtttgaccagatgagcactctgatttctgggctcctgaaggaaaagtaacctggcagtggatgtgaggtttagttggagacatgaaaaataagaacttgaagaatgagataaggtcagctgtggtggttcacacctgtaatcccagcattttgagaggctgaggcaggaggatcgcttgaggcctgaagttcaaaaccagcctggtcaacatagtgagaccctgtatctacaaaagaacaacttaaaaattagccagttgtaggggcatatactggtggtcccagctattggagaggctgaagtggcagactgcttgaacccaggactgcagtgagctatgattgtgccattgcactccagtcacagagtgagattatgtcttaaaagaagaaaaagaaaaaacaatcagatgggaagtctctacaagtgcaagagaaaaaaaaagttgttgaaagtttagacatggcgccaggcgtgatggctcacacctgtaatcccagcactttgggagactgaggcaggcagatcacttgaggccaggagttcaagatcagcctgggcaacgtggcaaaactccatctctactaaaaatacaaaaattagctgggcatggtggtgcatgcctgtaatcccagctactgaggtagctaaggctaaggcaggagaatcgcttgaatccgagaggcaaaggttgcagtgagctgagatcatgccattgcactttagcctgggcaacagagcaagactctgtctaaaaaaaaaaaaatcagacacatgaatttgtgattggttggtgtattagtttgccagtactgcaaagtaccacagaccgggtggcttaaataacagaaaggtattttctcacagttctggaggctagaagtctaaggtcaaggtgacgccagggctggttgcttctaggcctctctccttggcttatagatggccatctgctccctgtgtcttgacacagtctttcctcttgtgtctacatgctaatctgcttttcttacaagaataccagtcatattagactaaaaccctcccttgtgacctcactacaatttaattatctcctcaaagaccctcaccccaaatacagtcacattctgaggtactgagcagtgggcttaggaattttcaggacacacaattcatcccctaacatttagataaagggggcaaaagaaccagaattatgaggttagcagattggaaaatcagtggagagtggatttcatagagaaagataggtctggattttagatgcaaaaatctctgtcctgaatctctgcccagctgccatgtcattcagcctgaactaggtttggagtgcgagaggccacgggaagcacaacgttgacatcatgatggctgacctcctgcaagtcagcagggccctgtaagttaggctttgttttaaacagaacctcaacagcatcattctgtcttacctattaaatattattcaagaataattaataatatggccaaactgtgtagtaagaaattggccttggccaaagagaggtctggattttggaccaagctcctgagaaattctaaatccttcgaatttcctagtgatagaaattgttattctcagccaggcgaggtggctcatgcctgtaatcccagcacttagggaggccgaggcgggtggattgcttgaccccaggattttgagaccagcctgtccaacatggtgaatccctgtctttacaaaaaaaaaaaaatacaaaaattaaccaggtgtggtggcgcatgcctatagtcccagccactggggagggaggctcaggtgggaggatcacctgagcctaggaggcaaaggttgcagtgagctgagatagcaccactgccttccagcctgggcaacagatcaagaccctgtctctaaataaataaataaataaataaataaatgagaggaaaaaaaagaaattgctattcttgctgggccccttggaccatgtggtatcagttcagcctctggggaggtgagtttatcatgtggaccatcagtcaagcagtttaatgaggctccaataaaactctgaacagtgctgctcaggtgagctttcctggttgacaggactccatgggcactgtcacacattgataccaggagggcagcaggtcctaaggacattggaagctttgcatttggaaacccccaggctcagtcctatgcatctcttcctttggctgattttctgtatcattgccctatagtaaaccataactgagtttaacagcttacagtgagttctgagttctttcagtgaattattgaaccattgaattttggctggtttggaccctccctcccccgctctgcaaacttgctgttgatgtgtcagaagtgagagcaatcttggggactgtgcccttggatttttgcgttttgactaactccattgcacacaaaacctaggttttaacacactttgaagaaattctaatagctagttttttagggagtggctttcattatatcgttttttctcccagctacttcctgctaggctgagcttcctagaatgttgtattttgatttgcagtgagttcattagcttcacacctaggaagtgatagtacattgggtataggagatgcttaccatctttgaaggcacagagattacttagtagactgctatttctttttagaaatttggccatctcagataatcaggacttttgtaagacaatatataatatttgcattgcatgacaggggtttttcgcctggtcagattattttcactggctcctatctgtatgaccagcttagcacctgtaagcatcaccttgaggagctctatcttgaacctgaaccggaactcaacagttcctcttaggcaacaagttctgaaggactttgaggagaatttagttaattgtatctgatgaaagtaggattcatttatgtgcatcttggttacaggagatagaagctttttaaagtgcagtgtcaagggcaatattatatacctgatcaggggtcatacaaatcactgtaaagagaaagaaagctaagagcatttgaagctgcccatgactaacaccagcatattaatgtaacctaccaggatagctaatcgaattattttagggatgcttaagatattaactcatacttcagcccctcaatgtatagttttggcagtaaaatactttgagaattaatggattgtttctcctactttatccacacatcattcattcatagagcccctgtgtgacaagccaagcctgaatatacaactaagaaaacaggccaggatcttattactagtgtggaactcagagttcatcagagaaaaacaaaaggaagacaaactttttaaatgatgatctttttaaaaaattcaaagttagttctcctcttttggggtgattacatttccaatgcatatcaagttattaaaaatattacttaccatgatttcagtgggaactaagggattcgaagataatttggactgtttattttcccacaatagatttaaaattttagctctaaaacctaaatcactgagcaaatccagcattcttcttatatgtaaccttaattcaaaaggaataccttttcttttctcaatccaactaaaacagtaattgtcaacacttcatgtcgcattttataacaacttagggtgctagtttctattatatggcgctagtaatgttacagctcatcctaatgcaaattatattttatattaatccttatgctgtacctcataggtaattaattaaacaaagtattattttaataatgttacatgtgtagttcttaacacagacctagcacaaagtaataaatactgcatttgattatcaaaagttatgaaactatgtgctatcggagaaatctctgtatttgtttttaaacaaattctagatgctgctaaacctctagcacattagaaggagttcttacccttatggagctcatactctagccaggatgaccggcacataaagcactcatgatagaatagcatgtaagagaagcctcacagcaatgtagctggagtgctgccggcctcctgtttcttggtcaatgtcagaatcagatctctgtggctacattggagctgatatgccacacctatagaaagaagatgttaccagagtgtttatgcatgtgaattgtttttaaaatagaaaagcaaatatcaagtaaatgtaaagcaaatatcaaagacatgttaaatattttaaaggcaatataggcatggtaaagacaatgtgatagtaaacaaatgaaaagcattttacaggacaattgatacttcattctcattctgtcctttacataatgaagtggcgagtttctattttccataaaagaaagaaaaaatatgcatggaaagtgacatagatctattgaaaatatttttggaatgatttcattagaggtacaactttttaacatggcttcagtttctgtgaaagaagaagcacttctaaagaagtacaagtctatgaacttggaagtgaataccagtaatactcctttgtgtgccagattttagaggggttttcgcttttatccctgaatgaagttgttgaaacctgacttataaatttaggctcatagaagaagcttaggttatccttataaagtattaaaagattagttaccctgtaaaagtagtttaggtgattttagagtatctgaggaatactatgcagaactcatacagataaaatggattttgtaaatattaccatctttaaaggttttcttcaatgtaaaaccctttgactttaaaatgtccttgatttttttttcttttttaggggttgcactttcactggcaatattgtttagtttcttttttggatgtaatattttaatagctatattacggatgaattggtgaagccgaggaagacacgccaatagtatcagcaggtgtttctcatgttctgtataattacacatgtgtatcatggacagttttaagcaatggtgtttaaagatcctgcttaattggctgtaaaataattaaatacggttttgactggcaaatttataattctgctagatgcataagccagtgagcctgaatgtcaatgcaacctcattttggaaatattagattaatagaactaattgtactaaaagtacaaagtttactctgattaatagtcttaaaattcttctagaagtttaatcaggtaaatttatgttacttatctttcttcttaaacttttaattaaaacttatttcaaaagtttgagctattaagttctgtgcttctctttctagtttctctgaagttgagttcttgcaatttgtcagtgactccagctcccttattgagtaacatgccttatcaaaagtattaaaattatatgctgtttcacgtgtatttgtatctgcagctgacaggtatcctgaacatcttctctaacacgtattgatgtctacttataacctactttagtgctgtgtgaatggatctaatataccaaatgtacatgataaatgttttatctctgattctcattgatcagttttgaaatgatcaaatggtgtatctcagtaagacactaattcacattgatcaaattctaaatgatcaagttgacttggtttctgctgaacacaaattgtattaaaacaacattacttgaacatgctgccttctctaatgcaggagttatgttaccagcagttacattataactagagttattgtattataaagatgtctccttcataatgaaaagtttacacaagaagaaaagaatgcgatattacaggaagaacagggcttcaggcaaggatttgggcttttactaactaattaaattctgcatttgtattgggccttttttcccccttttttaatttgaagggctgtgagcaagaaatatagcagctgcagtggtgacattttattccccacggtccttggagccaagtaacatcttgattattcagtaagagacttagtaattgaagaggcaaaattctagataaagtaaatatacctgtaccctttgtgcacaagcctcttggttacaattacgtctttagaagtttcgagttatttgttggtttttgtttttaaaacatcagctcacctatgtcaacttccatagtatatcatgtcccctctggaatttgcaaatgtgctgctggaggaggatttcatttctgaaattgaagaaagatgttaatgtacttatgaatatactttgtatatgaagctaatggcaaatacacatttggctgtcacatggactcggttatttagaacacaaaattcctcaggcaggttatttattatgtctttgacttgtgtcttccatctataaaatgtaaattataactgtcaccttctgtagggcatataagctgagaaagtttaaaagttaactgagaaagttgtctttgatccttatctaaaaaatggtcgtaagttgttttattcaactgcaagatagtggctcccattttaggaaagttgtagatgatgcagctccttccgtatctcatcggggatatgtaaggtagtgccagctcccaagctgtcaatctgcctggtttgtttgtctgtccacctcccaccaagcaacaaattagtccaaggaaagtgagactggctttggagcatgccaatatttaacagtatttcttacgatacccatttagaattggttatatttacaaagaaagcttcggtattaatgctttttccccccttctaaaattggagcccttcaaatcagatctgcctggttagttatttactttctttttagttccttgggtgagatctctatacttggtctaaatactattttctaagataatagaagtaaatgtcaagaaacattaacaagagagatttccatctgcattatctctctactccatgactggtcgccacagtattccactcaactcagtggtatcctgcagaaaagggcagggcagatggcaaagctgattgggaatatagggataaaaagggcaggagcaggagtgtacaccaaggacaagagagtattgttaatttctctaaaaagacaatgcaaaatgcagccatctcatgaacatggtcacaagaccaaaagggtcactttggaaacttttttccatcacttcagcatagggtgtaaaggaatctcagctggtgaaataagctgctgatggtgcagccagattggccacgtccttcgtaagtccatgacctggagcattcttctctgttcttgctgtggcagttggggtttgttggtgttgcaccaagcatcttctttcctttcgtataagtggtttatgtgtaaacatgtaaatgatcaaaccattcttgtggcagctcttaggtttgtggccatacactcctggattcatgattcgttctgtgtgagctaacaaatcattctgtcttccccagcaggaacatcagtattgaactttcttcttaatcaatacgatccattaagaatctagtataccctacatggttatatgaaatattaattgcacactgttagttagataaatgaagattctgccaaaatgatagcttatttccttccttgtatcataatattttaaatgagatcattctgagttctagggtacatgatattttggaatttgtttattgatccttgcttacttgagtaattaactacacagctcacagttggaaaagacatttctaactgagactactaggtttgtcctcttgccaattccaactagaattcatttacttgttaagggcttcagttaaaaatcatgctttcaaagataagaaaacatattttgcgttttgagtgcaactaagctacagtgaaacttgtaggaagccaagttaagagttaattgtctgactgacctgccctgttataagatatccagaaagacttctagaaggtagaatttaaattctgtccttatgtcagatatgcaaagttaacaatcttaggacttgagcacagttaaagattttatcaaagaagttatctacacataaaaatggtagctcagggtagtttctggaacattatataggttcagccatagtataacatcaaattaattatgtcttatcactccagagtttggtaagcctatcccagatgctatcagcccttccctggtttcagtcagataattaacttatgaatgtatttagctgcccattcactctgcctggggtaaaaccacatactaaaattgaaaccagaactttcaggatacattgtatttaaacttgtattcttgttgctcatttgaatgtataattaccaagtcacccctcatggtttcagtcttgtcaagtattcttatttctggctcttctgatttttcttaagagataagcaaacaaaatacaaaaattgttagattggaccttataaaattttaaaattctgcccatcttaagacatcattaggaaaatttttttcatgggcaaaagacttggacacttcaaaggaagatgtaagaatggccaaatagcacatgaaaggagtttctacatcattagataccagggaactgtacatttaaaacataggaatggcaaaaatcaagaagactgacaatactaattgtctggaaagattgtggagaaaccagaactcactttgctggtgggggtatacaatggcaaaagtcctttgaaaaaaaatgttggcagttccttataaatgtaaagcatacacttgctgtatgatgcaacaagtctagtcctaggtatttacccaagagaaatgaaaatatacatctacaaaaagacttgtacacctatgttcatagcaggtttattcatagtatcaaaaactagcaacaatccgaatggtcatcattgagggaatggagaaacaaaacagacagtattccactcaactcagtggtatcctgcagaaaggggcaggagagatggcaaagctgattggaatatagggataaaaagcgcagttttctactttatattcatacagtagaacactattcagcaatagagaagagcaaactatcgatacatgtaacagcacggatggatctcaaacatcatggtacacacaaagaagccagatgcaaaacagtacttcctatgtggttcatttaaacgatgttcaaaaataggcaacatttgcctgtggtgggaatagaggagatttgattggaaagggacccaagcagcatttctgagattttgggaatattctgttgtattctgagtgatagttttacaagtatatacaggtatgtaacttctaatacaatatgaacactgaagattggtgcattgtgatatacaggctgagcagccctaatctgaaaaccccaaatcctccaagattggaaactttttgcatgccaacatgatgccacaagttgaaaattccacacctgacctcatgtgacaggtcacagtcaaaggcaggtccacaacatgtagtctgttgactgtgcctcaggaagaaaatgaccttcaggctatgtatagtatatatgaaacataaatggattccatattttggttggggtcccatccccaagatatgtctttatgcatatgcaaatattccaaattccagaacccaaattcaaaaacacttccattcccaagcatttcaaataaaggatactcaacctgtgtgttaattatacctaaaacaccctaaattaagaaaaaatataccccaaatattgggaattcccagtttctatctgtaatttgtcctagataaaatgcttcttcaatttaatcacagtcttaaatgtaggattcctaatcctatccataatcatatttttttcattagaatttgaatcccttatctcagagtcagggctgttcattcagagtattttattactgtagaaatagagagggataaatcttgcttgtatttcatttatttattttcttaaagaatcagtcttttttccccccattaagttacatttgcctgttgtactctcctcctcttcaacctaggaccttgtaggtaggcttggataaggtttgaaaattacttttgataaagggatttcaaaggcagtatttgtgaatgaaacatttgtacagtagcactggtacttttcaatataataatcatatgcagtaatttgttcatactatttattgagtcctggcagaatgcttgaaaacttgtaaaagcttgcgtcttggcccttccttacatgttgaaatgaaagcacacatgttcatatgttagtgtcgccaagcatccccaacttgctcacatgcctgccttaaattatttcatgtgctttcccattcagtggccaatagttaaattgctgtgttccttttgtgagtgtgtatgtctaaatgctggtaatcaaccgagtccctggaaaactgataaatgtgctcattaaggagagttcttgctcttggctctgtttcacaagtcacctcagctagtgtttctggatgaagctggcaagaaacactgtgcagtgatacatctggctttatactccttttcaaggactaaaacctccttttttagtatgttaaacatgcattgtagggatattgcaattacaaagaagtaagctatttgccaattacattatttacacaagaaaaaccaagggctgctgctgtgtggtgagatttttaattttttatgcactgccatttgctcctcctcttgttctcttgagcatctgagattacacaagtgcctattcatttgtgaggcagagccatctatgcagactctgaagtccaccggctagccactggcatagatctcaacaaagctgactatgtgagagatgcattcagcatggtttatgattggaatgtcgaaggtagcatacacctgttcctgctttcaggatgaaaaatgaattgccaattatagtagacatgttcagacagacgcttcatatggtagaagcttgcttggcctgctttatgctgggcctccaactatgaagccatcagttctgaaaaaggggtgtgttggcaaggaggagaagagagaagggtatcgatccttgatctgttaccatgttttgtgcttgtgcaagctgtgggcaggaggtcaatgcctcacacctttgtttcccaagcagagctcttgaacaagatgaagtgatcaaagctgggtgctagtgcattatcacagtctcattactttgcaagctgcatgcccagatgctgctgttttctgcatcaggcttcgctgatttacattcgtaacacctccattacagctcatttgatactgctcataatcaaccagttcttgtcttttcctgatagtgtttctccaatacaaaagacgctagtgtaatgaagaaaattagcattgctggtatagaattcatctttaagacatcctggttaattgacaagaagtgggaaccaaatgctttgtcatgacttaagtcatttgtggttttggtttggttagttgggtgttggtttggggctgtttttgaagtctttgaacttgagttgttggatattgccagcagacctattttgactctttctgtcttgggagttcttttctgttagtgaattccgacaccctgtccttatttgtttggtttcttcccctagtgagctcaatggcatatatctatttttttaaagatattaatgcaacaattttgctttgaagaacttaccatcctcagtattaacacatacattcatcaagggtctctttgatgttccatgttctatgggccctgaaaatacagacatatcagtttgagtccctgccctcagagggcttatactcattgggatcattagctcgactgcagaagcatcaaaacttgatgcaggaattattactaaaagatttgttcgtgaaaaattttgagtatcttatacattccatatggttgttataagttgggaatataaaaagtgaccaaaacatgttaaatgctaacatgaaggtacaaaccataaaatgcagtaggactaggaggttcggaatcccaggggaatctggattgcatgaagaggtgactggcataagctggatcttctcatcttgagattttcttaaggtaagaagagggagaatggccttgctatgaagagggcattgaatagtgaaaatggctgaaacagtgtgggagaggtctagtggaatatgagaccacaaagcaagactggagtcagacttgaagaacttgaaatgccgtattttaaaaggcagagttaatagggcataaagattcaaccaagtgttctacctacttggtggccgagcgtggtggctcatgcctgtaatcccagcactttgggaggccgaggcaggcagatcacaaggtcaggaaatcgagaccatcctggctaacatggtgaaaccctgtctttactaaacagaaaattagcctggcgtggtggcgggcacctgttgtcccagctactggggaggctgaggcaggagaatggcgtgaacccaggaggcgtagcttgcagtgagccgagatcatgccactgcactccagcctgagcgacagagcgagactccgtctcaaaaaaaaaaaaaaaaaaaaaaaagagttctactacttgggaatatttttttctttcacctatccctggtccccataattgtcaccactaggattatgccttttgagttggtcattgtttctggaagtcttctatcaaataatacaatataatattgggtgcatagatgttgtatacgtttattatatgataattagagtttactgcaccaaattaatgactatcactcttaatatactaatgtccactcaaaaataaccacatattagcttgccatattgattgagagcaaagttcagggacttgaaaggacggaacatagtaaagattagttctgattaaaaaggtggggaggagagagttgaggaaagattgggttcataggatgttgcctggggaagtcctagggcattaggcagaaaaagagcctcatcttttcataccaattgaaatggtatatgattagttttcattactcctagctatgatatctttgaatggtgtcctaagaattcacaaggtaccaggttctttgtgtcattgcaatgaatgtgtgagagacaaacgtatgtggtttattcagatgtgttttatctggatgtctaatttttaatttatgtctataattctgattgaatgtgcccaaaatagataaaattagctcacttactaggcaaattttctattgctagtccacttgattattaaatgagccttttaaagtattctctctccttcccattgaattttatgaacaacttttctcttttgatatccttcctggagacttactgtagcgaaaaggatatgaaattgataaataatacaggtggccccccttatctgcaattttgctttttgcagagtacaataagatactgaaagactacattcacataacttttattctagtatattgttatattttattattcttgttgttagtctgttactgtgcctaagttataaattaaactttatcatagaggtatgtgtaggaaaaaacatagtttatctaaagttaagtactattcatggtttcaggcatccactagatatcttagaatgtatcccccatggataaaggggaactaatgtattagatttttttctcttttaatttatcaaggaagtattttttttcttgtaacaagggaaatgtaattttactcctcttttcttttccagatcaaccttttaaaagtaaagcatgtgaagttgcagtttgatatttagcctttcacatttatctctatgagtagatatgttaataaacatagattttgttttgttttcacagagtgtaagactataccatacgtattttaacttatatttattatggatacatccccctgggtcaacacataaattcaacgccttcttttaaatccaactcattcttctaaatagctgcatcatgcctcataggattggtctgtagtcctctactgaaagtttctttcaagtgattggttttggttttttgttttgttttgttttgttttgttttgtttttggtggggggcgcggtgggggcggatagtgcagaagaaggctgcagcgaaacaaactcatacctaaaccctaaggaactggtacttttatttccgtaacatggatggggtttgaattgtgactgttccttccaactgtgtagcattaagctacttaactcttgatcttctttttgctgatataggacatgtacatataatacctcatgggttgttaataagggttaatgaaatgtgggtaaaattctgggcatatagtaggtactcaactctatacaggtcagtttcttttagggatctagtagttaagagtcagggcccaggttatttaaccttagaagttgtatcacaatatgaatcaaaaattggcctcccaagacttttttttttaaattaaaaaaaaggaaatcatgttttgtgaaaattataggcttttttgacttgtataatttaaaaatactgcattttggcacaacctttgcagcttttgctgctagtttgtaattccctagaggtgaattgaaaacattagtggcagaactttttccattaactctgagaaaaactacagagcaaaaaattgtcctttggcagaaatgtcaatccatacctcttttgaacatttggaaagtgaagcgctgagaagctgatataataggagaattgaaaaccaaaatgtatacacatcttcaccttttctaacagacgacaagacaaatgaaaaatacatcctcagaacttgatgatgcaaagaaaataggattgttgctccagaaagtgcattaggctgggatctttaaaagaggccgaggcgggtggatcatgaggtcaggagatcgagaccatcctggctaacaaggtgaaaccccgtctctactaaaaatacaaaaaattagccgggcgcggtggcgggcgcctgtagtcccagctactggggaggctgaggcaggagaatggcgtgaacccgggaagcggagcttgcagtgagccgagattgcgccactgcagtccgcagtccggcctggacgacagagcgagactccgtctcaaaaaaaaaaaaaaaagatttgagtgctaagcttttggccacgttcttcagaagggctgatccattcttattaatgatacatctatttgtacttcatgtcataaaattctacctttatatgctacagtatctaggaagtagacgtaagaaagagcaaatgtttaatatactacaggttttgctgtagcatctaccagaaaatatgcttattttctctcgtctgtggttcctggtcttcctgatttctttttaagtttattaggacttctcttcatttttccacgccataatgtcaatataggtacaatgaaataataagtatccacatgttaaaatgtttactgaatataatgtttatagatattcttcacatcattcagtagacctattctagcaagttacttctcattttccaccccacccaaaccccacagtcttagattttatatctgtgaaatggtaataacagagctgttatattggaattaaatgaggtccatttatgtttttagcatatcctaagcagtgaatagtgagctattaataattactgtagtcacaatagttgaattttctgttgggtgaattttgtgtttttttaattgatgctcatcatatgatctaatatatatttccctagaggataattcttgaacgcaataaaattacaattgagtataccaggcctcttaaaagcatgtgtttaaaggtaaatgctttctgtcaaattattaaccaacagttagcagcactactcaaaataataattctgttttaatatgctacatgagaactacataatgtggttagacatacatacgcaatggtatgctcagacaaaatgcagccattgttagttcatgatatagttctcacctaaaaccttgtcatagttttagaatatttttcttcacttgagattctagacaacgataggttggtagtgtatactgaacaaacaagattcttcctaacgtgttctgtagtcacttgctcagcatttgggccatatatatatttttttttccagaagtaaaaaggacagtgtggctaagtgtctagattagtccccaaaagcccgtttaacccctgcagttcagaaaagaagactagatgttaggggcaataaaaaaaaaaaaaaaaaaaaaaaacactagcacattttcccatgtttgtgcatacatgtgtgtttaaactacattctggatttaaaagcctgggctaactcaatcacaggtgcagccttgtttctatgaaaggagataaattcctatagagagtgagaaagggatgcggaagccatagcaaagagaagcctccctcccttccagtccctcctgttgttttcaaacattttttgttagcagttagcggaatcctaatacccacaactgataatatgctatcttaatactattactctagtttataagcttacttacaacctttgctcattatgaagagaacaatgaagcttatttttatgaatacaacatttaaaaattaggggccaaggatgatggctgcagtcctatatcagtcccaacagccaaagttatgtgtttggttgagtgttacgatgatcctgatttgtggtgataagtagtggcaaataataacttttttttttaacagcttgccttgcaaccacaagatgctcatccatcaatctgatccaaatgattaaaagcgaaataagtttctgcttcaaagttaaataatcgacattatctaataaatcataatatagaagttgggacaaacagccaaaactttaaatattaaaccacattatgaaaataaccttggatacctcctgggctgatcttttgccatcttttctcatgcacttcagtgttcattcactaaagggagggaaggccttccgcactcacgctttggcccggctcacgctgcccccgcagcacagccacagcacacctcaccttcaccaccttcctcccgataaactcagccttttgttaggacctgtctcatgtgttaattcctctgctttctctgtaaagtctttctagacacctcccttcctactaaaaagccataattaattaattgttccctgtgtgtttatgtcactccagcccttatgacaatgtaagtggcatcagtgttgcctgtgccccatctcccttctcaagtgtgaaccgtttaaggtacaagctgtatctgagccagcttgatgggagcatgcctctctctaacaggtgctcaattagtatcaatatttccatctactaaattgaactcttataaaatgtccatgcttcttaacttagactcctgcagttcagaatggaagactagaggttaggggcaacaaaaaaagcaaaaagaaaaaaaaaagtgcgttttctcgtgtgtgtgcatttaaactacattctggatttaaaagcctgggctaactcactcacaggtgcaaataagagtgtttttactctgaaagggatctaatatagctctgaatttacactagaggaaactgttgtctaaaaactaagaattatagacttgggagtttgaagggcccattgccaaggttatagtctagttaacagcatgtgaatctcattcttagttgaactgaaaccttcttgagggcaggaattgtattttatcctctttatcgatctgcccaagcacctggcatatatactgtgcttggataatacatatttaaataaatgcattcagcaaattaggtgcctgtggctatgttgacatctctgtgtctggcctaatggtttgatttatctggctgttaatggtcttcattacaggctgttaatacagggctgatttttgttggacattagctaattgccagagttcatctctagtacatgccagatagaagctgggcttttctcttgacggtatcaataggataattaagactatagcaaaattcaaaacatgatggagtatttattacattaagacttgtcattaattgggaattccttcagttcagatttctatatagtgtgaatttttgtcaagggaaagttattgatattaaaaatttgttgacttttgctatttttaaggactgttttttttgcttctgttcatgtagacagatttatatattttctagtttgaaatttcaacttgaaaacacagcatcttcaagtcaggtaactgtctatcaagaacaccaattaaatacttcataacaagttttcttcttataaaagcctacccacccactttcccccatgaggtttctattgtctgttataccagtctatattaattataggcattttctgagcaaagcactgatgaaactaagacatagaggagaaaattcctgtgtactttaaggataagagaaccattcctttttctggctcaattaaaactggactgattgtcaagtcccattaacctagtgggtcactaccttgcttgcattagtggcagccccaccgtaatgtggagcagtcttgccacgtcgtggacacatttatgaagattgataacagctaaggttcagtgttaacttttattgtcaggcaggctgtacaagaaactgtctggtattggcttttgctttgatttatgaaaaggttgccacatgaagaagatatcacataaaacagcactgctggcagcagcgttattcggtgcaattgtaaccatagcaaataataactaatggtaattaggttcagcatcatctcttgctactttccatagtttggctggggtgggccctcatagcaatataatacactcccaaaggaatgggtgactcacttgcttttgcttgggttagcacatatttctccaaagctttccttttttctttctttctttcttttatttttatttttattttttttttgagacagggtctcactctgtcactcaggctggaatacagtggcatgatcatagctcactgcagccttgacctcctgggtcaagtggacctcctgggtcaagtgatcctcctgggtcaagtgatcctcctgtctcagcctcctgagtagctgggactacaggtgcagtagctagcagtgtgatgctggttctttaagagagaaccattaagaaattgatttcatgttcagttatcccaaggtgtcagtgatcgagtaattacctgttggctttgcctcaggggagacatgtgtgcacagtctcccccatgaaccccagaggtggcaggagtctgaaattctgactcctgaatatctgcaatagctccaagtagtggcaggtggctcttctggaaagtggcacctagagcttctttctcaattggaccttttgtccctaaggagaatagtcatcactttgcctcattttttttttaatctcaatgcactttgatataatagagtatcttttatgctataaaaactttccttccctttgaaatctttggtctcactagtcccagttgcatcttaatattcaaggaaggcagctgtgttttcctttaagcaaatgtaattgttgggggaaggcatctcagtttatcccatggacaaatacattatgggtaatgccaaaaaaaaaaaaagaaagaaagcttgggaccccaggaaaattacatgaatcttttcaactcttcataaagcagatgagtgctgcccttttctttagagctggcagctgtggaggttacagaccagcacgtgtacagagaaatcgccatctttcttttagttcccaggtaaagacagagaagacagggatgccctttgtgtctcttgtctgtttttcaggcagccacatttgtcatagttgaacctacttccattttgatattccagggttttttttcaggcttttgtatgccatttattgaattctggcaagatttggccgttctcggatcttctttatctagggaaatcctttgtgcaaatgtgggaggcaatcctctcaagcaatagaatgaaaaaataccagcagaagcatgcattagttatcactggtagcagaatatggccctggcccaagcaggttgcatctaatagcctcttcttgcctggaagtcttctggttcctggaatggcttggagtgatcaggcaagccgctgccataaaggaggaggcacagcagcagctggggagaatcacatttggcccacaatggcagtaagatggtgcctgggaagccctgctctcggatttggggggagctaaattatgaaggttggatgtgagatggtgtcattaaggactttctggagagatcgtgcaattaactatgaagccaaatgagccagtgggttaatatatggggaaggtactcctaaaatgctcataaaggcaatctagtgactgtcataaaactttcttttaaacagatactttttgaaagggtaaatgctaaatctgaacctcaaatcagctttaaaaacagacatagctaagatcaaggctcaaacattaatagaggccaactcttttactccagaaagtgaagaaagagactgctaagcccagatgattttttttcctggctttgcttcccttttagaggatgtggattgagccagaaaggggcattatctgatctctattattttcagaaactgtggattttgtatggcaaggtgcttattggaagagagccaggcttctcatgaatttcaacttgacaaaatgcccagtctgaactacatgaccataagaaagtgccgaaccaagaaagtccaacccaatgctaaagatagaacactagggaaaagtctagtgcaaggaaaggcaaataaattttgtttcaggcaccaactccaattgatcgtggtggctccctgcagtatttcattgaaaaggattcggaggctatgacagactcagcctgaaagaatgtcaagattgattagtgatgtctgtcactggcttaagcattgaatgagtaggcatttttcctttgtatttgctactcctgctttagaagcatatataaaaatttgttcaccccttgactgacggtgcgtaaaccagaaataggaaggatctggttggggaaggggagagaaaggaggaagagagagaaggaaaaaagaaggacgaaagcctaaaggactgtataatgcaattttcatatcttttctctgttctcttttcactttttttcctaccagcaggtttggtgaaatgaaatatcacaaaacaggactctttattttgttacctcttgtcccagtatggctcctagtaggagaactcgttacttctccctcatttcaggcaacctgagcaccagtgaaactgtgactggcatttgcagggacctaaaaggtaatcagagtaagaacaactggtaaaatgtcctttatgtgcagtcattcctgccatttcctttgtaattaataagagaatatattaacattccattttgcttagcatttgtaatatatgcaaacatattaacctttggtacatttttgaaatagtctcctgggcaaaggccttagtttataagcagggaaataagacttcagtcagatggcctcactcctaaatactggaagaaggaaatgctccatctgttaaacagttctttcagtctaaatgttggcacttataaccaatattggagatctaaaagtggctggatttgatggtgtctgataaaaattaatattataattgatttgccatcacgttgaaatgccttgataaaatgctctcattgctttatttcattatacagtatgtggttgtgataaaaattatctcattatgctattcaatttagataacaaaaccagttattcagaccttaaacgaaagttatcatcctgagcagtacttaagtctttctctttcagggtcttcagtcctagctcatattggagttgctggccataatcctcctatttgacagttgacattgattaaattaggccaacaagtctaaaatttcagtttcatggtctgctgtatagccacagccattacatacctctagtaccatgatatgatatatgatatgacatatgatctgatttgacaaaactccagattttacaggcttttcacataataatttagtaatgtgtaattaacttctgaatggtaatcaatccacacatactgtgattttatgatgtgtaaggcttcagtttctcactcatccttcacaaaggccagtcactcaggcacagggaagacctttaattttatctgggttttctttgcattcagccatggtgcatttatagaaaggagaatcctcctagtccatcttcttccccattcctgcttatgagttggctacaaggccattacaggcagtgctgtcattacctgtcaatttaagaccatttgaaaatgaaatcatcattagcactttcacatttctccctattatttctaaatgtcctttggtggttaaagcttttgggagtatggggtaggggaagggacagacctcacaacatgaataaactgaaatgttacccaacattttagtaacaccggcatgtctaggcctcctccagaagactgctagcgtggcttcacaaaataacatgtatgaccttaaagatacagaaaactcacaaaaagaggctgaaaaccagtttctggcctgtttgaatactggtttaacagtaatagaactttaactgtgtgggtttattattcttgaaacgtccaacttgtcttaggcgagattttgctactattaaggcaaattaaagccgtttgccatcaattctgttgagttcccctcactgcttagtcacaagtagcagccctgccaccagcagtgggtaaatctatgccaagtgtaattacttcaaatacaattccatttattcatagggtggactgttgctccccgtgagcacgtacttggggaaagaaaagatatgtaggtttatgttcattatgtaccccatgctggaggcgtgatttttaacatgagtacagctttttaatcccttcatcaaaaacacatgcagcagccctcctctttctccaccacctgaacactttgtgggtaccttcaagcttcatgagcagttaccaactctcagatgtatcgtattctaaaacttggtttttaagttggctgtttgaaaatagcagctcatttttctttggaaagaagatgataacaaatgggtaggttcccagaataacctgcagaaatatattaacaataaatgtgtattaataataacaacagctaccatttattacaggcttactcagtgccagacactgtgtggagagcttaaacgttatcttactaatcttcacaacaatgttaaacagtaggaaatgaggaaaaatttgcatcttagagagatcaagaaacttgcccaagcttccactgcaagtaagaagtagacccccgttttggatatgcatattttagatgctagatcctgtgtttttaaccatcacagtaaatggctaaaacataagtattgactgtattctagaacttaagtatttattgggaaattggttctcgattccagttgggatgttaagaacatgtgtagtttggccactcttcttcacaggtctgccttgttcccccacatatacactggctaatacggtgctgatgagaagtggagaagctaccccagtggcttctcagggggaaaggtttgagcagctgatggtgtttggcagatgtgacaagcactgggaatactgcccttttggagcttctggtctaatgggagaaataactgatcatccaaataacttgacaatggcaattgtgaaaagtgctgtcaaatgctatgagagcatgtcccatgggaatcgactgtgaggcattggagacaacctcttaaagctgatataaaggctaaaatagtaggcattaggggaagggcagcagggccaatgcatgttaagacgctgaggaaggagctgagctcctttggggttctgaagggaaatctattgtgagaaagtgtcgtagagagagatggaggcaggggttacatcttgtaggacctagtaggtcataatcactattttggatgtatcccaagagaggtaggaaatcttgaagagttagggttgtaacctagaagttgtgagaccagatttgtggtttaaaaggggcactctggttgttgttgttttgataatgaattgtggtagagatgagggtaagagaccaaaaatggaaacagagggactacatgggaggctgttgaaatagtccaggcaagtggttatggtggttcagactaggataatggcaatggaaatacaaagtggtccattccaggccaggcgcggtggctcatgcctgtaattccagcattttgggaggccgagatgggtagatcacttgaggtcaagagtttgagaccaacctggccaacatggtgaaaccccatctctactgaaaatacaaaaatagctgggcttggtggtggacacctgtaatcccagctactggagaggctgaggcaggagaatcagcttgaactcaggaggcagaggttgcagtgaggtgagattgcaccactgcattccagcctgggctacagcaagactccatctcaaaaaaaaaaaaaaaaaaaaaaaagaaaagaaaagaaaaaaaggaagtggtcaattctagatctattagaatttagactagactacgtgacagaatggatattgggaatgaaagggggaaagggggaggtatcaaggacaactccctgatcttgaagggtctatttactgagatggggaagaaaaaaaataaattggaggtagaggagggaattagttcagttttaaacatgtggtacctgtaatgccttccacgtaaatagcaatagtcagtcacctataagagggctgggctagagatacaaattagatagcgaccaacacacagatggtatttaaagccatgagaatggctgaggtgtctgtggagagaggggagagagaagagcaaagagacctccaggaccatcactccaaggaactccaacattgagggatcagttagaagacaatgagccagagagccgggaggaaaaacaggagagtgtagtattatggaagccaagaaactcttttcaagaaaggggcaatttactggaacaagtctgtgctgatcgggtcctataagatgtctactaaaaatcattggatttgaccacttagaggcctctgattttagcaagagcagttctatccaacagttgaatgaaagccactttggcatggatagaaaagaatggatggaaggtaaggaagtggaggcagaaattgaaagggtatttgctagagctgtgcttccaacaacatggtagccactagccacttatgactgtttaaatgtattaaaatttagtaaaatttaacatgcatttcctttgtttgcactagtcatatttcaggtgcttacttgccaccggtggtgtgaccaccatgttgggacagcgtagatttagtacatttccatcactgaagaaagcactgttggatagcactgttctagagaatgccagaatgtggtgagaaccatctcaggagagaaaatcccactagcaggcaagggtgggggaaggtaagaattggatccatgcatagggattgcctttctttggatgagagagacactcttcctccaaagtatcaatagaaaagaagatgggtgcagatccagatcttatgttgggaagatgagggagttatcttttggtttattttttttttctcaatgaaacaacaggccagcacattagccaagggtggaaagggaaaagaaccaggcgagatttttgaggaggctgcagatggcatgaataatcctagtaatagggggagagtgagtttaccaaagaagtgccataacattgtggcaggatttagtgcctgtgaatttatagtgattctagtttccctagttttgtgatttttctccagacatactcaactggagagtagtattaaggggctgtcataaggcagccattcttaggttgggttgtgtgtaatggcatatattaatactgctgaattggaacccttagggagatgtaaaactaatggagctcagcatggtgaatccaatccagacatgaattgagaaatgcattatttggtcctacagtaatatatcattatccctttacgtagaaatcattgagattccacctctgaaatactcgtgtatgagactcatcataatcatttggagaatctgtgtggtagattgttgttttctatacttcgtagttggtcttgttcattttagtctcagcagcagactagaatgttaagccaatttgctaaatcttgcctgtcctctgtaaaatgcttaaatccgtttatataatacaaagggatatgttggaatttaatgccttcttatggcatcagtactgaatatttaatcagaacaaaaagagaaacatgttagaattttcaaattacagagttaccgtgtggatgcttcacagaggtacgtgcagttcagtgtgcttatacacccgtatgaacttctcacatttattagctataaaatacttcgaaggtgtattttcttctagtttttatatttaatttatggaatattaagtaggaaaatattagcaactacttggatgcatgctgcacttattttctaagaattagtaaataatgttatcatgtgtgattagttgtgtttaatgctagagatgagatattacgaattagcaactcaccttctaagttcttttccttaccagttaccttaaacatatccatttcccaaatagagaccattttctcatttccagggactttcaggagattaaaaggttaacatttacaatgctctgatttcaagactgcaaggcactatgtacaaaattcgtatgttgtttgagcactttttttaaagcctctatgttcaaaccttttgaaatgaatttagttcctatggaaacttatcgctgctgtagatagtgcccttatccaagagaagaaaataaaatcaattcagagaatgattttataattgtataacatagcttgggaatggacattaggaatatgtgcagttgcgctcttcggctgttatactggttcatattagattgtgtttgaaaacaaccttgcaaatgtcaccatctgtccttcactttgaggccagaataggtaatagtggtttaacagaaatttcagtgggtactctttcttgcaacatcacaagtaataccttgtgaggaggcaggggatatgataaatattttggaagtaaaattagctttggtaggtggaggagagggagaaggaagaatgctgttgactcctgggaaagattggcattttgcaggctattcattcactagaattcgtgtagatgaacacaaaaaggaggcagctgaggcagatagactatttgaaagttaagtaatagtagtgtatgcttgaagtgataacttagcctatggtaaggatatgggaaactgaggaatgttaaaagtgaaaggtattttaaaacaggaactaacaatctcagtgacttcttgaaaataaagaattagccggtgctgtggcttatgccatatcctagtactttgggaggccaagaagggcagatcacttgagcccagaagtttgagaccagcctgggcaacatggtgaaaccccatctcagcaaaaaaaaaaaaaaaatcacaaaaattagccaagtgtggtggtacacgcctgtagtcccagctactcaggaggctgaggtgggaggatcacctgagcccaggaggtcaaagctacagtgaactgtgatcacagcactgcactccagcctgggtgatagagcgagatcctgtctcaagaaaaataataatttaaaaaaaggttttttgttcttgcgatagtttactgagaatgatgatttccagtttcgtggggggaggggggagggatagcattgggagatatacctaatgctagatgacgagttagtgggtgcagcgtaccagcatggcacatgtatacatatgtaactaacctgcacaatgtgcacatgtaccctaaaacttaaagtataataaaaaaaaaaaggaaaataaataacaacaaaagaaccaaaaattgatgtatgatgatgagctaacaatattgctgttgatgaaaagtaggaggaaaatcttgtttggataagaaaacaaataataaattgaccataaccagttgatacttagagtcttagaaggaatctaaaaggatcgtcagatgtagtccctggcttcagatggctaagattactgattgtatattttatagaagaactgaagactaaagaaacctaagatcacacagctactgactggtgaagagactcgaaatccatttcagtcacaaacagagtcgtaggagtacctctaaagaaagaaaatactttcacaaggaactgtagaagaggagtagggacatagatctgagctttgggaattacttataaataaaagtggaaagcaggtggggagagagcaattaaaaagacagagaaggggccaacttacaatttcatgaatagagaaagcttccaggctttccaaatgctcgtgttacacctcacacccaatggcttgccccatgacttcaataatgtgttggtttctctgtgtcttttctcacaaggttactgagatactaaatcagaagggtttgtgccaaacttgtgctgaaggctgataatgtagggggcattatgaattgtttcccagcttacattttggtctttgtgtagagtttgcatgtgggatttcatatctgtcgtctttaagttttcaatcagttttctatttagtgccacaaaacgtgtggaaatggcatcaccattaggaattgtggtgcccaggcatctagagggaaaagcaaacttcattacagcaatttctcggaggatacaatatatataaataaaatgccgtatatttttgaacattatttcttgataagcaatatatgcacatgatagaaaatgtaaatattatatgcaaaagtcaatctccttcataactctttggccacctatccaactcccctgcttggaagcaactgctatttgcaattgtgtattttttcagatatattttataatcatttctcagccttttggctaagatcaagtgtaggtatttatgtcaagtatatatatatatatatatatatatatatatatatatatatttatgtgtatgttagcatatacatggtatatgattttaaattaaacttgtgaaatcatgagctcatgcagaataagtaatcattgctgtctagcatccataaactcttattccattttccattactcattaaccattcattttactgcacgtctgttttggagagcaagaaaggacttgggctggaagtactggacactcagtataagtgtgaggtgaagcccatcagtaaatgcgtaaatatattcctgccttagatatacttaccttatatgtaaaattagatgctgtagtggaaagtacagcctggggggcagagaggacctggagtatcccttgccagcgttgagcatctcccatcatggggtcccctacacctgctcaggtaccactgcagggccaggcagcggggcctcccccaagttcatactccgtctctgctgttctgtgtccagctcctttaggagaaccttcttctcatgtactgcttttttctcatgcgtgggcttactcaccagaatccctcttgctatcagagcactgacccagctggtgaggtttcccacccagcaaaccatttccttccactcctccccatctcaccagcctcattttgtaatatccttcactgtggacacccttcttaggaaatcgaagtgttatttcttaaccacaccaggtctgcaaggaccatgccctcctttctgcctgcccttctttgtctttctttcaaagaattgaaaactcactcttttcacactaccttccctgacatcctaacttttaagcacatttttactggttcctctacttgatgggaatgtcatggtctgcttgcagaatgtgtccttgatgaaagtgttttggctctttaatctgtatgtaaatttccatgtgaatcttaaaaaaaaaaaaagtctgttagagatgtcactgcctccagctctagccttttcttctctcttcttttgctgcctttccttcatttacttgtctgtctagaatgcctttgtatcccatgtctaactgcctaagccctttccattcttgaagaccctagtgaaattccattatctcatctaaaacttttcctagtcatctccagccagatgtaatccttcccttttgtattttactgttgccagatgtgtccctttaaagcagttcttaatgggctagataggtctgcctgactcagtctctttgtcttgtcccacagtgcctagtatctcacaggcactctaaaggatatggaattgacctcatcctgccacctccatttcttcttcactgcccactttcttctttaccaatttctacctggcttctgcctcacgctctctgctcagattctttctccagcttgctatggagcacattccttggccatttatcagtcttccttctttttgactgtcttctctgtcgtgaaactctggtctccccagccttgtgatgctgtgttacaccagttctctccacggtcagttcccctactgctccatcttccttccctgtcacccccaggtatggactgttccccaagcttctgctgtcctttctgccctttgcctctatgctccccaccacatcttgcagggcattttgacactgcagctgtagccctgccatcatgctgagctccaactccacgctttagatcgtggtgaggaggtgtcatttccacttgagcttcctgtcattactcgagcatgtttattctttaaatccccaaggcctaagccatcctgtgattctctcagtccttcctcttctttacttccatgtcctctcagttaccacatcattccatccttgctttccatgcctccattcttgccggatcattctcttcatcagcttgtttcatctttatagctgggtgctgctccactgacctctctgccatggagttccacttctatccatctgatttatttttacactggatccgccttctcaagatggtacctttataacttcaccctctcatttagaaaggccagtggcttgtcaacacctgcaggatagactctaggtgtgctgtctcttcttggcagactgtccatatcccggcccctcccttcttagcactacccaacccttccaaccctctactacaacctgagtcccttgaatatgccagactcgattgagcctggacctcagctcacctagatcctctcaaacgccctctgagtcttacagtcctgcccttcactctgtgggatttttaaagtcccatctcctctcttccttggaacccccccagactaccccttcccccacactgtccacgcacaatagaatggttatgccctcagaacagctgtagtgtatactgcctgtactgtttccttgacacttcggttgccttgtgttacttgtgacctttatgagtgtgtatgtttctcccccagtaaataagtttcttgggggagtatttagtattctctcccctcccctttgttcctgcacatcctttactcccccttcctagtctgtacacagtggcacagctctgatgtccacatgacattctttctgcctcgcagcactgcatccaaggaagtttggcagcatggcctattggccccattttgggatttccctcttccagtagcagtgcctaagcattctcctcttcaagtaaccgatagggatggaaaacagacaaaaggcttgactctacccctcctcccactgctgctcccgccactcttcatttttagcactctgacacttaaagggcaaatcaatatggataattttttttcttcacttgtccctaaaataaatacatttgcaattctttcagttaagggagccagacacagtccttccagtgtgtatctggtatttggatcttgcttttaaaatgtagtagaaaaaagtgtatcacgtaaagtaatgtaacacgctctctcaccacaaacttaaattttggtcttaacctagttttttagaatgtgtcacagtcctcattgagatatgtgacagttttgaaatttttaaaattaaactgttcttgacttctcttggtattaaaagcactctcttaaatttgatcacggcagggaagaggtaggggtactggaatgtatttttatgcatggactactcaaatgaaatttcaccaaacttcgcaccacccgagtcacccctcagctgagaatgagcatataaaattcatcccaaagggcaattctttgtgaaaaattataatcacctaaaaatagaagctccgcatgaatgtgtgcccacttatatttctgcacagaacgcagcttgcatactacccaacagcaagagtctgtgattgtaagctattataatagattgaggaaagtgatataagaaggtccatgaagtatgtatttctccaaatagggaaggattatttctgggagggtatgtttgatgttcccttcagttttctcattaagtcttaggttgattgttagtatcctttgttggaaaaaccttgtagattgccaggcctggtgccctgtcccttggctacattggggactcccgtgttggctatttccagttatctaccttctaaacatgaggttttctgcaggaaaaatgggtgataaaggcagtaccaccccttcaagaacctgaaattaaagttaccttcgaagacaagatgtcatagtttgctttagttcccagccttgaactccccatttctctccctcgtcattcccagtgggtgggttgctgtgcccagccaatccctctgttttttctccacctgccagattcgtgcaggtggagaaaaaacagagggactggctgggcacagcaacccaccaccgggaagagtgtattccttccctttctcctctagttccaatagattattttgcttcctaatatctttctgctttcctcaacttatcccagttcctcctgtcttccttctgttttgggagtgactgagtagataaaggaataaatgaaccaaccaaccctcatgtttttaatcctaagaccaattttgatgaacattccaaagtagcatcatgagggattggaaataactcacaaagcctcgagggtatcaccataagtagaatacattatatagatatttaagaaaatagttatttaaggaaaaatctatgattgatgcattgtatatggctcatgatgaacatatttctgttatgtaattaaacagttgttttacgaagtcaggagagagtaaatgccatgcctttatttaataatagtaataataacgatgcttttcttgaccctgaaacctaattgagatattcaaataaaaagtttggtctgtgttaagattacttggtctcattcacacattgatatatcctttggagattcggatttaacagtttcattccaatacctgtggatcttttgaaaggacaaagagaataatcttcaaatttgcaattattataaccaagggctacttctatgggctgtgattttattctgttcccactatgtgcatgctaggaggtagttctacccagaatactttatataactgctgctagaaaactgcattgttaacccactagtgcttgtttttattacagcgttattatttgacatttgttaagcaataacaatatttcaagcattgttaagaaagaaagggagggagggatggcttatagctctctaaataaaggcttcccacccagacgaaagcgcaatttgttagctgtagaattttgcctgttgagaagactttgtaggcttgagaaaatagcatcccatgagtacatggttgttctaaattatatgtgatctggaagtttatttggggtccttccagattgagttcatgttgccatcagttatgttgagtcaccaaactctgtacaattattgcctcttagtcctggtatcttttaagtaagaattaagtaaaaattttatctccctttttagcgatatgtagcccaaatataagtcaagaacaccaagatatggtggaaagtaaaaattagccaatggcttgtttcttccacctcataccaaatgtctgacttcccaaatccttccacctgttaaacaactaaacaaaactggggaccctcattctttggagacccagtttcctaagttcagacctctaatgaggaataggaactctccagctcttcagttgtgctgggtgagcccatacagtgggatccagctcagggtttggtgcagttggcaagatcccaagagggttttctgtgaagggtagaatgagagctgtggcttgagaagaaaccaggcagcaggggagtcccatcgtgtcagggtgtgttactctcccctgagcaccacagagaagacaccaacccctaccagctgtcacgtggccacatgttgttagagtcctgctctcctaggtttttccaccctgccccccatcatttccaaggacccaatattattgaaaaagaaaaacatattgcaaaattgaaaagttgtttgctcaccttacactttggtatgtttgtacccatctgtttagggtgtatgaggcctattggcataagaactgtgtatctgtgtatatagagtactgttgctcattttagcagggataggtggccagaggtcctctcttttggattttcctgggtttagggcttttactcagggtcctaacactggagtggaaggctggcagtgctttcccctcctgccctccaggtcacgttccccacgtagatctgactgtggaattgtgaacctgacatctttttccaaagtcaacagtggattaaaattaaaatgttaagtcttaaagtattttcagatagaaactattctttcaaaccttgggtttataggatagaattttatatgctctgttttctagctagccaaagctaaccttttcttttaaagcccaagctgtagctatttgattaaatagtatggccctcattacaggtcatagtctgctctcagtgtgactggttcgttgagctaagtactgagctaggtgatgtccaggttggcattcctttctctggtaacagtggaggctgcttggcattttgtgttgtgatggtagaaaacatattagttaacattcatcatgttagtaatcaaaagaaatagcatctcaaattgtatatgaaaacaaatggaaacaaagcaggcagcttttggagctgtttggaccactttagagagggacttctgaagtgtaattgtggaaatttgattacagctcaaatggaaatgtcattaataaaatggttagcagttattaagaatgtcaggaaagcttaaaattgaatttttcagatcttgcataattagagactacattttactctgaaaacaaatattaggatatttagatttaaggtaaaattaaaaataaaaagttaatatagtacatttcagataaatattttcttccttcatattgcattttacgatagattaattataagtgatgagaaaaacaaaagtgaatgattacatatttttaaatattggcaatgtgcctagtagctttagttttgtgttttaaaagaaaagcagaaatcctgatcactgggtttaacagctaatgaaaagttggtagagaaaaaattaaagtttttgcattgtgctataggaattagacctaaagatttgattccctgactgtgttgtgtgtcggcttttagtgtaaaatatggttttatgagaccacctgatcccatgaaggatgcattatcagaacctgttaaaaaaaaaatagaattctccttttaacaccagccattctcatcttcattttctctctccctccttctttccttcttgttccctctcttctccctctctctggtatttcatcatagtatctgtagaactctctcagcatacttctggttcaggtacagggaaaggatcctttctttgcatgcctagactcgtaatgagtgacttcagtgtcctctagagccttgggagttgtggctgctaactgattgtcattacatgatttttttagccttctgagtggagagtggtgtgaggagtgttatctccacattttttccttctctgaagttaccttattatccttaccattaatattagcagaactaaaaagatgggtaagtagttttcttgaaatgtaaagctcagacccacatcaaagaaggttctaagacttgaaaatagaggcagcagtggaaccaacagatagttttaaaacagataaccgagtgtaactgtgttatagagtcttaagaggggacttctgaatactcccttggctttgtttttgctaaaactgttttcgtttctctttgatcagttaatttaacttacaggaaagtctcctaaggtaataatcagaaatggtagttaataatttatgtccttcaccatgttttttaagcagtgaaaaattagaaacagcctaaatgtgtatctttattcttttctttttccaaagtttctacaatagacctgttagtataaggagaaaaaatacttggatatatatttttttagatgccttttaagtgaatattaacattaaacattagccaaagaatgttttactggtgacaggctacagaatatctaccagaagtgcttcttttgattttgttctggggtcaaatctttgggactccagttctacctttggtactgtcagcaaccccttgggcctttggtgccactgtgtggggtagggagggccaaagggagggcgggctgctagtgcttgtggagatgaggggagagaaagggaagagcagagtaaaagagtataagaaagaaaagaaaagagatgtgcatacatatggtaggatccatgaaaggttcccagtaatttcaagtgaccacaaaactggattttttttcttgtttttgttacatgtatattttcaaaggttgactctattccaccgatttcttcttgctaaacatgtttttgagtaactattagatcttcccacttctttattagtgttttaagttttccaaatctatatttcatccttctcttaccattgtcattcaccatttctttgcctcttccttacatacaaagaaattaacttgtctaatcgtcctttgctgctaagacttaattttccttcctaggtatcttgaaagtctgcctttcattatttttgcctaataggggctttttccatcagcaggaatgaaagcagtcaataaaagtcaattgctgactctatgaatatatggagggtttaccataatgcatattggaaatgttttgaaacctttatcctgaatggaaggtgccatggcttgtgttttatggccttctaatgttagacagcaatctcatttagcattttcccaaagtgaaaacagtgcattagggcagtataacaagctttacagatcaatacagaggcaaacctttacccttacagattaatccaagaaaatgtcccagagtctactcctggagctggaggacaattatgctgatttccattcctcttcccctctttctaccatcaaatcattaatacagattgaagtgtgtacaaaaagaatttcagaggatgactgcacacacacacacacacacacacacacacacacacacacacacacagaacagatcaccaaacaggaaatcaagagccctggaagtgagtagtattgatttgtggtgataaaagtatattttgacacatttcaaatcataaataacgcatggactttaacttgcatgactaatagctcaacccaggatacatgcttatctacaacttaaactacctctttctaaggagtccataacatgaggtgaattatcccatcgtgagtagactttttaaaggaaaaaataaactgtcttctttatgacatgcagtgtgtggatgctcatttttacagtcttttcccgtatgttaatgaggaagggctgcatatctggtcagggttgttctagccttccctcctcacctccttcgccctgcttttaaatctgagacacattggagacacgatcagttgtcaacactaggatagaatgtaaccttgctttcctatgagctattagtcattagtcatgtatttgctaggttcagctgatctgatgcttaatcatattttattcgatatttatctagatgcaggtcttgctataattagtcacttagtggtatctgtgcctatactctttgaagcacggctgattccttttaaatcctgatgttcgtggtaaaggattagggaaatctgtgtccagaaaaattcacagacatctgaagtttgaaatcttaaagcatggaaactcctgggattctatttaattctgttcttaggtatttgacaaagcagtaaggtaatgaatgaaaaagtaaaagtgatgttatagaaaaattgttgaaacatttttttttctctgtatgtctgtgttctttagaggatagtaggaagtcagggaaccaccaacatgctttgcatttctattctagtaaaatatatattagcttagtgtactggataaaaataatgagacaaatcatcacccaggcgtttccttattgatgagaaatattccccctgtgttctctaggggttttgtttgaacccattaaatttaaaataatgtgatttcaagattactatggaaataacaaatttaaatttcaaaaatagaagtgataagactggaagcttcttgtattaagactaatttgaaaaaacacgaatttcaagattaaaagtagtaatattgtgctttttttctctgtatgtatttaatccttgcagtccaaacttccctgccgtattaatcagaatattttaccttcattcgtataactcatttggttcattatcatttttcaagcatatattataaggtttttggaaacatttacatttggtctcacatattcacagaagcaatctgactaaaatctgagatttgtaagtataagtagcaaaattttaacccaggggactttaaaatgttttctttgcaccgatttgtattcattcagtaaatgtattacatgacttctgtagggttccgatgtctaatagctgaggtaacaaagaaaataagtcacagtccttggaatttacattctagtaaatgtaggttgctaaattgtattagactatggtgtagtcagtgtcacatgcatggcaagaaaagtgaatacgggaccaatggggtcaccataaagggaatgatagactgtaccagggttggggggtggagagctaatgaaagctgacacttgagtgaagtatcaaaggatgagtaggttttttccagatatagaggcataggtgggagtttgggcgtagagcatttccagaagcaagagcagcatgagcttagacttgaagagaagtgtaagaacgaaaccctgaattgggtttgtccaggcttcagctgtgtgcagggttggggggtgaaggccacagagtaggcaggaacctggtcaagaaggaccagccagctggccttgtattttgtgtagaaagtgctgggaaaagagaccatcttcgatttcctatgggaaagaaccctctggaaggtgtgtgcaggcaggagtagagggtgtcaaagctgagagaccagctgggaggttgtttcttgaattcaggatgtggctcacttggaagcaatgtaacgacagtgagtgtggagcaggaggaccaggccgtagggatctccaactttgtgaccaagtggatatgggaatggaagagagaacttagggcttccaagtttctggcatgttgatatggtttcggtttggaagggatggttatattgtccagactaactcacagtagtgtcaattagtggaactaatttcttagaatttatttaccctttgtcatttttatcatgggaaaaatttagctatctttgaagtttaaggaaaattctttctcttaaacctttttctacatttgcaacatctgtgtcttactgtgcgttttatgtgttctttaaccttgatttttattctgaatgaagaccattggtctcagcggtccctgtgtttgttttcaggcgatatgagtctcatccagtctgtgctgatctgcaggccaaaattcttcagtgttaccgtgagaacacccaccagaccctcaaatgctccgctctggccacccagtatatgcactgtgtcaatcatgccaaacaggtaggtgtgccagccaggccactgggggcactgggcaaattgaaaactggatgacctggggcagtggtaaggactaaatgggccactgtgtgtgaaaaagctttctaagccctagtcatcatcatcaagaattactgtaatgagttgattagggcataacttgtgtccgatcattgtcaaagagcccatatcttccttatgtacaactcatttacttgcagaaaaaaggattctactacaattatacttttttccacttgccctgaacttttgtcttctaataataatgttcccaaggtcattcctcatacttttaggccaatatttagagctagcgaagaggatacagattaagagctggcacctttgggcccataagccgtaggtaggcagagggccaggttaaaaaaaaaacaaaacaccaccgttcagtcactgtccaacgcttccaccagttgatagagttcacttagttggacagggaaagggaaaccagagatagcattttaaaaagaatttccactgcttttatagaccatagccatattcttctcttgacccttcatatcagaacaatatgatgttcacaggacgtgcattttctctaatttatgtactttagaaagctaatgataaaccctgaagcaaattatcaattctggcaggtcacataattgcctatcatttaaccaatttaacagttggatatggttgttctgagaggcagaaattgttggaaacgttgattccttctgctgacaaactccatagatttgaccttctaacccaactaaatctagtgtttaagttacacagcatgcctttctgcagtctaatttgatgtagttataataatatcacttggtgtaaaatttttatactctacaaatatccgacgggagggttagtattatctggatagctggaaaataaagtaacattagtggaaagaatataatcaagatttattaaaagcctatgttgtcctcaaaagcctagtggctggcagcttttttctgtttcttgcttgtagctgcacttgtataactcttagtagtatgccagggatccttttcattaaaggtctttggtacaggtaatgttgctaatgttaagttagtacgttttatttgtcgaaaacagcttctgatatgctgttaataaaccccagccttcaatatgaatatgaactgaaggacttgagactcgtaggttgattcatggatttttctaacttgataatagtgccttattgagctggtggtcagtggaaaagagtggttgtgacaaagtgtatgtttcaatgctggtctctaacatacgtgcctgtttgtaccatgtgatttgtaacattaccacagtggcagctgcaggggcattgggagtgctgaccccatcctgcctgtctgggttgtgttgaattatctacatatagtcttgtgacatcaatggtatatatttataggataaagcaaagttaacttgtgacaaaagcaaatacgccacatggcgcgatagtgagtttgaatctggcagacctgggtttgtaccctgtccttttaccagctctgtgaccttggggcttgagttttctcatctgtaaattggggtaatgttgtgaggattacctttatataaagtattcagtaaatcttatttttccccttctttcctcagttgcattattgtgctgaaatttactaaacaggtcagccaaaagcatcaaattattattaatgatttcaaaagagaccctcttttttccccctcactctccaatcttttatgttcagctagtatgtttggagtatctattgttttcgtggctcttatattcagttattaggaggtgtataatacaagttaataataaaaagatagaagccctcaaaccttttttcctgagatgggcaacattgaaatggacgagaaccaagaacctgcaccaccttacatttcggcagtagttaggattgcaaggtcatttcacatccattcttttacttgtttttttatgacaacctgagatgtaaatagagatggttttattttcaccattttccagttgagagcattgaaactcagggaagtcacaatagtgaatttaacagctagaccaagatgtaccttgccataaaaacaaaaaatttcaaaatacataagtggcatttggtttttgagtgggtaagtttgtgaaggggcatccatccatcatccactaatgcagaaataaggcagtaagggaaagtgagagcgaaagcgataaagggaggacacagaatgtggaagatctaatgagcgggggacagagtctgaaggtcacacatggggagtgggttgatgaagcccgtgatgaaaggggcaacttggcactggcccattttaagatcacgccacagtggccagaaggagcttctatcagtgtttcatgagcagttactttccttccaataccaggttgtccttttgctccttgtgaatttaggctaacctcatgaccccagctgtgcccctgttaagagactccggcaagatacgtagtcccgactgcctattttagcagttcctcatgggccaacttcttacattttcttcttatgtttcctgttaaatccagagaacaagctggacatgctaaacatggaaaatactatacatgacaacaagccattaggcagtgttgtccatatccgacacagtgcaagggtttcccccatggaataattccaatggctaagtccactccacttttaaataactcataagattggcctttcacgggttccctggggcattgttctagagactaataggttttactgttaggaaaatttccggatattccttagccttactcttcctctctgcttatttatccacttattcatatcagtgtttcttcagctgttcttcaacaatttctcatgggttgacatgagacatttaggctattatttcttgtgtattaacttatgtgctcttcatgagggtaaagagatattaaatagctctaattattatttctaagacttaaaagctaccagctggctggctgtatgagatacagcatttacaaaggaaggagcacatcgattgatacatagtcctgtgtcttttgtttctcatatctgcttagcctcataactttctcaagctcagcaagattggattacctcttcttacctttgatacctggttcccattctatcttgctacacctacctaaggtaggagaggtgctgcttgtaccaaataggtcatgtctcttcctctgagcgtgcctatgaacaggcatgcttatgcacaccacctaccttacaggagaaatggaaaggagcgggaatgagaagccaatagtatttgctcatgggtagaccaaaatgtgcccaagttctgttttttaaaaaaggggaagggtgtcgaaagggtttgctgtcagatctgcattacgtctgggaccattccctgggacataccacctctctactatttacttgtagaattgggctgcattgggagttgctagtctaagcatttcagctttttcccagccctgctgctattgacagaaaaatgcagaagctggctggacccttctggcacattttgtgttcactgggagggtggggtttataggaaatactgctgctgcaatcctaatctaattatagtgacttgagcttcagttgctttgataaactgaaggtttgaaccaggtgatccatgagggccatctagctctgttattctaggactgattctgctttgaagtatatagagcaaaagatggtgtgcataagcatgcctgttcataggcgcactcagatgaagagacatggcctatttggtacaagcagcacctctccttttgagacctccagtatttgtgccttcgcctcttaaattttgctgtccaccttaaacgttcactcaagaagaacacttgcatttctgattggtctgctgctgcctggcctcccactgctacgtaccctttctttgaggttcacactcctgacagccctggggaagccaaggtggcagaaagaactgggagggaatagaaacagtttcacagtttctccaaagtcagtgaagtgaaaaacagctgtctctgcactggctggcagaatgtaccctgccggctaataaaggccattagaaaatgcaggctccctccagccagccgtaagcctcccctggatcgtgatgcctttcatcctgtgaagtaccatgggaagtgtgactctgaaaacagagcaggaagccaggaacctggagcctgacaaccaagggcaaactgggaccagaggcaaggaccaaccccaggagatgcccaagggacagaggtcagtgtgggacctgcagttagatgatgagtctgtcaggggtcccccaaaccatagcagaagtttcagtcagtaagcaggcagtgggacagtagccacgcaaacagttagttcagctcacaataaggacgtcttgtaaatgagacagccccacctcagacctacatgcttcctgctgatctctttggagagatcagaaaggaacctggccacagtgaggaacttggggtcaggacccagtaaatgaggctagatcctaatgtgacagctctccaacttaaggctagtgcaccccgttgtctcgtttctaaaatatcattgacatctccagtatttggttggcttcctaagtcaaagcctcaagatcagtgcatatggaggaatttgccctggcacaatttctgtccgccttctgaaggacaatttcatctccccggtgaactgtatttatattagaccaggattctgctcctaagtctgtgacatattttgagtatgaaggggtcctgaaaacatagtagtagcttttgcttaaaaatcaaggttcttgaaagaaaaacctattgccagagcaagctgtatgttatcattgttttcagatgaactctacattagatgcaaatgatttaatagacttataggctgttggagctaaaaggaccctagagatcatataacccaacctcatttttttcatgtgcaaaattagcttccagagaatttaaatgatctgtagaagggcagaacccagaccaaacagcccactcttaaattcaaaaccagggtatttttcctgtcgtgtcagatctcagatgtgggtgagcatcagaatcccctgaggggtttgcttaaaatgtacccacccaatccccatccctggagattctgattcagaaggtctggggtgaggcctgggcatctgaactttgaccaaatttcccaggagactctgtacccaaagtttgaaaaccattgctcttagagcccattggcctgaattgcattaaaggtctttgacctttcagaggtcctgccaagtccttgttttccatcttttgggagatggggagctatcactccctataggtcaaagctacctggcagaggtctcatcagaccaaccctaggaatgaatctttagccttaagaacaaattggaagatgatgtgggaatcggatggaagccttgaaaagagacccccttcccctcttctcttgctcccattgaaacagtaggtgaccccagtcccctggctagctcacagctgtgaccagaccctcccttggttctactgctcccagtcaccctgcttctctccccgacccacatcagggtccccccgatgtacacggtggccactttcagagagcacgaagataatcaagaaggttaactttctgggaagccccccaggagcatgtttttattgtgttcgaaagctgctttatcattatcgcttgatgacatttattaattgcccagctgggatgctggtcacagggtgactgacacgtgggtatttcataatagatttcccatttttttggtagggcagccctttgaatttagagtcagatcaaagcaaacaaaattccaaactttaaatttcctatcccaacctcttccatcataggaatccttttctaaaccactttctgagagtaatcgttgcttcgtgacattttctctttttttaaatctgagtttaatagaagaaatactaccatggtaatagattttcatttttcttaataggtatttcttttcccatggtcatccttcaattagaactgcagtatgttagtgttttgtctgttattgcagccagctgtataaacagttaattacttgtaacttaatttgaatattatacagagcatttgtcatagaagatataaaacaagatccaggcagaaaaaagttaacttctatttcctccaaagcaggaggaacaaagaacaaacagctcttgctgcaggggaatagacacatattgaaaacaaaataagtgatctaatcagatttccaggtagtgaagaacagtacttggtgcacaggcaaaactcgctttgtgcttcccataaattcaatttatagatgacttttccttcctgtcttatgcacagtcttctcattctggctttttcctcatcgaagctccagtgtctcccactccccacttttcctgaccctccttagtaaaactcgtgtcttaagaccaggtctgtgccaggacacatctccagtttcatttttccttggttaggtagaccttcctgcttctctacccagctttatgaggcctgaagtcttggtgaggcgctgggtaagttcatccagagacaagcaccctgagtggtatcttaaaaaacaaaccgcttttcttctcttcatgatgattggttagcaacccagggttgccatcatttctcttaaattatcaacacaaccagtagctggcatgctgctatgatagtcaacccctccaagaaagctgtgattcaaaaatcagttgatgagattactgcttaacagaaatatttgaggcaagcggttaggatggttagtaaggttttaataagcggaaatgacacgcaatctcaggtctccaggggcgctgttcttatttgtgagctgccggttgttcttcagtggctggaatgagaaaaagacttgggaaaagagcagtgttcatgcctgaaccactctcttcttttggtgatttacccagctgtttataaaaggagtttctgcaggcccagatacgtgaatgatgagcaaaagcaaggaatttctttctccacattaagattaagtgttagcagttccttaaatgaaggaagcaattttttataacttgcaaagcttctccctcattctttagggaatttcctatgttaatttatgcagtgttaaatttatgcagcgttgaaattcagcccaacagcagtacttacggaaccaatacagagacagtagaacctataaggtgaaagctgaataacacagaccccaccagactacggatccctccagccaaaagccctgagttctgagttggagcaggttttgtcgcatagctggaatataataataacccaaaatgtttgacagatgaattcatcttttttaaaaatccagcctgccattgtgtttgttaatttccctgatagaattgagatggttttgtaccacccctgccaccctttggtagcaagtgagtgcagtttgacaaaatgtttatagatcagccctggtgcttttctgtggtggtcccacatgtcttcaaggagtcaccacaaatcagctgaaccactgtgctatcttggaggattagaattttaatacatgtaacggtattttgtgaatgtggctaaaggggttattaaaatgttacttcttttagtgtctttatgtgagactggcctgctcatcctcagaccagccaggccccatcttgtctctttctgaaagagagcctaacattcttagcatgatatgatttggctgaaaaattacccatctatatttggttgaggttgcagagagaatagtaaaaacaatctctagactcgtgaaaacactctttaactgttgctttccttaagttgtggcagctgcaggttattttgcaatatttgaaaggaggtacattgtcatgtggttatccttgtaaccctaagcccaaaattgtagagaggggtacagctatgtaatcttgaccaggcagatgacaactcaaagctcccatcagtgtgttgaagaaagcagtgaatctataacccccccaaatgcaaatggctaagtggcatcatttataaagagatcactttctctagtaactgcattcccttagataggctcagtatagatctgcttgatactggcttccattttgtatttaataaagcatgatgtagtgaggttgtctatatatctggaatttatagaacttatcatctatgtgattggagaggctcacacagatcaattcataagcaggtgagcatagctgagatgctgtgacgctgtgacactgccaggtggtgtctcttacatggtgggtgctcagcgtgttattttcccagcgaacatggggctggtgcctcacattccagtatgagttcttacaggacaactctctgctgagcaatcttccactgcacctactttgtttttcctgttttccctaaatgcatctagcttttctaatttacctcctgtatgacagaatcattgtttttctcaccactgtgtgtgttatgtctaagtttgtctgcctttatatctgttcttttgtgccctatgacatagacttcttagaaacctataatgatgaacactttaggataatctatccaccctttgctcctatgacccaatacaccatcttgtttgacttctactctttctgttctgtccccttaatttcaatcatttttaaatttttgaccctaaattgttgtgtctagagacctttgacctcagagggcctacagcgtccttctagacatttccattttggatgtctcacccaaaattgcctcacaaacccaaaatttaagtcatcctcctccttcccaggctcccactgacttccctgtttctcttggtggccccatcactgtctttgtcaccaaggatcctcccataccttgggtgtcaccatctccctttttcttcccatgtagctctagttcttgtttccacctttgtctggtttctaatctgcctcctccttgggcttcctgcctgcagactcccctctgttggatccatcatgctgaggatgtcaggttaacattcctaaatgccattctcctatgtaaaagcattcctccatgttttctgtggctagcaggacatgtctcagcctggcgtccgtcctgggccctctttccaccctttctcttggtcagtcctgagcatgtaccctttcttccagctaggcctctcccctcaggattctgtgtgtgctaggcttcttcccctgctgaatcctggccaccgctttctcccctcactcctcccagtcccaccccagtcctccacctggattctctccatggtggaaggtccttggagaagccttccctgctcgctccagctacagggttgccctctgcaccaggcagaaccattcctcttgtgaactgtgaccatctctggaaggggacacagaaactgggaaacggaaggaaaaaattactttctaccagatactatttggttcctgttaaatgttatgctgtttacacaataaattttagcatgtatttagcaaataaataaaaattagcaaattattaccttttattattcctgaattttccacaggtgtatgtattagtttccccaatgcactaaactgagtgcagtggtacctggtaggagctcaatgaagagatggctggaagggtgcgggttggcgggaggcaggtgggaatggataaactagaggcaacctcggcctcaccttgcctctctgagtggttgcaaaactagaggggaaagtatcacttttttcttcttaaagacctctaaaaatgaaggcagtatacccccatttcagctggttatagagttctcatctgatagttaagaattcttcctatctacatcctcatctcccaaataaataactaaatagaatgtagggaccatttctgcaatctgggaataggtaccaatctgtgtagctctgtccagcctcatgagcacatgaacatctgcgttctccccctctgggaaggaatcttgtgtttctctaatgaagagattccctctcagagcctttggagttggggtttgatccctgcactgccttggccatagctttcccccggtcactgcatccatcagccatgctcccaacatttccaaatgcccctaccaggagcacttttgctttctatttgagacagcaaagactgttgcccaagctggagtacagtggcatgatcatggctcactgcaccctctgcctcccaggctcaagggatcctcccacctcagcgtctcgagtaactgagactacaggcacacaccaccatgcccagctaatgtttttgtttttggtagagattgggtttcattgtgttgcccaggctgatttcaagcttctgggctcaagtgatctgcccactttggcctcccaaagtgctaggattacaggcgtgagctactgcgcccggccttgttggggttttcaacccatgtggtggtgagaggggtcatttaaagatcatattgataaagcaatggtgttgattaaaggagcaatattttgagaacaggaagcatatgccttgttttctgtgtttttaaaattagatatttgaaaagcaacacaaatcatactaaatagttagtgccatttattttttgtcctctcccggtggtaaaacttactctttctgtttttcttgcagagcatgcttgagaagggaggataaaaactttcagaatgagcaaaacaccatcaacgttaattccagagatggaacattttttttcctagtgagaaaacaacccatttgaagagaagaccactaatgagaagaccactaaagagagacatcaagaatggattcagcagaatcatttcacgttttgaacagcagcagtttgaagggccaaagccttgatcagggatcagtcattaaaggacactcttgagtattagtaaaccctcttatgatgattaaaagagaagggcagccctctccaccttttggtactttctattcaacttgcactgaccataaaatgtttctcttctgaacaagccccatcatttggtgaacctccaccctaacaaagtaggatggggttgggggctaaattaattggagtggggcgaggagagagccagaaaacatagatccgagggcagcagtgctgggtggagagagccagaaaacagatctggaggcagcagtgctggatggaattgtctaggctgtggcatgttggttttgtctttcttttctcctttgattatgtaagagctatttcattataacttattatggtgattatacaggcaagaagacaaaaaggagagaaaatgtacctcttctactggaataatgtttatgattacaagtgagataaggtatttttatcaatatgaaggcaaccttggctgataaaacctctatagtgaatactcacatctttacttcactcactatcaataataaatatattttctgacaaagactggcattgtagctcctcacacattcctttggctgggttagatgtctatgcttacgggaattgagctgatttatattgttaataatttgcatttgtgctgtacctttcctctcaaaggctccagagcatttcgtggagcctccgacaggcaagtgatgcttataacttgcctatcaggtaggtagaattcgggaagatctttacaaattgtgtgaactttcctttctttgggatgacttaagtcatcctgcctggggcaagaactagattagataaccttggttaggaccttctgaccctgcaatactaaaaaacgtttaaagaaaataattcaaccattaggtttttttttcctctttccaatttttcaaaacttcctgattataactctcccttttttttttttttttttttaaccatgattggtgcttcaaccctggagttgagtgagttggaaataagtagtcacactgaagctaaatgagaaggttcttttcagacataggagtaccagtgctctgtgatatcctttaagtgtcttttgtcatgtaggatttttattttattacgaagcaagtgaatttagcaaaatacaggttctgtattcttaatctgtgtacaaattctggctctgctgtggaattcaaccaagtcaaccaatacttcttcaactgcaaaaagggggcaaatggaagaactaatttttaggcttacagtgaagagtccaaatgctgactcaccgcatacgtttggtcagacccagtaaatgctggcttgtgtgatgattcagtaaactggcatttggcgttgggggcatagaacgtattcacatgcccaagtaccttttatttaaagttggatgtacttgtgatggaacagtctcagccaacgcatgtgagtgtaactgcagctgcttattcattcaggttccccaggcgatggctccctccgagtgacatgttcatagacacttggggacacacctgctggcctaacgttgattctgagcaacactagaggctctcctgccataattactgatatcctctgtgatgactgcttcatgaagttttttttgtttgggtttttttgttttgttttgttttgtggggggctttcaggtttcttttttaatggtctgaaagaagctgagtttatttcagtgtgaataaggattcactggtaacttgaggagcagcacattttgatgctgtcagggtggcatccaggtagctgcctgagagaaatggaaaaacctgagagacacaaaaacaaatgtttacatggcgacttgctctagtgtttgcaaatcagctaactcacaaattccctcctatactgttttgttttgcaattgagagccaagcacttggcacatcccaggctgccagtcttgcctctggcaggcaaatgcagcgctgtagagtcaggcgtctaaagtgggcgaaatccaggggaaggggggttggttcgacaggccgctcctcccagcattgcttattaatttatcattctgataagcatggtaggtgcaagacaaaagccagcgctttggggaagtaaaaggatgaaatgatgcctttctctccgtccttggagagctccctgctgatggcatcacagctctgccaggtcacagtagctttccagaccactgcttgggaagagtgttgtgatttatatgaggctgtggagtggtacattccaatcagtttctcacttaagtagaatgcaccttcagccacagtagcttagctcatgaagccaagaagaataaagtgtcttgaaagctgatcagaggatatcacactaaacaaatgtttgaggaacttatagaacacagctgggttgaatcagcacgaagtcctctttgagaagtcaataacattacagtaaacttgccaacatgcactagtttagaaaagtattgactaatcatgattagtagcaaatgtagactgctaaaagccagatgcctgtggccagttggtcaacccacaagactccctacaacagtttttagcttagaactgaccaggtagtcacatgtcctcgacttctcgggctgagaaatggagaatgtgtggttcttcacttgctgtcttccagcctgcaggtataattgcttttgccagaaacccacattgcagtgagctgtaggagatgacccttttgagatttaagaattaaagcaacaaaatctcagttagattaggaggaatagttcaagagatctgttgtacaacatgctgactggttaataatgttacaacgtattcgtgaaataatttttttaaagaattagcagttgaacaattgaaagggcagcagtaacttgctgtgattcaaaccaagtgagttaggaaaatagtctgtttagaattaatcctcttgaaaggctaatgttgtgaatgaatgcgttgatactcattgttatctcactgctctcctcccgtcttcctctcccaagttttcccagtctctgcttcctcctctcttctctgccatcttcattccctcctctaacctcctctgtgtgtttacacttttctcagtctctccagcctccctccagagaagcagtgacaacggagtgcacagtgcatcctcctgagtgcagagtcctgggctcttgatccagctctgctccatttgtcagtggggacaagtcacctccctctggtctctcactgtacagtggcctgttcggggtcctttccattatgatttgtgttttttgatacttcccttcttttcttccccggcctcctaaatcttttagtcctatatttagtacttcctctcatttagtaatttcttattcttacagttcttataaactgggtaaattttctaaatgaaaactatatttgtatttctttctctgtgcccttgatggtacttttcctacagcttatggtctccattaggtttttgttttccatcagtgccctgagggatttactccgtgggcaggctgcatctagtctaggaagtcaccttaggacacgtaggccatttgtgctgatgacacccacggtccaaaccacccccagaataggggactgtggtgcgggtgttccgaggcctgcaccggccagtgaagaatacatgttctggctaaggagtccacggtttagtttaaacctttattcctggcatctgttttagcttcttcctcccagcctttaagagcatgtagaatggagcagatttcagtttttactctccttcccttgacccacttgattttgaggtaccaacaataactgaagcaacataaaggaaataaaggagggggataaagacctgtttactgtccataaagtagaatgctggctcgtggtgatcaacgctgtgcctggagaggactggatgtgattcccagaagctcctttcactctctaggagctttttttccttttttggccttttttttcctttttttttttgaaacagggtcttgctctgccacccaggctggagtacaatggcaaggtcttggctcactgcaacctccacctcctgcgttcaagcaattctcgtgcctcagcttcccaagtaactgagaccacagacacgcgccaccctgcctggctaatttttatatttttagtagagatggggtttcaccattttggacaggctggtctggaactcctgacctcaagtgatctgcctgccttggccccccaaagtgctgggattacaggcgtgagccactgcacctggtctgtaggtgctcattctgactgtaccatatatgaaaaaaaaaagtcacttttaattattccactgcaggtgagtcagagctatatctgttttacaatcatccctagcctgcgcatgacccagggagactggagtggttggtgatttttcaagctctgtaatgggaaacttcaaggccccccttgggtattgggaggctggtcctgcccatctccctgggcgagctctgctactcctggatagcactgctttatccatgatggaggatcagattggtaaacaaaagacaaagtagatttgttcccccgtacccggaatgagagtcatcttcctcacccaaaaaggttccttatgctaggaattttagccaaagcaccagacagcttccggagctttcaattccattaccttccaaagcccagagtcattggatcctggctttgggagaaaaacgaccaaccgcctaattcattctcctacctccaggctgatgtttgaatggagatgatggaattttatatttcatgttgtgctctctctcctctggtccctccagcctcaatattgctggcagagcccctaagaagagttgaattgctttagtttatggggagaaagcaaaaattacccaaatcaaaggtatcttccacttttcctacccttccaaatagattcatggtctctagatcatgataatatgcccttgtatttcaggggacaagcctatgttaaatccactttggattccgaaaatatggtcatcatattgatgcttttcagttaaggaagttggaaactgaaaccatttcattccctgcaactcctcaaaccaagtcaattctgtggcaaacagctttgcttcaatttaatagagtacttcaaaactcttgcagtgatttggattaggtgaggcctctatactcttcaaaggctttcccatgcagaaagactttacttacctacctctctgccccccactccctggcagatagtctctctcctgggaggaggcttatcaggcaggcagtggtcactgtccctttgttgagaggccagtctgcttcgaacataagcttgccttcaaagtaaattacatttatatatcatggctttgaaatgcaaacatggaagccggaggtcagtggtcagttgcagggtaccactctgcttagctgtgtgcctttcttcccagacttgccccagcacagagcagcctgccaggtctggagtccaagtggctcatacttggggagcctcctgcggactccccttccctgtcaggtctgccctcctcactgcccacagcacagattgaaagcctctgttcattctctctctctgcccctccttgcaaatatataaaatcgaagtcgagggcccgatgacttgggccaactgcctattatctgctgcctgtgcagtccaagggatgagggtaaaaccattttcttcacttcatagccacaagccgtgtttctcagtcagcatcaaaccagcaacaccatgccagcctgcacattttagcttggctttgcatctccctaaggtaatgtgcatcccggtctcagaagcatgaccatgaagtcattgaaaacagtattcaacctccagttgaagtggcattgttgttttatttcaagcttggaaggcaggctgcagagcaggggctgggaactccacttcagcagagggtgaataggatgtcgggtaacctgctggcaggagtttattttcagtcacctccgtgttcttaaaatgcctttgcagcagctgcatgttaaatgtgaacccaaaataaaagagcccacactcctcaccctcaggtgcttaacacagaacttagaagtatcagtgactaaggcagaaggtgtttttcttctattggaaatgagtttatcagtgaagttagaaagatgttatattttagaagcagaagaggggttatgaatcaccactaaggtgatgatgtttcaggaacatcagaagtttattgtcctgagtttttataaccactttcaacttcctcattaaaggagaagcttgttcatcacctgtggctcagcatggaccacttagttcatcactcctgccttctctggttccccggagaaggtactgttagccacagtaccatgtcacactggcattgcctgaatcattgcctgaattcagcatagcctctgtgcaccaggtactgttccaggtgtcagggatattgtggtgaacaggacagacaaggtccaggcctcgtggggtttacattctggtgggaggaaaccataaccatatgatgtcaggtagtgatgagtgatgcgtgaggtatgaatgggtaaaggaatggagcgctcagggagggggaatagaggtttgtggaggtgctgtgctattttaaattaggtggtgaaaacagctataaggtggtcacatctgagtagattcttgaatgtggtgagagaactggaaaccaggtatggtgtcatgtgcctgtactcccagctactcagggagctgagatgggaggattgcttgagctggggagttcgaggctgcagtgcactgcgatcgtgcctgtgaacaaccactgcactccagatggggcaacatagggagataccatctttaaaatgggagacaaaaaaggaccaagtgaagtgcattccagattggagagcagtaagcacaaaggtcctggggcagaagcttgaagtttgatgggttagggaagcagcaaggaggtcctcatggccccagcagagtgaaaaaggcacattgctctgggatgtgggttgacggaggtaaaccagagccagaacaaggcaggacatttttgtccatgataatgatttgagttttattatgagtgcaatgaaaaactattggagggttttctgccaggccgtcaatctgatttacatttataaaagaccactctaggctgggtgcagtggctcatgcctgtagtagtgctttgggaggccaaggcgggaggatcatttgaggccagcctggccaacatagtgagacccaatctctaaaaaaaaattttaaataaaaaaattaaccaggtgtagtggcacacacctgtagttcagctactcgggaggctgaggctggaggattgcttgagcccagaaggtccagactgtagtgaggtatgatggcaccactgcattctagcctgggtgacagcaaaactcagtctcaaaatatccaaccaaccaaacaaaaaaacactcttgttgccgtgtaaagaactaaagaactatccaaagtatgggcaaagtggaagcaaggcgaatattaggctattacattaacgatcgaagcaggaagtggcaacccagactagagtgatagcatggaaaaagtgagaagtcagatttaggagacccgtagacattagatagacccaacaagacagcctactgtattagatgtggggggagagaggaataaaatgtaaggacccgaagatttgcctgagcaactactgaatggtggtgccgtttattgagatggagacacttaacatctgcgatagtgggaggggtgtgggcaggaagcagaggttccgttttgatcatgttaagctgaatatataatttatgacccctagtagagatggctatgcaggcctttggatatatgtctggggctagagagaagatttcaggtcctcgttgtcaagatggcatggagccttggcactggccttggatgtgcttgcctatgggatgagtttgtaaagaggagagggctgggacagctacagctctctaacactgggaagctggggaagagggaagggagctggccaagaggaatgtgagagaatggccactgaggtgagagacaaaccgactcagacatggagaccaagggaagggagcatttcaagaaaggaggaatggccagctgtactaagtgctactgatgggttgagaaagatgaccgcagaattagccagtgaacttggcaacatgaaagtcacttgatgggcaggtggtgactggggagaatgaaagcctggtcagaatggggttgaagaaagaatgagtttggaaaatgaagacagtgagcagcagcaacacttttttttttttttttctgagacggtgtcttgctctggcacccaggctggagtgcagtagtacaatcttggctcactgcaacctccgcctcctacgttccagtgattctggtgcctcagcctcccaagtagctgggactacaggcatgcgccaccaggcccaactaatttttgtatttttcagtagagacagggtttcaccatgttaaccaggctggtcttgaactcctgacctcaagtgatccacctgcctcggcctcccaaagtgcagcattttaaagaagttttgcttaaagggcgagtagagagggaagtaggtagaagaaatgtgggctcctcaggagatttctttttaagattgaagatacagtccattttatatggaaaaaagcagaaaaagaggataagttcagttgaaagtccttgagtaggctaactggctgggatctaggcttaaacagagcagggagagtttatccattgtaaatagaagaaaagttgagtttatgagcataaatgcaggcaggctggtggatggtcctgagaggatgaggtcattctcttctgatggcttccattttctgatcagccatgtggcatgtcccaagttaatgtttgctagcaataattaaaagtagctgagtgccttccttttctcactgcctttcttccttcctgaataactcagtccaaaagcccttaggtagagccaagcaaggtagtcccccacgcaggggatgaggggggtggcggccaagactgggatgcctgagcctgagcaggaagagaagggtgtccattcgtggtgcgagaacctgagtgatgggaggagggtggttgtgttggctggggaaagaagggtggctctagaagtggaagagtaatgacatgcagaggacactgatctaataataaacatattgaggataatgagagccagttttctgattgtcagataaggaagttacaaatacggaaagggagaaattaaaatgacctctgtagcattggtttggaattggagatattgaagtgaaattgtggtgatagctagatactgaaacaaatatatatatatttatttcagtatatataaaggatatataaatatatataaaaatgcatgcacatttatatgtatctattcatactcatatattatgcacatatgtatgtatgaatgtacattcattcagatattccttagatccgtcatcgagaggagctgggagcaacagcattctaatagcaaagagctcaccatatgcccagatctttgatctaaacaccatctttcactagaaaggaaccatagcttcttgaagaaatggctaagccctaggcaggaaaaaatacaagatgggaacataccgaaagggcagtgccatcttgaaggggctatcactggccccaacttgggcagatttaacccactgagtaacaaaggaatggtccaaactgatatcatgggtcaatgctaatataataaataatgaataaataaaaggagaaaggagaaatctttcccttagtatagaatgcaaactaataaatgttaaaggagtgatatatttatgaaattattatttgacaaccaccatagtaataattcagccaagaaacatcaattgcatgttaaaactagggggctactcttctgaggaacaggatggatgtttacatgttaaattcccttccaactcatgaactacaaaactaaacagagtaaattcttacaaagaagaaacctgacagacaccacctaaatcaagtgatcaacattaacatgaccaggaatgggccacatcaaaatgtgataggatgcagtgagaacacagcagcggtgcttctgagactgtcccaccaaaaggatagcatgaatctaatcatgaggaaaacatcagacatgcctgagggaggcccagtctacaaaatagctggtctgtaacttctgaagtgtcaaaatcatgaaagtcacgggaaaaagtctcaaagaactggtccaaattgaagaaaactaaagagacacaatgaaatacaatacgtgatcctggactggatcctttttgctatcaaagacatcactgggacaattgccagaacgtgaacagtgtctgtagactcgatgatagtaatatagcaatgttatttatttgcttattttgaggattgtatggttgttatag

SEQ ID NO: 307 - DNA, 1717 bp, Homo sapiens
accacctgttgccatagcatccgggtcgggtgaaccaatccgggcgccctcgccgaacagaggcgggcagttcgcatcgccgaccaacctgaggcgtttttgttgtggcgcgtgaccggaggaggcgggagctcaggaccggcgccttctccttgcttctgggggtcgtggccttgctcccgctgtgcgggaaaagaatccaggcccttccacgcgcgtgtgggtgcgggggccccgaagtgctcgtggttccccgctaggtctccgctggggcaggaaccggaatcatgggtgggaccaccagcacccgccgggtcaccttcgaggcggacgagaatgagaacatcaccgtggtgaagggcatccggctttcggaaaatgtgattgatcgaatgaaggaatcctctccatctggttcgaagtctcagcggtattctggtgcttatggtgcctcagtttctgatgaagaattgaaaagaagagtagctgaggagctggcattggagcaagccaagaaagaatccgaagatcagaaacgactaaagcaagccaaagagctggaccgagagagggctgctgccaatgagcagttaaccagagccatccttcgggagaggatatgtagcgaggaggaacgcgctaaggcaaagcacctggctaggcagctggaagagaaagaccgagtgctaaagaagcaggatgcattctacaaagaacagctggctagactggaggagaggagctcagagttctacagagtcaccactgaacaatatcagaaagctgctgaagaggtggaagcaaagttcaagcgatatgagtctcatccagtctgtgctgatctgcaggccaaaattcttcagtgttaccgtgagaacacccaccagaccctcaaatgctccgctctggccacccaagcatgcttgagaagggaggataaaaactttcagaatgagcaaaacaccatcaacgttaattccagagatggaacattttttttcctagtgagaaaacaacccatttgaagagaagaccactaatgagaagaccactaaagagagacatcaagaatggattcagcagaatcatttcacgttttgaacagcagcagtttgaagggccaaagccttgatcagggatcagtcattaaaggacactcttgagtattagtaaaccctcttatgatgattaaaagagaagggcagccctctccaccttttggtactttctattcaacttgcactgaccataaaatgtttctcttctgaacaagccccatcatttggtgaacctccaccctaacaaagtaggatggggttgggggctaaattaattggagtggggcgaggagagagccagaaaacatagatccgagggcagcagtgctgggtggagagagccagaaaacagatctggaggcagcagtgctggatggaattgtctaggctgtggcatgttggttttgtctttcttttctcctttgattatgtaagagctatttcattataacttattatggtgattatacaggcaagaagacaaaaaggagagaaaatgtacctcttctactggaataatgtttatgattacaagtgagataaggtatttttatcaatatgaaggcaaccttggctgataaaacctctatagtgaatactcacatctttacttcactcactatcaataataaatatattttctgacaaagactggcatt

SEQ ID NO: 308 - protein, 243 aa, Homo sapiens
MGGTTSTRRVTFEADENENITVVKGIRLSENVIDRMKESSPSGSKSQRYSGAYGASVSDEELKRRVAEELALEQAKKESEDQKRLKQAKELDRERAAANEQLTRAILRERICSEEERAKAKHLARQLEEKDRVLKKQDAFYKEQLARLEERSSEFYRVTTEQYQKAAEEVEAKFKRYESHPVCADLQAKILQCYRENTHQTLKCSATQACLRREDKNFQNEQNTINVNSRDGTFFFLVRKQPI

SEQ ID NO: 309 - DNA, 1748 bp, Homo sapiens
accacctgttgccatagcatccgggtcgggtgaaccaatccgggcgccctcgccgaacagaggcgggcagttcgcatcgccgaccaacctgaggcgtttttgttgtggcgcgtgaccggaggaggcgggagctcaggaccggcgccttctccttgcttctgggggtcgtggccttgctcccgctgtgcgggaaaagaatccaggcccttccacgcgcgtgtgggtgcgggggccccgaagtgctcgtggttccccgctaggtctccgctggggcaggaaccggaatcatgggtgggaccaccagcacccgccgggtcaccttcgaggcggacgagaatgagaacatcaccgtggtgaagggcatccggctttcggaaaatgtgattgatcgaatgaaggaatcctctccatctggttcgaagtctcagcggtattctggtgcttatggtgcctcagtttctgatgaagaattgaaaagaagagtagctgaggagctggcattggagcaagccaagaaagaatccgaagatcagaaacgactaaagcaagccaaagagctggaccgagagagggctgctgccaatgagcagttaaccagagccatccttcgggagaggatatgtagcgaggaggaacgcgctaaggcaaagcacctggctaggcagctggaagagaaagaccgagtgctaaagaagcaggatgcattctacaaagaacagctggctagactggaggagaggagctcagagttctacagagtcaccactgaacaatatcagaaagctgctgaagaggtggaagcaaagttcaagcgatatgagtctcatccagtctgtgctgatctgcaggccaaaattcttcagtgttaccgtgagaacacccaccagaccctcaaatgctccgctctggccacccagtatatgcactgtgtcaatcatgccaaacagagcatgcttgagaagggaggataaaaactttcagaatgagcaaaacaccatcaacgttaattccagagatggaacattttttttcctagtgagaaaacaacccatttgaagagaagaccactaatgagaagaccactaaagagagacatcaagaatggattcagcagaatcatttcacgttttgaacagcagcagtttgaagggccaaagccttgatcagggatcagtcattaaaggacactcttgagtattagtaaaccctcttatgatgattaaaagagaagggcagccctctccaccttttggtactttctattcaacttgcactgaccataaaatgtttctcttctgaacaagccccatcatttggtgaacctccaccctaacaaagtaggatggggttgggggctaaattaattggagtggggcgaggagagagccagaaaacatagatccgagggcagcagtgctgggtggagagagccagaaaacagatctggaggcagcagtgctggatggaattgtctaggctgtggcatgttggttttgtctttcttttctcctttgattatgtaagagctatttcattataacttattatggtgattatacaggcaagaagacaaaaaggagagaaaatgtacctcttctactggaataatgtttatgattacaagtgagataaggtatttttatcaatatgaaggcaaccttggctgataaaacctctatagtgaatactcacatctttacttcactcactatcaataataaatatattttctgacaaagactggcatt

SEQ ID NO: 310 - protein, 225 aa, Homo sapiens
MGGTTSTRRVTFEADENENITVVKGIRLSENVIDRMKESSPSGSKSQRYSGAYGASVSDEELKRRVAEELALEQAKKESEDQKRLKQAKELDRERAAANEQLTRAILRERICSEEERAKAKHLARQLEEKDRVLKKQDAFYKEQLARLEERSSEFYRVTTEQYQKAAEEVEAKFKRYESHPVCADLQAKILQCYRENTHQTLKCSATQYMHCVNHAKQSMLEKGG

SEQ ID NO: 311 - DNA, 1681 bp, Homo sapiens
accacctgttgccatagcatccgggtcgggtgaaccaatccgggcgccctcgccgaacagaggcgggcagttcgcatcgccgaccaacctgaggcgtttttgttgtggcgcgtgaccggaggaggcgggagctcaggaccggcgccttctccttgcttctgggggtcgtggccttgctcccgctgtgcgggaaaagaatccaggcccttccacgcgcgtgtgggtgcgggggccccgaagtgctcgtggttccccgctaggtctccgctggggcaggaaccggaatcatgggtgggaccaccagcacccgccgggtcaccttcgaggcggacgagaatgagaacatcaccgtggtgaagggcatccggctttcggaaaatgtgattgatcgaatgaaggaatcctctccatctggttcgaagtctcagcggtattctggtgcttatggtgcctcagtttctgatgaagaattgaaaagaagagtagctgaggagctggcattggagcaagccaagaaagaatccgaagatcagaaacgactaaagcaagccaaagagctggaccgagagagggctgctgccaatgagcagttaaccagagccatccttcgggagaggatatgtagcgaggaggaacgcgctaaggcaaagcacctggctaggcagctggaagagaaagaccgagtgctaaagaagcaggatgcattctacaaagaacagctggctagactggaggagaggagctcagagttctacagagtcaccactgaacaatatcagaaagctgctgaagaggtggaagcaaagttcaagcgatatgagtctcatccagtctgtgctgatctgcaggccaaaattcttcagtgttaccgtgagaacacccaccagaccctcaaatgctccgctctggccacccagtatatgcactgtgtcaatcatgccaaacagagcatgcttgagaagggaggataaaaactttcagaatgagcaaaacaccatcaacgttaattccagagatggaacattttttttcctagtgagaaaacaacccatttgaagagaagaccactaatgagaagaccactaaagagagacatcaagaatggattcagcagaatcatttcacgttttgaacagcagcagtttgaagggccaaagccttgatcagggatcagtcattaaaggacactcttgagtattagtaaaccctcttatgatgattaaaagagaagggcagccctctccaccttttggtactttctattcaacttgcactgaccataaaatgtttctcttctgaacaagccccatcatttggtgaacctccaccctaacaaagtaggatggggttgggggctaaattaattggagtggggcgaggagagagccagaaaacatagatccgagggcagcagtgctgggtggagagagccagaaaacagatctggaggcagcagtgctggatggaattgtctaggctgtggcatgttggttttgtctttcttttctcctttgattatgtaagagctatttcattataacttattatggtgattatacaggcaagaagacaaaaaggagagtatttttatcaatatgaaggcaaccttggctgataaaacctctatagtgaatactcacatctttacttcactcactatcaataataaatatattttctg

SEQ ID NO: 312 - protein, 225 aa, Homo sapiens; identical to SEQ ID NO: 310

SEQ ID NO: 313 - DNA, 43561 bp, Mus musculus
  misc_feature (1)...(43561): n = A, C, G or T/U
cctccaccccctccaccactaggggctccaccccctccaccacttggggcgccaccccctccacccccaccagggcctccggtaagacctgtttgttttttctctctgctttgctgtggagtccaggcctgtatgaacaggcctttgaatgatcttgaaaaggaggagtttgctgtttggtgagctgccgtgggcacccatgtgacaggtgcaccttgggatgttgtcttcggctgctttgggggtctgattcctaaccagtctggactaaacattcttctctcctattcctatgcctatgtcatcgtaccttacttcagtctccataattgtccccgtcgtggcccaccacatggtacaggctttcccagtcaccctgagtgactttccatctcactggacagtctagtgagaggctcgtgctgaagtttctcgggcctgtgagacactgagaagtcaagtcgcacatgaggtatcaatcagaagatgagggtaccctggcttcagcccccagttctatgtccagcaagtgacatgttaggtgaaagccccagggaagtggggtttactgatagacgcttccagtgtctgcagcaatgaatccagactactcccatccaggccacattgtctcagtttaatcatttgatttgtgccagaagagggccacagagggtggctgttctgttctggaacaaagagtcaacctcagcaccagtgacatgggaaccaactaactggggtagggagttgctgagctgtacttttttttaggacatttaacaatatcctcagcctctacctatgcaatgccagtaataccccctcaagtgtgggaattaaaaaaatgtcctcagatcctgcctggcagaggcaagatacataggcagactagaaataagtattgaagtttcattgctgaacttgactacgcatgctcaagtgcaaggtcattgccaccacagggtgataaataaagaaaacaagcgggaaactgtctgtggatcctagatttggtgacactgaagaaatgtaacagccagagagatagaagcatcaacagcagttagtggggcttgaggaatggcctgggcaaacactactggtggtgcacacagctagagcatcgtcaatggtgaacagttctttctagagcgctgtaggcaggaaacaatcccgtgtgcaacactatgtagtcagatagtttgtcttcttaggggtggttaagattttaacccctaaaggaaccaaaaagctgtatacaaagacactcaaagaaatatgttttagactagtgaaaataatagtgatgagaactacacttttaatgctacactataaattaaaagctgcatcatgccacagcgttagttaagaactacgactatggttattgtttttagggtattgccaacatgcctattacacacagtgaagtctgttgtgtaattaacaccataaatagaaacaaatcgtcaggaaatttgataggctaatataaaacttaattatttcactaggaaattctttggttaatgttctgcatcgcctttctcattattattatttttgtgctgtctgctcatggaggaacaggtcacttggagcagaaaataactatgtaaattttaatattttaaaaatgtttctgcaatctggaaaaataccatgcatattaaaggcaaaaacagttcatggtcattggtgtccacagagctcttactgatcaacacgcaaaggatgatgggaaaacagaggtgggtggaaagattttcagatctggagcattctggatttcagttttttccaattagggatactcattctgtaaatttgatgtaacttccaaaacctaaaattaccaagttagaaaccccccttgcctcgtggtttctgataagaaatgatccacttgtggtgaaacagcgtgactcgtctgtgtgtttaaccatgagaggttccaaaatgggccagagggttggagccaggtcttgaagacgctttgtgggagcacagttgtgatttcctgagagaagttttgtgatagtgatcagtctttagaaatcaatagatataatttaagtttgaggttcactccaggcagcctttctttagaaaattaattagatgaaagtcagtgggggtggaacacaccaaggagacacggccccctagacacagcagagttgacacacatatgaactcagagactgtggcagcatgcagagagggctcccagtgcggagaggagaagtacacataagcccccatccctaacccataagccatctcaactgatagcagccaaaggaaacttaagttttctccaatggagtctcacagggcccacaaacactcacaggccccgtgtgcagcagcggacatcaacacagcaaaggctctggcttttctggatgtatttgtcacatagttgtgtatctgagcatttcttttaacctacagaccttttgtttatctattatggcttctgaatttgtttttttaatagattttctgtgttgcaaatgtgtgtgtatcagcatccacatgtgttttatgtgatttttggtttgtgggggggagggacactcttcttttattatttgtttgtttgcttgtttttttttattttgttttaaaattgtattattattttgatgcctgtttgtatttaatgagagagaagaagggaagagaaagaagaaaggtagagagacaagaaaggaagagagaagaaagagggagagaggggggatagagaggagagaaagggagagaaaggaagggtgtagatttgggtgggtggagaaataggaaggatgtggacagagttggagaatcagaatacattatatggaggaaaatctattttgaattaaaaaaaaataaaattctgaaactgtaaaactaataaatgttcctgttactctgaaaaaaaaggaaacatagctacatgatataaataaatggattacttataatggtaacaaaaaaagaaagcaaaaaagaaagaaagagagagagagagagggagggagggagggagggaaggagggaagaaggaaggaaggaaggaaggaacctaaattctaattataagagagtgaaaacttaaactggtttccagcatacaaaacggcatgctagatcattattaaaaactgcactccaatttgcatagacttcccaatgtacaatccactcagaaaggatacttagaaacgctgcaggcaccaagtgaagagttgagaggggacagcaagatgaccctgagggaaaagggacttgttgggcacgcctcagtgtgatccttggaactcacagaaaggttgaaggagagaactgactccccaaagttgctctgtgatacacacacacacacacacacacacacacacacacacacacatacatacacacacacacagacatacacgaattccccagcatgnnnnnnnnnnnnnnnnnnnnacacacatacatacacacacacacacatacacacacatacacacacatacacacacacatacacacacatacacacacacatacacacacatacatacacacacacatacacacacacacacatacacacacacacatacacacacacatacatacacacacacacacacacatacacacacacatacacacacacacatacacacacatacatacacacacacacacacacatacacacacacacacaccccaatgataagtaatttgtatgttgtgtaagaatcacccagcagttacttttctttcttccaggttggggattgacttgtggccccacccgttgcaaacagcggctctgcccctgagcagcgccccacagaaccctttcttatgtgcacgttaattttaattatgcagggaactgtgcctctaaaatggatcaatgctagtgtcctctcgctaggatgaccttacatcctgagccatctgctgtcgcacagcgagaaaacacactcagatccgcctaagcaagctcacacacacgtggagacgatgggcagagctgccgagcttggcaagctggagtctgtggcccaagcccagcctgtgaccaaggtgctgccagccaatagctagggtaaagaattgaagggaaaagatatcgtgagacacggaatgacaagatgccccacttttagcccataaatacagttaactggagcacaagcacactggttcacttgcttatctcagtggctgtgtctctgctatagagctgccatcccaaccaagagaaaagttattctaccaaaaagaactccctatccacttgtgggacctgtgttctaattcttgttgctacattttaaattttaggcgctaactattttgtggaaatcatttattttctacaggctatctttgctacacaagctatcttgctcttgtccccttggccaacatccctggaatatatactttctggacctttccagggacaagtcaccagtgtctgccccacagccagctggccttcttcagcctcccgtgtaccgccagtcaccagtggtcccagcacagttacattttatcattctcctctgctttttctctcagggacttcccatgacctttgaacagggctcaacccagctttcacaatttgggacctgcttctctctccaactcctcctgagccccctcttccagggcatgttcaaccatggcttttatatatctgttccttctgtctggaaggaactctctactaaaatcaaagtacaggtccactgaccctatgggctttgctacttatccctccttcaaagcagccattgtttctaattatgtttttattttattagtgtcgcttttaattttatttatttttgtgttcttctggtttgaagtagacattcaccttatgaagaaaggaaaggaaagaagggaggacagaggaaaggaggtagagaagagggaaggagagaagacaggaatgaaagaaggagaatgaatgaatgaatgaatgaatgagacaggaaattagtgactgagtaatcagggctgagaaacaggagtttttcagaactagtggtcagggctctaagcacttgttaaagtccaataaacaagacattatccaggaccctaggcatggtggggagtgagagaccagactcaactctgaatacagcctgggaaatgggaatttgtagccgagaacctgtaaagttgggtggtggataaagcattactaagaggaaatagtggtgtgggtggggtgctccagtacactctggataaatttgtctgttggtgtttatgtgtttgttgtggtaacctgtaaccctacacatgcttggcaagcactctactagttagccacatccctagctggccacccacgatctggcagggtagagcgtgaccctgagtggaaccaggccaatcaggtatccagagttcaggcggggttttgtactggtggtggtgtttttgtttttcatatttttgtttttagagacatggtttctccttggctagcctagaactagctctgtagaccaagcctgcttcgaactcacagagatctgcctgcctccgcagtactgggattaaaggcgtgccaccaccacccagctgaattcagattctccataaacttattccacaaggttctttttcaaaaggggagtcttgtataaggaagtgcacagatgagcctagaagtgcctggtgcctaaccaaagcttgattgattgccaagacttttccctctctcctttcacccccaatacctgccacccccacccccaccccacccccaactccagacgtgtgcgtctctgatgtggctgaagagtggcggacacgttggggctttgggataaacgtctgctcagccaggcagctctgcccttgtgtctctcaactttttcctgaaaccaccccctctatctttctggctctcctccttttccttcctctccttaaaatccataagccatgtcaactccccgccgtggcatgcgtgtgttggctcacttagcactaaattattatggttgcttggtttataggatgtgctttttaaatatctgcgttttttttttaaaccacaatggatttgggtttgagcagcagaactgtaatgaacttttgtttcaaaatcctcttgtaccttttatccaactgtgttagatgtaatgagagcggaaacttcagaaaggtacatggatttcatctgcctgccgtggtcccttacagagtaaaatgtaggcatcactgaccagctggtaacagtcatggttgtagcctaagtgttcattcatcaaatagacctaggggttttctgaacattaattttattgttgccattcaagctaaaaacatcctcaaggcgaaacaggtgtcccagagctgggcgtgccttgttatttaaacatcaaggagggcctggcttggctgtcattgctttacaatgagaggcaacgcacggatgcagaagatgccatggtgccaggcacttcgcctacctgttctgaagactgtttattaactcccgctgaacggaaattatagtgcgccctcgctcttctgttccctctttaatgtttgtcaggccgtttcctttggaaactcagtgctatcattttttttctcctgtggaccgaggattgcatgattcatgagccaagtactcatccttgtcagtattgacctgtaagctgtgacttacgtggggcaagcttccccgtcgtctctggcctgcaaaggcttctgataagaaaagcagtggagaaactgcagtgttctctgaagccccatgagatgctccggagtcttaggtttgatgttattttggaaacagtgggggtggggagacctgggtgataggacacttatatatggaaaggctaatttgcatgttcactagtgcacagcgataatgaaaggcttacagattcctaaatactgtcactcatgtgtgttctcttaacaagctagtgctttgattgctgctggggactggagtgtccccgggtcccagtgatcctgaagggggcttttgcagtgcaccattctatgctgattgtactaagctagcatttcttcttgcttaccaatctacaaaatgacacctttgtctgctagtgattttaaaaactcgattcccttctttgtggctttgcatagagagcagtaacaacaggtctgtgaaaaccaagctagttggttttgtttttgggggcttttttttttttttttttttttttttgcatcagatttcctgtctgcgccagagaggtgtgtcaggacctgccactcacaattgcaagggaccattcaggatgacattcaaatgtgttctgtcgcagctgtgaggtaggtgggtggcaggcacagaaaggaaaagcctgtacggtacacagctatgcacatgatacccaggagtcaccacaagtcagaagggccctcatcacatgggcctgtcctgagcaggaatcacccctgtgaaatatctaagagaaatgaaaggaaaattacactatgccaagattcaacaccttgatctagccagttactgaagtaagagtctccttgccgactcattattcacaccccagactgctgactttggccttgggaaacctgaaatcccaccatcacaagccattcctagagaaccacaagccagccatttctccctcccaggtctgtcttcatctgagccaggtgactagaagggacacctggcagacatcctagcctttgcggccggcctcatatctcttgtcccaactgctgtcataaaagaaaaacaaaacacaaaaaacaaaaaaacaaaatctttccaagttcatgtgatagacacccagcctgaccaagtgtgaaagccagagacagggtcccagctctgcaaagactcagcggcaagccgtactggggactcccacagtctttaataaaaggcagagcacggggtaactcctgggcagagtgcaccctggttatgtaaatgaaatcatgctggctcatgagcacgcggaggacagccaccagtgtcacctgtcaatgctgggttttcaggcagggaacaggccccgatagtttctacctatttttaaatgacccctcccccctcacacaaccacatgaggtgtttcttatttccttgtggtattacagatggacctgtagcgcacttggcactacaccaaaattgatctgcacccccagcctccttcttatggttctaattccaagacatgtgcctttcaaaaagaaaaggatgagcaatgtcttgccagtgggctgagtgagactgtttaaagatgatggtgtgggacagtagtggcgggcacctcctgaacagctgccaggcctgggaactgtgccaagcacccaacgtggacggcttgcagttacagttagattcagtagggacagctctggtcgggccaggtgaggacgctggggcacagagagagagagagagaggtgctgacagagccagtgtcacacacccacttagtgctggaggtggattcctctttagctgtggggtgtgtgctagtacacttctccttgcacactcagtcaccagttctgggaccaccgccaacaagctgtgagtggtgctccactctgctacatagtcattgggttgttcttcatgatacctccatcatagcaggcgatagtattctgttctaaagatttaattttttatgagtatgagtgttttgcctgcgtgtatgtgcatgcaccatgtgtgtgcagcagcataggaggccagaagagggtgttggactccctggaactcaggttacggactgttgttagccaccaagtgggtgctgggaatcgaacccagatcctcttcaaaagcaacaagtgctcttaaccactaagccatctcttcagttccaggtgatattctttttcattttaacaggcacagagcgggtaagaacttatccaggggtgcacaggtacaaatctgatagggttgaactctggcagaatgacaccagccctcaacactggtatgaagccagctgccgttttgctagtgatcaggaggtgatggaattctcagccactcctgttgcccattgcaatctgcaagctagaaaactaatagatcacattctccaagccttagacatagcatccaagactcctctctgtatcccacactgcttccagagttgctctcttctttcccattcttttctttgtggttcgattgttttttccactgctctgttagtttcttcctttaaatagaaaacaaagtagcaattgagccacggaacagaaccacatgtagcagcagagaatcctacggaggaggaggtggagccaaggcagaggagctgagctctgtctttaggggagaaccacctggggatgcgctcacacaggggctttgctgccagcaatgatgggcacaaggtggggacagtaagtgccagataagctcagtccctacccatgactaggccttcctgtggggaactaagttcatgctaacagagctgctaggtctctgcctcagaagagtgtagattcctgaatccagagcatagcacatccctgctcagacagaaatggggagtatagagctggtttcctattcccagatcaaaggagcaatggtagtacagcagagagcatagctcccttcctagtcccaggtcagaagtttgagtaatatgttgccttttcatcatttcctatctttgggatccttaaagtgtcactttcaaaggaccctcttgcccctctaagagtcactttcttcttcccaagctttctcctcccgtcattgcagcaccctcctgaacagaatgggctgaggtatgggagagggtctgtaggccagtgatcatgcagtaatagtgagtgactcagagacagacagctatgccaaggccaaggccagacacccggtagacacctagcgcctagctttattttctgagttggcactgagggtgcaggcaaggctgctgtgagctggctagccagtgtctcgcatcttccacctggctttaccctgaaagccaagagcaggttctttgctacagtgttagagaacaccgccaatacctccagactaataagaacattatgtaaagcaactgcgattgtaacagaaacaacaaacttaggaacagcaacaattaacacgtgggaaattatttaaaagccccaactaatccttcagccccaccttccccgttctaatttgctattgttttctcagagagcagaccctgcatctttgctctccacggagatattttaaaactcacagaaagcacgtggtgcacctgttctgtagatggtggcaatgggttaccgcgttaataagattcgttcactgcggaggagttgactgtgtttcaggatgctgcctgcaggactccacctgcaccatgtggagtgttagagcacaaaggtgggaaaatgtgtttgtgtcctttagccctctgctcagaaggcattgtgggaagctgtgtgcttcagcggggatcctgcaatgacagcttgctgtgtaaaaaaggaaaaaaaaaaaaagaatttcagagttaggcagattgaaacctgaatcacgggagccggttctaacctgtgtgtgtgtggtgtggtaggtgaattacataacaactctgagtctctgtcccccatgtattttattgggataataatggccattttctgaggttcattgcccctagtgtggaagcttcaagaagggaggaagtggtctgttttgttttgttttattctgttttcccacagtttgtcatggattgccacacacatagtgaaacttgtaaacacgggttgaatgaatgaatggctgccaggcttgcagtgaggatccattcagaggacggctgtggcttgccaagtgccttcttatgaatagccgcaactactgcctcagaaaggaagcctgtcagaggtccatgttagtgcaaagttgtcaggacagatggacagcaggagtctggacaggagtcaggacagacggaaggcaggagttaacagcaaggttggaactccaaaatgagagtcaccaatttggggtctccaaaagtaatccaaaaatggggaacaaagagtattccttgaagttgcctgtggttcctgattcgttctgccaggttgccctgttcatgggttctgtggagccagcaaggagccttcccttttggtcatactaagttgagtgggcctgagtccatgctacagcaggaagcgcctggaatcgcagattagagccacatgacctttgttggggcttgtctctgctgtggtagctcatcagggaatgtctcacccagggaaatcggagcacaatttaaatgctttgaactgttgaagagggttttggcttgttggacagctgaagtggcagaccaacagtctagtggaagggatggcccctgtctctctgtatgaattaccagccatactagtgcgggaattctaggtggcctggctgtaagccctctctacaacaacaacaacaacaacaacaacaactccttgggttctgtagcagctccaggaagctgagctcaaatgctgtgacctggtcttctctgagctgaaaatgtactcatattctactgacagggaaattggaatacaggtagaatatgttctttgtatcgattattataaaagaaaatgagagttagtattataattagttctcgtttattttacttattaaccttgagatagatgatagatagatagatagatagatagatagatagatagatagatagaaagaaatttggaggtgaatagctaattgaaatgggaatgaggttgatggtgaactgacagctgttgttgaagctaaatagtagctcctgggtacattagtcttcgagtgactttcgagtgaattgtccaaatagcagtaggctcaccattgtcatctccctgactgtttcccagtcacaggaacctggaacaggacgacaccagataagcagtgtgctttgataaactttcacttgctattctctgtcctggctcaagggcatctggttggtgttttctcctcaaagtacagagggcattgtggtgattcttacaacaaaaccctcccagtctgtaactgtttggaaggtcaaggtcactaaatatgagcaaactccccctttcagcattttctgtctccaaagagaggttgcctccaagagcttcggcctctgactctgatgacacagatgttgaaggtgcttcagcagtaatgtatttcagaatcgatggacagatacctgctatttctgaaagcttatacggagaggccaatcaattcctggcaaccttggctgtcttagcatccattatagatgatctctgagcaagtgcagagcagtttgccctgctcacctgcagtgcagtagctgctaacttcctcttccatagctcccagttcccgaagatgtcttctgaaatgctgagtcttggatgtgaccagagcccatagactgaccaacctgcaacccaggctgagtcctagtgtagaactggggcagaaacagtatgtgtggatcacagatgtcatcggatggggacctgctttttaataaatgatcttattccttttattttgatttttgtactccacctccatgacccccgcttctcactccacctacgctccttttattgcttcgtttatgctgccagagttagaaaataagaatagaaagcacacagttaaattcaaataaaatacaaagcaacagtaaaacaatgaggcgtgatggcccagaaagcagaggcaggaggatctcaagggagttccctgcctgccaaagctacacggggagacactatctgaaaaaaaaaatacaataaaaaattcaactaataagtaattgctttagaacaagaatggagcaaatatggtcatacttaacacataaaataatcgttgagcttaattcaaacttaagtgccttattttatctggcagtcctagctcttttttatgtttcttggatatgtatgtttatagatagatagatagatagatagatagatagatagatagatagatagataactatgtccttcaaagacttactcacctttctccccaataaacccagggcttatctcctcattggtatattctgaggaggctataactgtttctcctgtctcctttatttaaggttatgcataattttttttactatcatgggttatcatactttatacttatacagagagtctgatcaattcctggaaactttggttgtcttagcagccattatagatgatctctgggcaagtgcatgtacttgatcatacttgattaggtttggttcccaacacccacatagtggctcacaaccatccttaactccagttcccgggaatgccatgcactcttctgacctcatctaaacataccagcaaaacactgatgcacataaaacagaataaagagacctttttttagaagcaagaaagaaaaacaccaaacaaacaaacaaacacaaacctacttccacaaagctttcctaactccctttcatacttggtttttgttaggtttcgttggttttagggcggggacaagggttgtgttgttgtttgattgtgggttttttgctgtttgttggttttttttgttttattttgttttttggttttgttttttgatttttttgttttgttttgtttgtttgtttgtttgttttgctttatttgaaacaaggtttcactcactatatagccctgtcttatctggagctgtctatgtagaccaggctgattctaaactctcagagattccttgtctttgcctcccagttgccagaacgcaccacactacgcatgagattttattcccagtagcctttatttttcatagcagctttagtacttagcaaaactgaacagaaagtaatgttcccacatacttcctgcccccccgcaagtatattccccaaaataaaaagcaaatttttcatccatgcttgaagattcttcatttttcaaatcaccctcttgatgctatcatcacttggaatgaagaaaaaaaataacaaaagttatgattcttaaagatgtttacatgacagttttctacaatgagtgacatttatattatgatgtggctttatttttttgccactgcagtgtggttattagaatgaaattaactatactataggtcagaggaatagctggcaggcaagggcagctgatacctaacaggattgttgttctagtgcttaagtgtctagggcagctgaatgactcttggtctttgcatggaagcagagttgtacctgcttccttcagggtaaccctaccgggctggctcacaaggaagcagagacctagctgcctaaagaaaggacaacgcaacagtagatctgaggttacggaagtgtgatagttgcagcagcccacaccacaccagttccatagagcctcagtcagcagacctaattttaggaggtgcaagacagaaatacagttgagaggaatgaactaaaaataagtcctctctattccttgcagttcacatcctgagatagtctgaatgtgttctgtccaagcaaatgaggtccttgtcatggctggcatgatgacctcatggggaatggtggggcccaggttctgttgtgagcccctgcagctgttgtgactttccacttctgtcctctggaaatgctgacagccagtggaatccatgctattgtgttttcaagagggtttgcagtggctctgttttgtttatatatattttgtttatatatatatatgttttttcaaggagcagaatgaaggagagcacgctgtgtgagacatacctctgggatacccacaggcttcatctgccattatcatgacaaaaatatttatttttctatttaattcacaccatatttatcacattgaagagcaagtttggccttagtgaatttttagaatgtaacatatatcaggcactgtgctaagtactagaagggtggattcaggcaccttttttttttttggtttttcaagacagggtttctctgtgcagtcctggctgtcctggaactcactctgtagaccaggttggcctcaaactcagaaatctacctgcctctgcctcccaagtgctgggattaaaggcgtgcgccaccacgcccggctggttcaggcacatttctatcttaagggatatacttgagatggtgacagaagcatctcaggatgggtgaggtgtctaaacactggcttcaggttgtgggtaggatgttggcccagatatccttatctgtgttgggatggaccatttgagcccagagaaaccaagtcagctgtgtgaagctgtggataacagatagaataaaaagtctttcagtttttctatcacatcttggcaaagctgctgtgcttatggtgtgtgtgtgtgtgtgtgtgtgtgtgtgtgtgtgtgtgtgtatgagttcatgtgagtgtatgtgtgtgatgttgcctcgtttgggcagcaaaagtacttactacacagacagtgaagacatgagacccccttgaagttgcagaaatcttcaataggctgtgggctcttatgggtcacagtggaccacctgactaatattcttctcacctcaggctcaggaaaagccagcctcactggaccaaaccctttaagcgtatggctattatatataattaacattcacgaggaaagaactgttaattccaattcttgagtaggttcctcaagaaagcctgccagctgggcgtcaggagaggattgggtttcaatagggagaggcagagcaggagaccgtgtgggcagagggggcagagcaggagactgtgtgggcagagggggcagagcaggagaccgtgtgggcagagggggcagagcaggagaccgtgtgggcagagggggcagagcaggagaccgtgtgggcagaggggacagagcaggagaccgtgtggacagaggggactcatgagaacaaggagcttggccggtgcagctgacacactgaagggtgatggtagcagtcgccatagtcccatctggaagcccctcaacactatgcttgtgaagatttgtcccaatcctgtgtgtaggtcatcgtaagcttgagaggaatacaggggaaaatgacatcaacccttaactggagaggaaaagtttgaaaacaagagtcctttgggaaaccgtttaaatccatgacttccagacaccccactttcacccacactcctgaaaggagatctgctcctgttgccaagaccacagctctggtctgagtggtcaaagtcggcaataaaaagacggtgaagtgaagtaagtctagaggagagcggctgacttgaagttgtattgagtcgtcctggggtgcatattacaagtgaggtaaagatgtagagaagcttgtgagcacgtgtgtgctcatgtgtgcacatgtatgaagagctagggagggcctggcatggatgctgaagaatggtgtcattctggcactctacggcatgcatgggtgctaagggtttgtaaaagttcccagtaggcttactgtcaccacatgtcatattggcttctggcaccacatgtggacaggctgcattgctagacaactagagctggtttgaaggtggggcctcccagagtgcaattctttctctttaggaaagtgctaggtgtggtagctctgaatgttcagactttcttgtattacaggtgctatcaggaagtgataaggagtcagggagaccccaggacatcataccgagatgtcattggggccaggaagaacctggccttttgaggacatagggtcaccaataggcatctcaaatatgtgccaatgactgaaaaaaattaaacagtgcaaaaaagttggctctgtgtgtgtctctcttgcatctttcatttgatagtttgtctctactacatttttattttgtttgtatagttcaagttttaagtagtaagactggctttcacagggacagtgacaactctgtgatgatgcatagatttgtgcattcctacccctgccagagctcccctattacccctttgtagtcacaccctgcttctatcagtcattggcagcctctgaccctcttttctattggtccagttttacctgggttttgttgatccacacccgcagaagggtgttccggtagtttccagatgtttctgcctctctagttcctttgcttctctgtataaactttagattcaccatgccaatgtctatttttaaatctacccggcttttgactggaattgcaccaaatctatacattgacctgttctctttgctacactgtatcctctagtggatagagtagacagttttattgactttggagaggggggcgggatatgctggccaggaggatgctgttatggatagggttatggaaggatgctagatctgagggccagatctgctttcatcagaattccatgttttgtagaccccataccctgtgcacagttattggattttgtgtggttcttttatacttggaagtattttaaagggttgttaaatatttggttttgagttgattatcccccgtttaaggagtcgagcttggtttccggcgtgctgacctgtaaaccatgacctccatgactccctttctggctctaggtgctttctgctagactgtttgcagcctgtgaacaggtagttttatctttccttcctactgcacacctcactgctctcccatgattgccattatgatgttgaatagatgagagggcagagcctagctttgatcctgacagcaggaagctacttcacccctgggtttattgttggcaagtgagaatgaagcgccttcccattctgtctgaagagagctcctatcatgaaaggaagctggattttgttgtttggctgccttttcttaatcaattgatgtaatcatgtgatttttttcttcatttttacattgtgttaatatgagtttgtttgaatgattggcaatgcacacacagtgtgtatatgtatgcacacagatagatgggtagatagacagagaaaaaacaaataaagaaaggatatgactgttcttaggtatggtggaggaggtttattgtagataaaggggagagcactagccagaggcagggacatctgggagagttcagagtgaagatgacccccaagctggagcttgtgaggagaaagggggagggggaggggagagccagaccaaaaggctaaagagcaaacaaaatggccaggtaaccaaaatggatatagggaagggcagctgaggaaagggaaacttagcccagtacctgggtgggagatgtctagggtagggggcgggatgtgttgcccaggaggaccctgtaacaggattactgtaacaggtaggatgctgggagaactggggtccagatctgttttgatatattaagtagacacctcaaccatttgtcccaggtttgagacccagtgcacggtgtgtttgtgtgtgtgtgtgtgtgtgtgtgtgtgtgtgtgtgtgtgtgtgtgtatgtgtgagtatgtgtgtgtgtgtgtctacttcacagttaaggattaaaaattctgccttctgttctgtggtcatatttgagtgtttcccgctttgactctaaaactgactctgagagtttgaaagtccatgaaattcgggattatgaggtgtaaacatgattcttatagagctgattgggtttgcatttgcctcattttgagatcagcatctgctgcacatataactctcctcgaatctcctctgtccttctatgaagatgctcaaagtcagcgcctgtctcagccagttcccccttttcctgtagtctgaggttatctttgggtttttcagaggcagagaagagagcagacatactctttccttgttgctggtcgccacccagctttttcccagactcccttgctcgggatggtcccattctctctcaatttgaactggttgttccagaggctaccgaagccatcgtttgggaccttctttttgatctctggctttatgccgggaatcacaagctttaaaacaggaaaaggtgggagcctgttggaaactatgagagagtgcagatattaatagccaacatctactgagcgtttcgtaagtgccactcactgatttcaaaatgtctctttttaaaaatggaagtgattaaacccccaccacagggtatgtagtggttgttgttctcttcccaagtttgcaggtaggaaaatggacacttgaggaagtcaggtaagcggtcaaggtattgtattatcctaatacaaagtggatctgggtcccattgaggatgttgggactttaattcaataggttaccaaacaaaataaaaagccatgaatgtgggaaaaggttgtagggaagagggaaggttggtggctaaagccgagggcggatgctttgggtgctacctcatgaaggaaggggccccacgcttcattggcagggcccggagactggactgagacccgagttagaggtgaggatgccagtgacttcgggagcagggacctcagggtccacgaaggttctagagtggagaagaagtatgttggtttctctttgaacaaatctcggagtcattgtttctcggggatccagtccatgtccagatctagaagcttcctgtgggttctgtgcaaagcagaggtggtggggggtgggggtgggtctaaatctaccttatcataataccgtattggaatatcttgtcatcctccccctccccttgcttatcttttttctacttctgactctttgcatgtgaacgagattcagaaaccctggtctagaagccatataaacactgtgtcttgcctgcaaccagcaaggaggcaatgagaggaagagctagaaagaggcagaccaggaaggctggcacctaagagctgagggttacctgacgagggagtgtcaggtgcaggtaacttacagcgcagggtattggccatctgtggcctgcaccgcatagggttactctgcactttccatccagggcttacagccccacccccaccccttcaccccctcccacaccaagacgtttgatacactcaccggcagttcttggagtcgacactcagccttaactgtcctttctggcactgacagagccctaggactttgctcctgtggtaccacccttctcgaagctttgccctccctccctgggccttcccttttccttatgatacctcttacccccacccccacccccacccccacattgcttgtgaagcaacatgcgcctcctggtcccaggccagagggcaattgtcccaactgtaggcctgccttgcattccttgggtgatgtcattatgaaagggctgaaaagcttggtattgagagagtcagacttccctgggcttatctctccaaaggttctgtgcttctaggaagttgagcctgtttcatgtctgggcctcactcaaaaaactggactttgtgtccacaatcactatattgccaatttgagtagttcaaaggctcctgaaatgggttgagacacacagaggcttggagataatgcctggaattcatgaacagagagagggagccaggcacctgtggaagctctgttatatcacaagaaagagagaggagccacaatagctttgagctttggtttcagacagtggagaaagaaacacgctaccagagggagaaatgctggagtggcgaactggggttgaagttcatagaatttgcaaattattcacggggccatgtttatctttggcagtatttgtgacatgaagctcccaggtttgtttgtttgtttgtttgtttgtttaaaggcacaccagtacatgctagcaggctgatgggggaggggaggttgctgtgatgtctgtggctttgtagagctggaatgttacagattggaaagcaaactatttctccacctttagtcccttaaggccatttgttttccgcctcagtgtttgacctaacatccttgtggctgtcaggtaagaagttttgggggtggggggagggatatacaaacagatccctagtctccaccaactcaaaggcctccttagaatgccatcagacaatgtcagaggcctactgctaagactccctaccctgctgtaacccactaacgcccctcccctcaggtctttgaaagatgccttgacttaggggttttctttgttctgctgttataagaacattgtgaaactgttgccactttggactgtggcatttggggtgactgtatctgtgttccagagccatggccatgtatgcttggctccagaatcaactcctattctctttgaagtgggagccggttttgcattgacatccttagaggagagaagaaacactgctcacagcatggattgttcattagctttagactctcagcccaggaaagtctgatcttcttaatagttatgaatgaaattatccttccagatccaacatgggttttaaaaatcaaatcttctcaaaatttaaaattactcctaaatcccaggaatgttggcacattgcaaaagagtgatttcaaattgaatttgtgtttcgagggccaaaaaacaaagccaaaccaaaccaaaccaaccaaccaaccaaccaaacaaacaaacccaacccctctccccaaaacccccaaaacaacagcaacaacaacaaacccagatcatcaacaacaacatcaacaatgtcttagtcggtgttctattgctgtgaagagacaccatgacccaagcaactcttacgaaatggagcatttcatttggggctggcttacagtttcagaggtttagtccgtttattgtcatgtcggggatcgtggtggtgtgcatgcagacaagccctggagcagtagctaagagctagaccctggtctggaggcaaggaaccagaaagaaccaggtcctggcgctggcttttgaaacctcaaccccacccccaacccctcagtgacaaatttcctccaacagggccacacctcccaacctctaatccttgcaaatagtgctattctctggtgatgaacattcaagtatatgaggctatggggcctgttctccgtcaaatcaccacagaatataggtgagaggatactatggggaatcagtcttgagatagccttggagggctgcagctttctcctgcattcgggtgctttctaagaacaggcaggctggggtctgtggagtcaggatcattacaaaatgactacagctaaacaaataaacaaacagaagaaccatattctctgataacaagtcttgaagtcccttcaataggaaatcctttgaaaagtaggaagaaacatcagaggagtagtaagtcactgtggagagagaaagatttaggctgtacatagaaaaccagaagtccaactgccccagagccacaagttctaaaggacattagatatataaggagactggatttccaaccaaaacatacagcatttgtcactgatgaacgactttatacattagttcccaggacttgaggaggctcaagagaaaagccctcagttactaacgtaatacctaaactaatgtgctccgcgatcttgtctaggaatgctgctattgctgctgcttatgggtgaacatgggagctcaggcaggggcatgaatgttttattctgtatgagatggaaggccattgcaggtattcctggagtgatctgggtggcaggtgctctgttgaaggtaggaacactgctctaggaacacggagtcttccaggatcgcaaggcttcttggaagattgccaaaacgccagtataaaaagatcaatgcgatagctcgagtcagggtctggaggtaagctcgctggtgaaatggaaaatctaggctggtccctaaggaccttgtgctataggggattttgagctggatgcagaagagcagttctgagacagaaatgaattttatagaggaaagtgccatggtaaacctcatgcccgtttacccttgaaaaggtcaggctggttgctatgtggaggagggctggacacaagcatgagagcttgctttatgacacagccccaggagacaatgcaggaatttgtgaaggaatggggcagggaacgaagccgacagtggcccatctagacagcagagttgcaccattgcataagataacctttcatggggtagcaaaaagtccagacatcacctgtattcttcagcaccagcgaaggggccgctcatcctgtctccaagcaagaagtgagcaagtacagttctgcgcatgtgttcgcgcagccttggtgtggatatccggcttttgcagaggttagacaggccgttgattctgctcacgaatttgaattgcaatttggaattctaaaaatgaaacataagactgtgtatggcaaaaacgcctcgttcttgaacagcatgacttaggtaccatttggagtgcagagaacatcgtgtcgggcctgatgggggagagtgggtaggccacccctccttcacaggatatttccgtctctctcctggattcagagttccctgtgttcttccgcgcaaaaagcacagcagcaggtgggaggctattctagctgtccttgtgatccaggcttggcaataaactgccaaagacagttataagctgctgagacctgtctgcccacgagtctgaggctgctggggtagcctagggctgagataatgtgcaggccccgtgtgccagggaacctgtgcaccccttttcagtgcaacagccataaagagaaaagcataaatctgacatctgcagaaaggtgaatggaactggagtcgttgggggaagggagctagggggcagatgcagaaataccaatattgcatgatttctttcagatgcaggacctagatttcagtgggggtagagggcagatgcagaaataccaatactgcatgatttctttcagatgcaggacctagatttcaggatgcatatgcaagtgagggtgggtcaagaaactacaaaggacttcatcagaaggaggaagaaactttcagggacgggggggggggggtagaggaaaaaaagaaagaagcaagtgaaacgcctgtgaccagaaagcagaaaggaggctctggggtgtgggggaccagcaagaggcaggaggacagggaggagcaataggagaccaggtgaataaggacaaaatgtgtatggacatgtcagaattaaacctgttactttatatgctagcttcaaacgccaacaaatacagggacgggtttagatcacctttgagagaagtacctggcttggtttgggacaaccactggcccttttcctcgttcatatttgaatacattttattttgatcaaattcatccctcactccccaccttcagcttttctctagcttgctctatcccatctttccttcatttttatgtccttccacactctgtagatgatagatgataggtaggtagatagatagatagatagatagatagatagatagatagatagattagattaattacctattgagtttaattagtgtaacccaaatgtaaatgagtgtaggactagcctttataggttgggacctaccccctacttctgagaaatctgacttctttcttctggtagtcatgaactacctgtagcttctcaactagtgaacacacacaaacacacacacacacacacacacacacacacacacacacacacacacacacacacgtgcgccatgcatgccaggatattgaccagattgatcttgacaaagtcttgtgtagcatccacaactgtagagagcttatgagtacagcggctctcacatctggaagacagtttgacagcggcccctgggagctctggcccttagaaccttcccattctctgtgagacatttgctgagccttgggaggaatatgtggtactggctctctgctttttggtctctgttgtcccctcagcaaacctccgtccaccgaagaaagaagcccctccccgggcactgtctacacctccagaggatctggactcggtttccaggatcttcaaccactcacagccctctgtagctccagttccaggaggctcttctggcctcctcaggcactaggcacacatttggtctgcacataaaattaaaaagacataaatacgtattcttaaagaagcagcttttcagatgagaggagagggaaccagcgacattggtgtcagcctttctcacagaagacagtgttacaacagaggccaggtggcagagggaagcaaagaggtgtggtggaggacacatcaaagttctgatctagactgtcactccctgcccagataacaaccgcagctccgctgcttcatttactggagcagcaaagggacacaaatggcttttataatgtatccaagtcagagcagccacctctccacctctactgctacccttggctctgtgttgctgtcatttgattttggtatttctaatctgcttattggcttacctctggctttcagcttctttatccaaagagaaaggctcatgtgcctgtcctctgtgggatttcatattctttccagctcctggatgacttcttttgagtcgtacagtagcaaactgtgtgaaccagggctttgggtggaagcagacagatctttgttctcagtcacattgttatcgggaagaaacaagagtggtcttcgcagggatgtcatgatgggtgtttcagacaatttgcaagcttgttttccacagggaaagtgcccagggttgcttcctttcctgtgcttatgattttagtgaagttgccaatggtgaggattggcacagaggaaaaatactcagtggatatttaggaactctttcttcctgcttcattatcctgtctccatggtaacaaggattcttagggttgtcttttttttttaaaccactatagttggaagattgacaaatattgtagcttgagtagaaatgactgtctgtgtgtagtataatcatcaacatatgaatgaatgtgtccttttgtcagaaacccactaagtctaaatatatatatggcttttttttttcccccagaagttagcaattcttgcctggcctgcctcacagagagattggcaggtgccttatggtggcaggtgccggagagccctctagtgggaaattgccaggacaaactcaggagcaggagagagtcaagagagaagggatgttcaccagtgtgcttgctggagaatgtgttcatttgtcagtctgtcatgtaagaatccccaggcacatactgaggcccgtgctaaataagtaacaaaattaagataatgatttcaatgcgtcagtctccagggccctcacctgaaacatctgttaatgggcaaaatcagagagtaaggatgtcttcaggccgtaagtgaaattgagtggctggagagagatggtttagcagggaagagcactgcctcatattccagaaggccctggtttgattcccagcgcctacacagaggatcatgatcctctgttactccagtcccagaggatatagcaccctcttctgacctctgagggtaccgggtaaacatatggtacctaaacatacacgcaggcaaaacacccatacacatgaaatacaatttttaaaacctggagtctgaagtagacgagatgatccttctctggggagtggaaggggataggagtttctcaccacatgagtgcctctcaaacagaacattataaacctcccccttcctcaaaaccaccatcatgcataggacttccattgctgtttgtcctgcacttagagaattacagaacactccttgcccagcatccctagccacacataaagcacacctgagaccctaaggtcagttttacaagaacagttgtatccctcttgcccagggccctgatgcttttactcattccattttaaatgactttgattttaatggcttgtacagagtattttaaaaccacgttgtgtaagaaataaccctattgtacgtgtattataaaagcatttgaactatgtctaaatgtactgaaggctgtggaactggagagcccggtccacagctatgttaccgaccagcatccacaagcctctcctaaaggctcagaaagtgtgtttccaggcaacacggatcgggctttagagcttaggcctttcaaacacgttgagggtctaagtcaagccagagtcactggtggactccttatgtttagcccagaacacagcgtctctgatgatgcacagcccaggagtttgtatcgagcaacctaattttcttttctacactggattagatagatccattagttataagcccagaatcacaatatatgccggtgtcgaattaagaaaagcaatcttggagtaatttaaccaagagcaagccagagtctctctcttgtctctaatctgtctgtgatatgaacctgaatctgtgcctgcctgaatgctgtcttgtaaatctctctctgtgtgtgtgtgtgtgtgtgtgtgtgtgtgtgtgtgaattactcatgggccagcggcatgggagaccatataataagattaaagccatgccttagcttaggctgtaaaggtttaatcacatgggggcaggagggctagagatagctcagtggttaagagccctgactgctcttccaaaggtcctgagttcaaatctcagcaaccacatggtggctcacaaccatctgtaatggaatccaatgtcttcttcgagtgtgtctgaagacagctccagtgtgtacttatataaataaaataaataaatcgttttttaaaaaaattcatcacatgggcaacccaaggtaggtgaggttgcttgtttgttgctgtcttaaagtgggttaaaaagacagggctaggaccacagtaggatagcagtgaccgcagggtatgttaactcagctgtgagttagcaaaagttccagtctcttagaatctatgagagcatttgtaaccaccccacttttctgactagaacaaggattttcaaagcccagtgccccatcaggaactgcgtgaggcttcccaggagcctgatttacctggtccctggtctctgtgaccatcagtggctactcagccatgcactctgatacagaggaaatagctccttgcaggttatgcctgtgtccctggcacaagtgtatgttcaggagaactcacagggtgtcttaaacctgttggagccaatccaatcattcattcattcactaaccatgcactcacccagtaagtagagtatatagtcactaaaataccctgtgacccctgactccctgtctttctaattctctgaccctggagaaccccgtttctcttgagcttcctagttctccactgagctccatacaaaggtcactacacctcccataaagccggctcccagagcctgaatccgctgcagctaaaaagcacagtggcctacaatagatctatgcagaatctaggagtagccaggggtgcgaaaatggaagcccaggtgtgtgaaaagggctccttgagaccaccaggactttctgctcaagatgggcagtgagtgtatagacatctagtacagagtccatctgatgtcccagacagagaagtgtgggcgtgatctgagagtgtagataatggtatgaagttcctggccttggaaatggggcaggaaaagcagaactcccgtaggagagagatgcagctgatagagcattttgtttctctgcaaatgctatgggtttttttcttgttgattgtttttataacagtcaaatcccaattcccttgcaggtcagcacagacacccccagcttaaggaagccagatctgaaaggccggagtgcactgttggctgatatccagcaaggaacacgcctgcggaaagtcacccagatcaatgaccgcagtgccccacagatcgagggtgagtgagcagctgcacggagcccaggacggggctgcatagagcatggtcagactcaaccctagctggtctgcatttgtgacccatgcactctcaaaccacctcggacctgcttcagggacaggccaccaggcgagagattcagacactcctctctgaaaggctaccggtggtagagcctacattatctttcattacttttaaataacaaaacaacaaaaccccctcataataagtatcatttttaaattgtgataaaatacacatagtaaatttcaccatttttaactgtcctattgagtgtcatcagatacatgcacaatgctattgcaatgtgaatgcaatatgaaaattgtgcaaatgaaaaaaaaacccttttacatttggtcaagattgcaaaacgttaacatgttatgtccaaaaacattttgtaatgcaaggtattattatgatttcacatatttcaaaatgatggcaattctcaaaaatagtcctatagctagtattgtacctcaactacatgttagggcacaaacacgcaattttacagagttatttttattctttttaattatgtgtatgtgtgcacatgtgtgcaagcatgtgcatacccacctgtgtgtatgtacatgtgagtacatgtgcctgcagaggccagagcactaccagatcttctgagactggtgttgcagcaggttataagctgccagtgtatgtgagctgctcacggagaactgagttcaggtcctctggaagagcagtgtatgctcttaacagctgagccatctctctagtcccaaagacaaatactttttttaaagatttattttatttattatatataagtacactgtaagctgtcttcagacacaccagaagaggttatcaggtctcattatagatgattgtgagccaccatgtggctgctgggatttgaactcatgacctctggaagagcagtcagtgctcttaaccgctgagccatctctccagccccaatgggcacgttttaaatgaaacctttccaacactgattataataaggctccatttctgattggactcattgtctaattggttaagctcagttagcagactgatgcctattattgtcccacctactgccaggagtaccgcatataatattccgagtaatctgaccgctcatccaacagtggacaccctgccctaactgcatgtgttagccttagcttgtgtcttagtgacttttctattgctattataaaacaccatgaccaagacaagttatagaaggaaaggtttacttgggtttacagttccagagggacgagaggctgtgctggcagagtagagacattgcggatggagctgggcgctgcaagttgagatctttagccacaatgaagaagcagagagcaactggaaacagccagagtctttaaactctcaaagcccatccccaatgatgtacttcctccaacaaagccatccccctcctaaacctttccaaacagtgccaccaactggggaccaagtattcagatgcctgagacctcattcaaacctggaattcttgtctacgttgatgtcttcagagtgtctatggttggtgaccaccatatatggaaggcagggtcactgatgacacgtgccaggacattctgacccacaaataaaaaaaatatgaagttaaaatgtcagagtgggttaagcttggatttttgtgggtggagagacgtctagacctttcaatgtcagttgagttttctaatttgagccacagatgctcagcaccttgataggactagactggttagcagacaggtttaggtatgagaacacacgcagtgaaaatggtggcattgggctagagtgggaaaggcctgctggctcttcctactcatcttcttgcctcttctctccaggttcaaaaggaaccagcaaagagggaggagctgctggcagcaatgccaggggaggaaacacaccccctgccctgggagatctctttgctggtggctttcctgtgttgagaccggcaggccagagagatgtgtcaggtaaggaagtgttgaacccagtggcctggtggtctttcttcatgtgggaaacatgattcataagaagttacatagcaccgggtggtggtggcacacacctttaatcccagcacttgggaggcagagacaggcggatttctgagttcgaggccagcctggtctacaaagtgagttccaggacagccagggctacagagaaaccctgtctcaaaaaaaaaaaaaaaaacaaaacaacaacaaaaaaagaagttacatagcaagaagatgtgcattcgagaactttaatcctggaagctccccaaatcccagatttgttctctgggaatctttttaaatatcatctatttaaattgcatcatcagaattggagaatgacttgtttagcaaaggtgtcatgttagacagagtgtcattcataacagacatgacagtgctgtggatccaccagcgtgtgctgagttctgatgaatctccatcgccgtatcagttagacactgctgtctagccaaaatgtaggagctttaaacgactgcttatttagactgtaattctgtctattaacaatctagggtggtcttgcctagtttccttagcatcttagcatccttagcaattccaacagctgagaattgaagaggtggcttacttcccctgtctccagggccctggcttagaacaactggactgatggtcctcagagccacatgatctgcaagtctgtaggatttgtcaccatgttgggtatcaaaagagagaagaaagatgtgcgtagtctctagagactgtcctgcaagtttgtcgggagctaacttagaagtctaccaagtgttacttcctgctccttcctctaggttagtcacagcaagggacaagcccagcagggacagggagtgaatttcacctcttgacagcacatgcaaaaatgacacaggagggcctgatttggtcactaagaccattagcaggccataacgttaatttatgcttcagtgagcgttcagttttttttaaaatcgttgtattaaaaattagccaaatacactgctactgtaagcggtagaaagggctgtcttaaagcggccttgtggctgctgcaggtgtgtgcagcctcacaatgggcctgcacagtctactgctcagcagcagggacatcactgtgagtcctgtgtaccgcccagtcacctggactttttccttcccacattgcaggtctaacctagaatgtatttcacttccaggtggcaagtccgggcagggccctggctcccgagcaccttctccccggctccctatcaaagccatcagcggcccgcttcccgctcctgcatctcccaggctaggcaatgcctcagagacgcacagctctgccaggcctgtccctcctcgccccagtgtgcctgccccaccacctccaacttcaacccnnnnnnnnnnnnnnnnnnnnccccacctccgcccctccccccagcctcccccatcaaagcccagttggtgtccccgcctgcccctccaaccaaggtgaatccatctgtggtgccacctcctctaccctgcgcacctcctcttccgccccctcccccgactccgcccccgctgcccccagcctcggcgctgagcgacaaggcagtgaggccccaactagccccactgcacctgccacccatcccacccccgctccctctccttccaccctgtgggtaccccgggctccactcagagcccaacagccctgcacaggaggtgcgagaacctccagttccgccaccgccaccacccccacctccgccaccaccgctccccacctatgcctcttgctcctcgaggaccgctgtggccccgccccctttgccaggcgcaaacaacagcggcagcgagactcctcccccgttgccccccaagtcccccagcttccagacgcagaaggccttgcccacacctccaggtgctcccggccctcaggctatcctgcagaagaagcggcgaggcccaggtaaagtagtttgcaaggctcctctgagccacgtgcacgcggtggcaaggttcaaacccagtctccggcaggacactaaaacctgacccgttttggggaccttactatttgtttcggaatggaagccactgttgagggaggctgggagccctatcttagattccacagacggtaccagacattctgaccttgatcctcttgccattccttagctgcgtgtcatggggtaaccacttagcctctcttggctttcttgtctgtcaaatagggtggcaggcagacgtatctctctcacagtatgaaggatgcttgacactggtctggttctggagagagctggctctggacctcctctctgggtcagatacagccagtttccagagctaggtgtctggtttagttacctgagtgacacctgtctggcacagtctgcattcttcagattctccagccaactgaagaaaacagacttgtgtattgagccaaagtaagaacacttccttcctagagaggactgtgagtgaagcacacactgtagaggagagaacatgcaagggctacatgtagcagagaccagtgcagccatactgctgtgcatgtatgcatacatgcagaaacactcagcacatgcccaggctgatgaacacacatctcttcacacaagtacactgatatacatatcactcacacattccagtccatctcccacacacatgctacttataccacatacacatacatgcacacatatacaggtccatccatcacatacacacacaatacaccacatacatatacatgtacacactccacatagcaaatatatatgtgcaccacacacatgcacgatacaacacatgaactgttagacacatatacatatatcacatgcacatgcataccacacatgtctgcacactacatacaaacaaatatacaggcacgtgggcagtttcttgggatctgtaggcacctgaattcaaatgctaggttcctcatccacccctgtgtaagggaggctgcttaaggggctgttttcaaaataatgccacctttcaagtggcattgctaatgagggccacctttcacatggcattgctaatgagggccacctttcacatggcattgctaatgagggccatctttcacatggcattgctaatgagggccacctttcacatggcattgctaatgagggcttgcatgtagcttgtagtgcatgatttacttcctagtcccttgtggagtcccatcctgaggagcagtgagccatggcagggtcaccaagggaaagggcagcaggagagcacccgtactgaggcgccagggtgtgagttagagatgccgcagcaggcagcaagcaaagcactgtagaggaaagagggaaccagggagactctcacctctgccaaccaagcagggaaaggtgtgaggaaggaggttggtgtgagatggaccctggcaggcaagacggttatacccaggctggatggagaagcaaggtttagagcatggggagaactagtgtgcgcagagtgtaggacaggaataccctccgaaagtcctccttctgacctcactgggcacttgcccatacgtcttcctttcagttctatccctctgcagtaggactgtgccatctgaccatgaggcttagtgcatcactggtagtatagtggcagctaaggctggcacatttcctgtatcgtgcactttaacttattaagtcttttcaaccactccagaaaatgcttgctgctattatgcccattgtatagatgaacaaactgaggtacaaagaggtatgtaacttgtgccagataaggaagctataacgccgtcagaaacaagttggctccagttatcctcttatttatcccacgtcgacacaggggctaaccacctaacctctcacataaagttaaatctactgtcccacttctgtatctcaatagctgccctcttctctgttaaggaaccagtgggggaaagctaaacccacctccagccccacctgcaagatcgcccaccacagagctttccagcaaaagccagcagcctggaggccagctgcggaatggaggccagcacgcgattggtaaggaccccacttgcagtgcagacttcctgccccccaaagacaggacaagagttccctgcccacccaagcagggcagagtgttgggcacctttccctgcggttcctgggatatatgtctctcagtgagcagtgaagagagaaacgaagaacagccttcgggatgtgtgaaatggggcttttccctccgtgtcatcaggatgggtctaggacccactctagctgtgtgactcagacagaggaagggaagacatccggcactaaaaccgtgcatgcacatttatgcacatcaccgtggagggtaaatctataagcctacaggaccacagtggcttggacaaagggaaggatgtgttgacttcttgacagacaggaggaagacttaaaaaaaaaaggaccctggaagaaagacatttagggtcctcagagcttccgcatcccttctgtgtgctcaactactgtcagatcagaaaggggactgtcagtcaagaagggggcagggccacttccctcctcaccagagccccagggcagaacccatttgctttgggaagcccagggttcacactgggcacagccaagctgtcctgtctcccccccccccaaagccctcctttaggaattcagtaggtactcttattgaacactagctagtaccaggttctttgttggttcctccccctgcctggagcccttttctgctccttcagtggctcccttaggtgggcggaggatctcgggcatggtggtggggaattactgcccttgcctctgctgcatccccttgtccagccaggaacacttgaaaagcaggtggactcttggagaaataactctgccatccaaacccttgcaggcaagcagcaagcagggtgtcctgccagagtgacctgtgtccctctgaaaacagccacacgtgggtcacacaggagtaatcttaagtaaactccaattcccatatttctcacacgtacagatgacttcgagtctaaattcacgttccactccatggaagactttccccctccagatgaatacaaaccatgtcagaagatttaccccagcaaggtccccagaagtaagtacttgctttaccaagaccctccacaatacagggtgcctgcagatagcaccatgcctttactgtccgctagcaaggatgctgagtgtgcccagtcccacaaccttaaggagatgtatttgtcctgatgcctaatggttcactgaaagatgtctatagaatgccagagttcactggcatcccctgggacatgctgaaatgagccatgcatccttccctccccagggcctttggctaggaggcacccagacaaccgagaaatgggacatgggctctttgcattcacagctggagaagaatttttcttaatgcataagagtgctgatggctatttatagccatctcagttaactggcacaaggtttgggatttggccattgagggacccatgtagggcagggtgccatggcagagtcagagatccctagggagaaagccatatttccccatgggcaggggaacatccaggtacaggagagcatgatagttgagatgtagttcacaatcctcagggctcagtgtgcctgccactggtgaagccatgcaggcagcctagggctcaaacttggcaaagtcaatcaatggcagctctgagcccgtgcttccagagccaccttgtaaagtgagcacggctctcagacagatgaacatttgagtgtcttcttcttaaagaaagacagggcagggctcagatgtcaatctgtttcaggggcaagttctcagtgacttgagacctcctaggccccacctcttaaaggccctaccacctccagtagcaccacaaggcctttaacatatggaccctcagagacattacaaatccaaactagaggcccatcagttcctcaccctggctaggctccaaggaattttaatgttcgaatgaaaccatggagtgtaaatatacatagcctactgactgataataatcaagagtcataaacagctagtgaactgatcaaaaagccgggtatagatgcactgtgagatacagtgcaactctaaaagagagtcagtgctgaggcatacaacctggatggacttcaaagcactgcgctcagtgaaaggaaccacgcccaagaccacattccaccaatatgaaatgccaaaaatgagcaagaccacagaggaggttagaacagtgcctgctaaggactggcgcatgggaaacgagagtgacaactggatggtctggggtttccttttagggtgatgaaagtcttctgcagccaggtactgaaagtgcagccagctacactttctgaatggatttgctgtggctttcgtatccactgggagaaaccagagatttagacctcactcaaatttagattaaataaatgtattctttgttgaggtttggtttattgttaggtacagtaatgccgccctagatctggttgccctaaagaagagatagtctacacgtggaccaaagtgactcaatgtgtgaccttgctctcaagttatttctgattggtagataaagatgcctacagccaatagctgggcaggcttgagaaaggttggtgttcctggccttggggttggaggagaccactcagagagaaagaaggtagagagaggagaaagacaccatgggttaggaagaaagcatggccctgagggccagccaattagagttaagagcagcccagatgaaacatagtaagtaataactcagggttgtcgataggtaaatagattatatattgatttaatagatcaatagcatagaggagatagctgcccagctccagtgctgattaaggcttattgtaaataataaaagctgtgtgtcttttctccgggaactgaatggtcaaaggcagggtagaagccctggattgggattaaatattcttttttacaattcttacagctgccttagagccaatacagcaagctgtacagaaggtggggttaaggttgggttttaaggtggatatcagaaaggcgtgtgttacagctatccgtggaatccatagctgggaggtgaaactgttttaattctttcagttgtttcttactttcccactataaagaaataaaaagagcatcctgtctcttttccgaagcagtaagcaggctatgcaaccgcaaaggcagctgctaatacgtcacagccctgcaggtcactgggatggcccaggcattccagggcaaaggtcaatggcccttaagggatgcctggctccataataagtttcttggtcaacacaggacctgggtaattatcactcaggtctgagcactctagcgacaggggtagcacagtgcggtcaggttagggctgtctgtctgtgttgatcaagcacacacacacaatctcactaacaacgaattttatcttactaatgtgtatacaagtgacaaaaacaaaacaaacaaaccgaaaaccttatcagttcgcattaaaaaaaaaaaaaacttagatcacaaatgcttattgtcactatagcaggaagaaaagccattgttatgtgaccaaatacttgcccaccaaatgctctcacccactagagagatttagactggtgagtgccacacctgcccacaagagccacaccatggtggaggttgggaggggaaacaccacacatgccatcttattcccatgtccccagtaaatccatcactgtcacttcagtgggaaagtggcggatttccaccagggctgtccttacaacccgatgtctccttttttaaaggcattttcaatcttgagaaaaataaaacatgtaacaccaagttttcagtgttggcccgatcagtgtgatcacactgctacgcaaccaaacttgaggacgagtctcgccttgcagaaccaagactccacacaccttaaggaattaatagccctaggcctcctcctacctgagcccctgacagccacccttcagtttttcccctatggttttgaacgctgtacatagctggtgtaggtagaagcatatgctatttgcttttttagtgctggttcatttcactttgcagaatatgccaaggttcacctgtgttagaatgtccttcctttaatagtctttgccagtagacatactggcagtgcgcatgtagtatccatcacacttcaattatccattcacccactgtcagacatttggattggacatccgaattctagggattgagaataatgcaacacgtgggtgttcagaggactcttcaggattatgttttcagttgatttccatatatataaatgatttccatatatatatcccaaagtacaatgatagggaacaaggaaattcggtttgtacttgatggaggagcgaccatgctgggttctatagcagtccaatcacttttcacctttaccatctgtgtgcagtggctcccatctttccacatcctcaccacaactgtcttcagattttagttaaattttcttcttctgtactgtcatagccactccagtgagtgcagtacatggatcactcttggccaactcttatgttagaggcactgttgatttgactagccaatgattcccatgagctgtagaacttcccccccacactgctataacaaacaacaccaaggggttcaatcaaaggcttggctgttccaggagtgtgaaaaagcacatggtcactggtcacgtctagttccacgtttgtggtgataatggggcaggacccttactgatccttagtgcagatgaccacacccttactggactggcttccagcagtccagggcttgccccacgatgctgccttttctggatacaccttactcctgagagaccgtctgtattctcctccactcaccaccctgggaagctctacgtcatctagctttgagatgtcccaggtatgagcttccccaccccctctcccatccttgctaagccacttagctgtctagcaggctttgctgcctcacactgcatctgagtcctctagagcccaagtccagccctgctgcctctgctaaccccccagggcatcccatcttgccccacatcagttaggcatttccatcataaccacaggacctgaaccttctgtctttctctttccatctctttcctccactttaattggtccagcaatagctgtctagagtgttccaagcgcatcctgcctttgttctttctttgctgttgttccttctgtatgagacgcttttccaggatgcccacatcactcccgcaccattttctctgcatcctcgagcttaacagacctatcttctcacagttatgaaagctgagaaatccaaggtccaggtactactcagctgactctgtttctaggtaggactcttccttctttgcagagggggccatcacctcaagggcacccctgctgccctgccgcaggctccatgtccaaacaccatcgcgttgagtgttaaaccttcagcacgtgagatttggagtcgattcaggctgtaagtaacttatcaaagaaggccctttcaaacaacagctctttctgcccaggtacctaaaagtttcttcctgtcatatcttgtctcccgctgagcttcctgctcacccttgcttcccgcctcagtccgctgtgaggcctgaatggcatggaactgcatcagctctatccactggcctatctctgcctcccagaatggagccaactgcacagtcagtaaagaatggttggattaaaaaaaatctttaaagtatctagtcatatgtacgttgctaatctaccatcagagtgaaagatttggaaatagtaccacgttccccagtcacatgctagaactcttgtggcctttaaaagagtatattgaatattcagtgacattataattgtcatgttgctatgtcagtaaaaacagcccaagcaagactacacaaaaagaataataaaacactttataaaaatgtacggaaccttgtattatatagtaatggagaatttgagtgtagaagtgcacaaaaaggttaaatgtggggaaattctgcatggctttcattatttctttactattctgcccagatttgtataataaatgtatattgaatgtataaaaatatattgttcaatatacaaaatacaaattgtataaaatgtatattgaatgtataaaagatgtatattgttcactttcctgccaaggtgaaagcagtattggcccctggctgacaggtctgatctgcataggagccaacttttcccaaataaagttagcacttcacagtgcttgctctccaaggctggtgtcagcacatctaagactctgccttaatggccatccaagtttgtaaaccctttctgcaccctgcccaagtcctacctagccatcctcctgttgcctgtaaatggattttactgctagtatgaaagtcaggctgtgcttagaaaaggtaacaaggcacccctggtttccacatgacaaaacgttaggctagaagctgtcaggggctcagtggtccaagcacagccaatcctgaagcccatggtccctctgccttttacccacagccatgcccatgactgagacagaagttgtcagtatatggctctctgcacaacagagaaatgagatgagggagagggagcaaagtgcatttatttcatatcatgagctatagaagcaaatgtggaaactgtcatcccacaggatgcaagtctctgcccatctgtgcggagacagcaggtggcaggtgctgtttacagagtgaccccagagaggctagtggcccctcagaggggaaagtccccctaagctgctctgactacccccaaggatgtctcagccactcacaacagcagtcaagtttttcttgcaaccagacatggagtttgccctcctttttctcagagaaactagtttccctccagcgtatgcgttctgatcggcttgtggaagctgatggaaactgcctacccatgaagcctatgttaccacacgttagttttcagatgtgggcagatgttgtttccagaggccattgttcccagagtcctttgtggtggttaccaataggccagcgcttaggcaaggcactgagtaacgctgcagatgtcacaagtgccccacagtgcaaggtcacacccacaggggatttccatcgcactaaaatgttagtaacagcctgtccatgaagtctatgcccagtgagaggtttgtctgaggcaggcagaccatccgtaaggctaaagagaccgcaatctgcaaggcttctctcctgtggaggtataccagggctgcatgtcagcgtcttggtactttttactcaaactagctgagaagctaacactctctctgtgatttgctccaaaacatctttgttcttgaacaaaggcagcccttggtttggatcttgattagtgttttgtgggtttcagggcactttgtgatagttcactgaaaattgtgccttacctgcgagactgttatgatgccaaatatgttaagactgtagaaagcttcaaaggtgttggagacttttaaaataataattctaacacccgagagggaaacttgcttcttagggatttttgtggattttaaaagcctggattttttagtcatacgatttcacccccaaaatcatcttcatgaacattcaagccactgcttgctgtgcccagcacccggaaccttttgtcagagacggttctcagtaaccaggctgctttttaagtggcacagaaatgcagattatagggtgcattgtgagacatggctgtggaatcccttgttcccaccagcagcaagacaagggacaggggggagggatttccagccagacacctcaggggaaaagacaccaggacatgaggtccggaagctctgactgaagggaaatttggggagcacctggagatgtgactttaaaactcgagtaaatcatcttaaaataaaaaaatcagattttttttgttgtggtggtgacgctgggacaggagactggaattgaatgtggaacacgcagggttctttgctatgacattctgtcatatgtaacttatacaacactggagcccaatacgtcttggggacatcttgttggagcttcattaaatggaagcctgaattgtgtcagccgatagtaattgttctccattttagcagaccctgcacagtgcttggcttgtctcaatggcagacagagaagtgtgcccagaggcctggtacatgccagtcaggaaggccttctcacacgtcactgcctgcggctccctgagcccacagtgggtgacacagaggacgggtggaaacacacagcccagggccagaaggcagaaggtttcaggttgggctcatgttgcctggagatctgagtgcgggtttagcagaagtgcctccaccgggtacagtggccctaggccaatagatggtgagatcactcttgtttctctcaggccgcacacctggttcctggctccaagctgaggcggctgggcagagctctgatgacatcaaaagcagaaactctcag

SEQ ID NO: 314 - DNA, 1387 bp, Mus musculus
cctccaccccctccaccactaggggctccaccccctccaccacttggggcgccaccccctccacccccaccagggcctccggtcagcacagacacccccagcttaaggaagccagatctgaaaggccggagtgcactgttggctgatatccagcaaggaacacgcctgcggaaagtcacccagatcaatgaccgcagtgccccacagatcgagggttcaaaaggaaccagcaaagagggaggagctgctggcagcaatgccaggggaggaaacacaccccctgccctgggagatctctttgctggtggctttcctgtgttgagaccggcaggccagagagatgtgtcaggtggcaagtccgggcagggccctggctcccgagcaccttctccccggctccctatcaaagccatcagcggcccgcttcccgctcctgcatctcccaggctaggcaatgcctcagagacgcacagctctgccaggcctgtccctcctcgccccagtgtgcctgccccaccacctccaacttcaacccccccacctccgcccctccccccagcctcccccatcaaagcccagttggtgtccccgcctgcccctccaaccaaggtgaatccatctgtggtgccacctcctctaccctgcgcacctcctcttccgccccctcccccgactccgcccccgctgcccccagcctcggcgctgagcgacaaggcagtgaggccccaactagccccactgcacctgccacccatcccacccccgctccctctccttccaccctgtgggtaccccgggctccactcagagcccaacagccctgcacaggaggtgcgagaacctccagttccgccaccgccaccacccccacctccgccaccaccgctccccacctatgcctcttgctcctcgaggaccgctgtggccccgccccctttgccaggcgcaaacaacagcggcagcgagactcctcccccgttgccccccaagtcccccagcttccagacgcagaaggccttgcccacacctccaggtgctcccggccctcaggctatcctgcagaagaagcggcgaggcccaggaaccagtgggggaaagctaaacccacctccagccccacctgcaagatcgcccaccacagagctttccagcaaaagccagcagcctggaggccagctgcggaatggaggccagcacgcgattgatgacttcgagtctaaattcacgttccactccatggaagactttccccctccagatgaatacaaaccatgtcagaagatttaccccagcaaggtccccagaagtaagccgcacacctggttcctggctccaagctgaggcggctgggcagagctctgatgacatcaaaagcagaaactctcag

SEQ ID NO: 315 - protein, 440 aa, Mus musculus
PPPPPPLGAPPPPPLGAPPPPPPPGPPVSTDTPSLRKPDLKGRSALLADIQQGTRLRKVTQINDRSAPQIEGSKGTSKEGGAAGSNRGNTPPALGDLFAGGFPVLRPAGQRDVSGGKSGQGPGSRAPSPRLPIKAISGPLPAPDRLGNASETHSSARPVPPRPSVPAPPPPTSTPPPPPLPPDIKAQLVSPPAPPTKVNPSVVPPPLPCAPPLPPPPPTPPPLPPASALSDKAVRPQLAPLHLPPIPPPLPLLPPCGYPGLHSEPNSPAQEVREPPVPPPPPPPPPPPPLPTYASCSSRTAVAPPPLPGANNSGSETPPPLPPKSPSFQTQKALPTPPGAPGPQAILQKKRRGPGTSGGKLNPPPAPPARSPTTELSSKSQQPGGQLRNGGQHAIDDFESKFTFHSMEDFPPPDEYKPCQKIYPSKVPRSKPHTWFLAPS

SEQ ID NO: 316 - DNA, 130480 bp, Homo sapiens
cagttacaatgtcatgctctaagtgcttaagaacaaaggggatgaggatgttaaatattgagaaatggagccctggtcttccttgagggttcagaaagctttctcagaataggtgagtgttgatactgaaggataagatgttcaccgggaaataaggagggaaaaggtataccaggacaagaagtggctttgaggaaggcagagtcaggtgaatgtgaggggctccgagccctctgggacagcagcagcacagtgtggttgtggggtggcagagtcagaagatgagatgaagccaatcttgggggtctttgtagatgatactaagttacttaggctttatcttaagctcaaaagagagtggttgaggaactctaagcaggtgagttagatgattaaaattttgctttagaaagattattatggcttcagggtggagaagagttaggaggagggaacacagcattggagcccataacatcatgttgcagatgacagcaatagaccaggcctgagctaaagcagtggctccaggggccaacagggaaaggtgtctgggaggcagaaggtcaatggttttgtgatggattagatggtggtggtagaaatcaaggagaagactaggatgacccaggttcctcacttgagagaatcagtgagtgtcagtgctattaccacaaacaagccagaaagagaacagaatcctctaaaaagagcttccattaggacaggatagctcttaccaggatggagggtgcagggggcacgactaagctgaaatgttcatgagtcatttgtccagtcacacattcaataaaggtgccttgcaacaagccctgtgctggcagtgagatgaccatcctgtggcatggtggcaagacagtaggattcatctccattcacagctctgctcctcaccagccctgggactgttgtcagcccattcacttctaagcccccatttcatcatctcaaatagagtgactgaggcctccacttgtgatgatgatcgttatgacaatggaggggaaagcccttagaaaactgtcaattactgtaaaccaaatggccatttccaccacgaagctgagagcagagtttgccttgtgaataatggaccatactggcaaagaagagacaagagaagactggtgaagaaaagcaatcttagcagtgcaacaggcttggagagaagtagggagtggcctcaggaggcgcaccaccccttgttcctacattgcagtgacagtcctttgtattcacagtgtgcaaaaaggtggcccttgtgtagacaaagggaagtactccgaaataacaggctggaggttgcaaggtgagaatagttggcagttacagtccttattttaaataataattatttttcagtaggtgtttttggagtgcagattaattaaaaatacgatacggtaaaacaggtagtttcttttatttctgtggcccttcatagtaaaatgcagtgtttgcactttaaagaatttcatagaattcacctctaggtattctgatagtgattttgaggcacagcagaaatgactgcacctgccttgcacctcaaacaactaagatttaaggatctaacaaactactgaaagatgaaaatcacacagccagttggcaatgtggatatagacaaaccagcttggatctatgtcttttgtctccaagatccaggctttctatactactttatgttatttacttggaaggatcaaaggtcttaaaaatattgtaaaatattctttagcaaagctcttctcagtttctcaaagaacaggtttaagaaggaatttcagagaatgccttgctccatttacaattctcttgctttcctaaatcttgaaacttttttctgtcttggatctttttttcttaccgtacaacatgttagagtctcgactttctctagattcttgctcctcttctagacatggccctgtctctctgtttctcttctaggtcaaggtttttgaaaaatacactcgaagtgtggtttctacttcctcaggtacttcccatatctcagcccagtaagatcagccttctgagtggcctactgcactgaccttgcaaataccaaggtcactgatgacttccctttgtcacgtgttttggccgctgaatgtgacttccgtgtagcatgacactaccagccatgtcttctctccccttggtttctgtgtcctcactctcctgggctctttcctctctctcttgcccctctctcccacctgccctgtggattgtttcctctttctctgcctgttcagtaaagccctgtattctccacacgccttgactatcctctcttctcactccaaaaaatgaagaaagtagatctcagccttttgtgtttgcaacacattttggagcaggagaaattttggaggcagcctgatgggattaaaatgcatccacagctatattgaactatcgccaccctggttgccttttggcacagtgtgggtgtttgaatagaacttcctgctctcttttatgtactcttcttgtgaagtcaagtttctcaacccaggaatctgcacggccctggcctgatgttaagtgatggagtgccatgcctcttaacttttcctcatggcaaggtggagcttcctctctgcacagagacttgcacagaaggctcagggctacatttgagctgacagacatgcccaccctcagttgtagtgcatgaaggaatagcttttacagagggtgggaaacactgccccagcctctcacacccctctaaggctttatcttttagaattattgtggtaaaatatacataacataaaatttatttatgtatttatttttgagacaaggtcttgctctgtcgcccaggctggagtgcagtggtgtgatctcagctcactgcaacctccactttccaggctcaaacaatcctcccacctcagccttcaaagcacttgggactacaggcatgctgctatacacacttgtatcacacttggctaatcaaaaaaaaaaaatttgtagagacaagatctcactatattgtccaggctggtctcaaactcccaggctcaagcaatcctgctgccttggcctcccaaagtgctgggattaacaggcgttagctgccacgcccagcctaactattattttttgaaagatgaagtcttgctctgttgcccgagctggagtacagctgtgccgtcatagctcactgcagcctcaaatgcctccgttcaaacgatccttccacctcagtctcctgagtagctgggactgcaggcacacgccactatgcctgactaattttcttttgtagagaatgggtctcggtatgttgcccaggctggtcttgaacccctggcctcaagaaatcttccttctttggtctcctcaggtgcttggattacagacatgagccacagcacctggtctcaaatttaatctttaaaccatgtttaactgtacagttcagtggcattgcatacattcacaactttgtgcaaatatagccattacctagttccagaacattcttatccccctcaatagaaatcctgtagccattaagcaatccctccccacttttctttccccaacccctggcaaccaccaatctgctttctgtctctatgaatttccctattctgtatatttcatatacatagaattacataatatgtggtcttttgtgtctgtttctttcagttagcatattttcaaggttcatccatgctgtggcatgtatcagtacttcatttttttcattgctgaataatattccattgtatggatatatcccattttgtttatccagtcacctgttgatggaaatttggattgtgttcatcttttggctattacgagtagtgttactatgaacattcatatacaagtttttatttaaattcctgtgttcaaatcttttgggtacatgcctaggagtggaatttctgggtcctatggaagttctatgtttaactttttgaggaactgccaaactattttccacagcagctgtaccattttatattctccccagtaatgtatgaggattccaacttctccacattctcgccaacactttcaaaaattatggccatcttagtgggtgtgaagtagtatctcagtgtggttctaaggttttatctttgttttaaatgttaatgattcttaaaactatattcctaagtatttaccatggagaaataaaagcatttatctgcaaaaggacttgtacacaaatattcaaagcaccttcatttgtaatatcaaaaaaaactagaaacaaactaagtgtccaccaaaaggtaaatggattaaacaaatactggcatatccatacaatgaaataccaatcagcagtaaaaaggaataaactacatataacacataactcatgggtgaatcacataggctgagtgaaagaagtcaggacaaaatagttcttcatgtatgattctagtacacaaagctccagaaaagacaaaactaatccacagtaatagctccgtggttgtgatactgacaggaggcagggaggtactggataaaagagggcagttccccagcaaaggccccaccctcaagcctggaaacctgcggccctaaatgggaatagacattcctggttttgtgcccaaatgttgccttctggcctgccacatcattctatcctgtacccatataaaccccaaaccccatgagcaaaagagcagaggagcaaaagagcggcagagcagagcagcaaaggagataagaggagggtctgaccatcgagaggagttcagctggggacggtcggagaggagatcggctgcaggacggccaaactccatggttgatcatcttcacactccattccctttccagctccatccatcccaccaagagccactcccatccagcaataaaatcccccacatttactgtccctcaatttgtccatgtgacctgattcttcctggatgctgggcaaaaacctgggtaccaagagggtactgagctggttaacacttaggccatctgcagacagcagagctaaaagagcactgtaatatgcccactggggctttaggagtcacaggcatccacccctagatgctactatgggcccagagcccaaaagcacttgccctggctcctgcacctgcccatctgctccccatcccataagaagtttgagtgtgcagtggccaaacaaatgagccacacccctgcctcacatcccacaagggggtcagggagctctctcatttcagttgcatggggctgggcatagggactgactgcaaagggggataagataactttcttggagatggaatagtctataccttgataaaggtggtggttatatcagagtaaacatttgtcagcattcattaaactgttcacttaaaaggagtgcgttttattgtatgacattatcccttagtaaagttgatataaactttttttgagaaacgttacaaaccctcagatatgtagctccagtccccaaccctaatttattcatttctttcagaactcaacaaatgtgtattgagtacctactatgtgctagcctctgtgctgtgagataaggatacaaaggtgacagagatggttcctgaggtcatgaataccacagtctagcctggaggacaaatgttacatcattaaacagatattgtcatcatacaactgtaataaatgcacaaaagaaaggtacatgaggttttgagagcttatagaagagggtgacctagctgagattcagataagttgtggcaaggtttagttgagatctgaaagatggagaggagttgacacttggggtcttcttcacaaagagggaagagcacattcaaaaagcctgtgacacgaaggaatattgctgtcgaaggatctgaaagcagggcaacatggctggaggacagagatggaggggaggactgagaaaggtgcgttggagagtgggtcaggccaggtcatgagggccttcagacaaagctcgggatcttggttttatcatcagagcaatgagaattcattgaactacagataatgtgaattgataagatcagctttgggtttcaagacgctctccccggccacactggggagaatgctttagaagagagaagtggcatatgattacagagggaaaagctaacaggttcctgggaaagtcctggagagaggtgatgatgggctctagtctcagctggtggtacagatgggcaaaattggacagattcaacaggctcaacctcaaggagggttgatgggggaaaagtagctttacaaaatttctgggtggtccaactagatggcggggggtggggggcattgggggatgggcaacagagtgggtcaggtttggaaggaagacctgaagtgtggttccagacctgtagcatttgaggctcctaaaccaccaagctctttcagactttcttttccctgaaatgccctcccttccccactttctgacaggagaaactccattcattaatggatgcccaactcaggtcttgcaggctccctccttttctacagatagttcatcatttcttctcctgtatcagctctctctacagcacaagctcctctcctacccaaaattgcaatattctcttcacaagctgtgttctctactaagctgttggcttcctggggggcagggctgtgaattcatctttgcacccctagcaccagtgcagtatcaccagaaaatagctgatctgtacatatttgagagattgaagtgagcacatgtgtacaaaacacttaatatttctggagtgcctttctcctgaagagctcaagaagttacagaacagatataaatatatgtttgcaagtggaaggtgtgaaaggtgagctattgcagacacttggtgagtgatgagaagaaaagaggaggtttttgctctttaccaggtcatagtataagttaggaatacatttggctgcaaaattagaaaacgaattctcagaggctgaaacaaacatgggttatttttctcacataggatatagtccatccagaggtggacagttgcacactttggctcaagtgcgcagtgataccacactgactctatttcccagtgtgttgtcccaattatattgaccttttggcctcacagtctttggctcttgattgcaatctggttgtagcattactaggcatttcatttgcattcaaatcataaagaaagtgggaaatgggctgggcgcggtggctcacgcctataatcccaacactttgggaagccaaggtgggcagatcacctgaggtcaggagttcgagaccagcctggccaacatggtgaaaccccgcctctactaaaaatacaaaaattacctgggcatggtggcaagcgcctgtaatcccagctactcaggaggctgaggcaggagaatctcttgaaccccgtaggcggaggttgcagcgggccaagatggtgccattgtactccagcctgggcagcaagagcaaaactctgtctaaaaaaaaaaaaagaaaaaagaaaagagggaaaaggaaagacagaaccagaaaaaatttttcagaggctcccccaccagacccttctttcaactcattggctagaactgggtcaatgacttccttagctgtaagaaagactgggaaatcaggaaggggattgtcatggtcgtcttggatcaatcataatcctgggttctgtcactaaggaagaagtggagaatagattgataattgggaagacaattcacagtgtctgccactgaacaagtaccatctactaggaagagctagtgccttcttgaagtcaatttgtcttagtggagctaggtggaaatgaatccctccctaatgtccgtaggaacaagatgctaatggtattgttacttcacatggatagaaaacactgatcacctgaatggaatgcctcttgaagctttcagccccaaatgtccaaattgattcctcactcaccacctccccatccctacaaccaggcattttaaaaaacaaattctttgatccaatccagcatctcttgagataaataacaggctttccatccaactggctcatgcttgggctgctcaggagatctgatgggaactctctaggcccatggcaatgtcttctctaatagtttgacttttcttcctttttgaattagaatactagtggttatgtatttagtgagcttgagcactggaggtccagagaaggagagtggctgggtcatgttttggggttttgggttttgtttttgttttagtaacaatcacccatgtaagagggcttatgaattttatgttggagaactgttcttcaggttccatacctgtggtcatctattatgattctaaaggaggaaagggcaagaggaactcaggacaaacaggtggaaagcaagtgcctcatcagcttccactcactacacatagacctttcgtcacctaaatcaaaagagaaaaccatgttcttgacgacactggagtgaaagacatcaaaagtgtattattaatccttgctttcgacacattgcccagctacaaacatgagtaattaagagatcagctaagggctgcttggggaacatactttgacagcagccactacagaacttgaacctgaatacaggctgcaatccacgtgtgagatcttccctgctggcattggctgctccctcacctgggtccccaacatttcacacaagcctcagcacagcgctgagcgccaggtttctcctctattccagaccagcagcaactttagagttagacaccttgccctgaggccctgcagagtgtctggctcatggcagatactcaaacaccgaggctgagtgaacagtccacgagtacccgcttagctcctccactagcaggaatgcccaggacatgggcaatacagaatcctcacccaatgatctcagcacctacagcaatgcattcagcctcggacacaaactttctgcatcctccaagggcctgaacaagaaatgtgacagaagcaaggttttccgttcttcaagcttatttcaggtttgtttttgtttgtttctttgtttggtttggtttggttttttgagacagggtctcactctatcgcccaggctggagtgcagtggttcattgcaacttttgcctcctgggttcaagagatccttccacctcagcctcccgagtagctaggactagagagcgccaccacacccggctaacttttgtattttttggtagagacagggcttcaccatgttggccaggctagtaactcctgacctcaagtgatccgtccacctcggcctcccaaagtccttggattccaggcttgagccaccgcgcccggccctatttcagttttcagtctgctttctcctcccttcgactctacctgggacatcaatctacctccccaggctacccggataattctctcatcacctggctaattcacactcagtcttcagtttttctcgtcgacgtcggctcctcaagaagccctccctgacctactccccaccccaagtttagatcaggtgctccctctgggagccggctcaggaggcctctgcctcctcttggttgtgctgtaatcgcccattggtcgctttccttttctagactgtgaactccacgagggcaagaggtaatcttgttctctcgtccccatcgcttatgacaccgcctggagcttagtaagggctcaacattttggaataaattcaaggagtggcgtgtccccagagtagctgtgctgggccgtgtgccgcccgcgcaacagctcctatttggggaattccagccttaggcctcagtctctccgcagctgagacttgggactctgtacccgggaggcgcgcccgccgacttgggacccgcctccagggtcccagagcgaccccgcccgccggggccgtgtccctgccgcggggcggcggcggctcccaggcaggagcctgcgagcaggtgggggcggcggccccgcctccgcgtcccggcagcaccagagccggtggccggggagcgagccgggcgcaccgagcgcagctcggcggtagcggcgccgcttggagcacgggcgctgcgggacggagcccggagccggaggcggcggcggcggagacgtcggccggagctcgagtccagtccagcccccggctccgccacctgcaggtagcggcttcccgcgcgggtgcgggtcggtgcccgagggtggaaggaacgggcggtgtggcggccgccgccctggtcggtcccggagcagagtggcccggcccgggacagagatcctgagggcgtgggagggccggggaacccccgccgggctgcagccccgggcccaggaggttgtcgacgtgccgcgcggcgctcacgccccccacccgcaccctgccacgccgccccggccgggccgggccgggccgggcggaaacaaaccgcggggtggggagcgaggtcaccacggggttgcttggtgacttctccggactggactccccggtgagcagcccctggcaccgaggccgcctcggcctggtccttcgcgacgctctctcttctccgcttcgcccccggaacaaaaggctggggtctcgctggggagggggctgtcgcgggaagggctggggcggagtaaaagagagctaggaaattgcagagccggaggtggcttggggaatacagaaggagccccctagtgaggaagccaactccagagatgtgaagtgacttgtccaaggtcacacagctcatggggacagagcgcaggtctctggacacccctcccgtgctcatctccaagcccctggggtcagtagtcagactgtgctccagcaatgtacatttggccacaaatgggtttagggtcctttggaggattaggtggtgggtaggtaggtggcagagcagatttcccccagcccctgacacgcactctctgaaggtggcggggagggcgggcacccggccgccctggacctggaggagcgccgcccgggccccgtgggcaggcaggcaccggctctcaggaacagcgcctttggagggtggcgtgccagccgcgtgggtgtgcccgtggcgggcgccggggcggcgtggggaccgtgtgtgcgcctccctctggaaagaagtttctgcagggaaaggccaggagagcggttccatgcgccctgggacagtgtggccaatccctgacactcagggcgctttgtaactggctgtattggggaggaaagttactctgtagcaggaagttaggctgtctcttcgcctctgtgcctggggtccttggctgtaaatgagggccttgtttggcatgaccagtgtgatttagaaggtttgtgcccctccgcctcctcctttccagaatcttttctcacttcacagggaggactgggagtgcacttcttgtgcccagcattaatagttatcactgggactcctgcctcccttcaattttttttaactttatcattacgaaagaggtcagaggagaggttgtttttgggccttgcaaggagataaactccaggtcaatacctggacaggacatgagggaggcttctgggatgctagaaatgcttctcaccttgacctaagaattactgaagttatacccttgagacttgtgcacttaacgtaaattctacctcagtgaaaaagtaaataaaaatgtgatgctaaagtccactcattgtggtaacacacagattgctgcagttttccagctaatgcatttcaaagatacatttaaaaaccacaaaaaccaaatcagaaaagaagtggcgaggaggggcaaaagaaagttaagaagtaactggaaatgaaacatacactgcagatgcctttatgtgcatcacctcctgtgattcgcagcaattctttaacagagatattgttattgtgccttttttacagatgagaaaataaaaggtcacagaggttaaattacttactcagggtaacagcctgggcacacagacttcaaattctagacaggcaaccttcaacaggcaatttgtggccacctgaatcggggcagagcggtcagggtgacagacacttgtaggctggcttcctgccattgccccctttttgttcctttaggagtctctgttttcacgtaattgtgagtgtgacattgtgtcacagattgcagttacccagcagcagaaggaatggaggaagtgtgtgtgtgtgtgtgtgtgtgtgtctaagaacatacagttataagaacaggggaaagccagctggtctagcctggcaacgctctttttaggagacttattgttcagaaaccatatagtacaggttgcgagtttgcagtcactccaacacatacacaaagaataaagaatataacctaggaaagatccgagaaaacaaaatgtgattaacagtagagggaaacatagaattttcaccaggatggcagtcaacttttttacattctagaatttataaatatgtttattaatgttgaagtttttaaaaaagaaacctacacaaataactcagcaaaaggaaggaaatgtgttttctagcaaatgtgttataaatatttaatatatatgaactttggtgcagaaatatttgaaacattagggtacagtagccttaaatctacggagaaatcctgagaactttgtcctgatgtgtggtcttctagtgattttatttttctgcctaatattccgaacttaaagaggtagaaacgtctttgttttaccaccagtttcaagttgcagagttgaatgtttgtcttaggaagttttggtgtaaagaacgtgggttaaggggagcaatttagaaatagctctgggtgagtcccctcagcccagtgccatcgagcatggttctgcatcacaaagttatctttaggcaagtttgccttgtcacagtggtgcttctgccatctggctgctggaatatttagaaaagaatcgtaatgtttgactgactttgccgacagcatgacaaaacaaacttcgaggggaactattaaatatgagttagggttggtgagaaagtgattaattgctttttatttagccactgtacaaaaccgaagaggcatgcctttccccagccgatgctgggcaggggcagcacacgtgttttctcactggcttcagccagtagggcacttgaaactccccttttgcaattctagctgcgtctttccttagacctgttcaagagggaacccgaccattatgcagcaggggaattgtgtagtgaactgcggtgttcaagtgccaaggaggtaaactaaagcagagtaaacgtgacaaaaatgcccagcgggcattatgtgggccaggcactgtggaggaagattttcaagtgcatcttgaaggaatgttcatcctatgtgggtggtgttttccagctaacaccgcatctaggatggtggcatccaggagagagtgccaggcctgcgcatggactgtgagagtcagctcttggttagctaggaggaggcagtagccagtctcagtgcttgagtttctgaggacgtgtgtctgtgtgagtgcacatgtgtgtctgagcaaggtgcccaggttgccatccactgttccttaagagctaatgactagctagccctgcccggggctaggctaagagctttatatgtaggacatcactacagcagccctatagggagctgattcttcatactcctttatcaaaggggagacagaagccgaaggctgacttactctcagaatgatcatgttgcaccctgctgtggtcttttatcaacccgctcataaccccaaggtgtccccaacctacctgactctctcttattgcacctgagctcctggaaggcaggaactgtgttcatctccattcccagcatagcacccgccccatgcctggcaagtgaggggtactccctaaaggttgttgaatgaattaaaggactgtgtaagtggaggaatcagtaattgtgtgagtgaatgaatgaatgaatgaatgaatgaatgaatatctggaagtatgttccaagatcaaaagacaattatttgttgtgttttatctgttgttttaactttcactgtctcattcccttttgttaatatggctccatcaggcataactgtatggatgagatttccaatagttatctcctttagggctcagcctataaaatcaaaaagcctctgcttctttaagaaattatttattcttttgtataacttatgtaagtcagaatccctggactattttgcatgaatcttacatgcatcatttatttgctgtatgatcttggacaaattacttaacctctctgtgttttggttttctcatctagaaaatgaggataataatagtatttatctcatgtttaaggctaataagatagatttattctgtttttttgttttttgatagggtcttgctctgttgcccaagctggagtgcagtggtttgatcacagctcactactgcctccaactcccacactcaagtgatcctcccacctcagcctcctgaggaattggaactacaggcacgtgccaccatgcccggctaatttttttttattttttgtagagacaggatctgactatactgcccaggctggtctcaaactcctggatttaagcgatcctcctgcctcagcctcccaaagtgctgggattacagacatgatctgccttgcccagccataagatagatttggtacttaggacagtgcctcattcatagcaatgttcagtcaattagccattatgatgatgatgatgatgatgatgatgatctgatgcttttaaaaattgtttgccttaaatgttccgtgttccataaagtgttcaaggagtttacaaaaatagcaaacaacataaaattaatagataatgaaactgaggtaaagggaacacacgggttagaaagtgagataaaatcagaggtaatttacagaaccagaatagatcataagttgtggatagtttccagaggtgggagtaaaaatttgccagagcttcccagcagccaaaacaaaaaagaaaacataaatagttacctgatccacagtgaccatgagataaaaacagattggttacacagcttttcctggtcctgaaacctgggataactttctcctggcaggtgttcaatgcactcactgttgccatagagacctaagtcttcaacatcatccctgccataaagacaatggaagtgctgtggtagaaggcaaaagtaagtgtttcctagaactttattgactgcagttccggagacataatcccacacagctcagtaaaagctctttgcagggccaaaatgctgtggttcagggacattctgtattcttagctatgcttactgagtgcctggaagagccagagccttccttccaaagattgtaattcttatgagagtcaggtagtgaacagtctcatctttaagaactttggctctggctgaagccatttaaatgagccaaatcagtttacctcatccaggaaaagtccaaagggtgtcattgtgcacatgtgctcattaacagatgattatgtatttatgaattttcttaataccagcagtccataatttccctttagctgaaaatttttattacctacttggaaaaagaaaaatccagtgctagaaagcataaatattttattttttaaacattttttattattgaaataatagtgctcatgtcttttaagctccccactcccgtatatatatccagatgtgaattgtagcagctgccaaagtaaacaaaaccaaaccagtgcacacacccaaatctggcttacatggatttgtttatttgtcttgtggaattagactcctaagaaaggcagtctggggcctgtgcaggagctatctgagaccagtatccatccatcttcctgcttcaccacacttagcctataggacttcatcctaaatctggttgcctcatgatgacgatatggctgcagtatctctaggcttccatctgcagtctaggcaagaagacaaggaaggtgcaaatagataaaggaattaatgtccttctattagtgaggttttacctttttattcaggaagtgatgcactccctaggacttccacctgcatctcattggccagaacagtgtcacagggttgttctaaatatattagagtctgataaatcaaatatttttagctgggtaaattgcaaccccatcactcaaattagggcttctgctgtgaggaagaagagggaatggttattgagtaggcagctagcagtatcagccacctgactgacttccattattagccatgtgtctgacttaattagaaattacagaaggtgactcagtaattttaaatgttgtactcttctagatcttcatggaattagtgttagagaatgaaatgcacccaactgcctgtgtaaagattcctaaatcgctattgtcagccttgcttcttctctaaatttcagatctgaatttccatttgccaaaagcacctcaaactcaaaatgtttcgaattaaaatctattctctctgctcattgaccaccgcttcccactctctcctccgtctcgtttaacactacattgtcttgaccaccaaggacccaaggggtcaccccaggctctttcttcttccccatcccagacatccaatctgatttcctccttggctctatcccattgccattactctgatttaaataaatacccatccttactcatgtgggtccccaaattgatatacctgtttgctccttcctctccctacaattcagtttccacacatagccccacggtgctgtttttagaacacagatgtctaacaacatctttcctctctttaaaaacctacaaaataaggtccaaaagcccagcatttgacagcctggcattgtgagcttcctgccacaacccccaagccacagcacccatgcactcacacagggcaggactctgctcatacccgcccctgcttcagtcatggaagacctggctcagacatttctttctgacactttacttgtccgtaacttatggcacaattaagtaaattttcatgtatgcttccaaactattttatatttctattcatattttttgccctggattcttttttcctgatattaataatgctacagcagtttttttcttaaaaatcagttttattgagctataattcacataccataagattcagctttttaaaatacacaatttcagtggtttttagaattttcacagttgtgcaaccatcgccattatttaattccagacattttcatcaccccaagaagaaacccgttaatagtcgcttctcatctccctcccctcaatccttgacaaccactaatctattttttatttctatagatatttgctataaacggaatcttacaatatgtggcctttttggtaagagaattttttttttttttgagacagggtttcgctctgtcacccagactggagtccagtggtgctatcccagctcactgcagcctcgaccacccaggcacaggtgatcctcctgccttagcctcccaggtagctgggactacaggcgcgtgccatgacacccagctaatttttgtatttttagtagagatggggttttgccatgttggccaggctggtctcgaactcctaggcaagcgatctgtctgcctccacctcccaaaataaatgtaataacctgcttacggttattatgattactcatatattggaacttattttgtgtttttttgtataccctgtgctttattattacttctttttttcccttccttttctgccttctacaaaagtgcctggcacatagtaaccttcagtaagtgttacaagctatcatttgtgggcaggaaccatgtagctatggatttatttatccatcaaacatttattgattacctgctactcgtgtttatagttttgttgcatggctagcttagtgtctaacagatagaagaagctcagtacatatttgctgcattgcatggactgtgcagagactgatgtgcttgtcgaaggctgggggagttgtggaaagcacacaggcttgggatcaaattcacttgggttggatctgattttgtcacatcctagctatttgatcttgggtgattaccttatgtctttgagccttcatttcctcatctgtgaaatggggatgataacatctgttgtgaagagttgttttgggggacgagagatagttatgtaagtgacaatcagaattgctagtgtagggaatatgctcagtacatgtgaactattgtttttctcagtgaactgtttaactgagcaccctcccaaccatgtacatcagtattgaaacaccaaccatgactgcccagggaataaaggtgtagtcaaaaatgaaactggcccctttcctatgtggctgatgtaagttattaccgccctattagaggaggggacattttcccctcacatggtagaaccaaggaaaacaaccaaaagtgtactttcttcttccttttaacaataggagtcgattttaagtctccgatgtcccttaaagcttccgtttattctaacacttgtttaaacgtttcaatgaaacatttttgtttcagtcatgcttctctccagggattcagagaaaaaataaagtagcgtcagaaataggtaagacaactacctagaaaaagagaagcttagcaagcttgaagacaggctatttggaaatacacagtcagaggagacaaaaggaaaaaaaaacagtaagacaagacaagcaagcaaccatttttcctgagtttcaaattccctttccccacattttaaaagcttttgctcgactctttgttgctgttgttctggttttcacccaaatgtgtatgtcttgaggttagaaatttgcctgcggacatagaaggaaggctaaagagtagccagggtttatgccttttgttgtccttcctggcatgcatggatgctcagtgagttttaagggatggtgtttgatctgcactcattttgacagtatccgtatgaattacatgtatctaaaaaagacgagccaagatacctgtccataggatctagggatgcagtattttgtggctaggggaacagagcccccacgtgttatttcagacatgtgcaccttctcaccagcatgcttgtgttctcacagttaataaatgacagggtctgctacagctggaaccaacttaaaattatccatgcctaatagagcatcatgtcttaaaaccattccttgttgtgtgttaaccgtgtgataacagaagaattaaactgtaggggttatgactggtttggggagaattattttattctgctcttgcctattttcctagtgcacctggtcagtcgcctctaacttgtggatggctgtggtggtgatttcagctgtcccaggaagtctgtgtgcaaggccagcacagcaaatcccacccttagtgctgagtcctactctcgatggctccagcagctgctcctttagaccaaatcgtcaagaccattttaatctttttctttatttgtatttgcctttgaggtgtaaagagatctcctaattcggatagttcaaaatacttttaaaaatacttcttcacagttgtcccaaataaagtgtttctctgaggtggtaatcctgaacttttgcttattaattttttgaataaggaataatgcacatgacacttcaaaaagtataaaaaggatgttcactgtaaaatatttcctgtactctatcctcagaccacctagttatgcattcttccagagaaaaggcatactcgttcttttattattattattattatcatcatcatcatcatcatcatttttttagagacagagtctctctctgttgcccagctggagtgcagtggcctgcctgattatggctcactgcagactccatctcctgagctcaagcctcagcctcctgagtagctgggactacaagtacaccagctaatttttatttttattttattttattttattttttagtagagatagggacctgctttgttgcccaggctggtcttgaatgttaggcctcaagtaatcctgcccctgctttccaaagtgctgggattacaggcatgagctgccctgcccagctgcaaactcattctatatacattttctgctgcctgcttttttcacataacacaatgtggagatcattccaggttcatacatacagggctgccatattctttgtgacagctacctagtgtgtcagtataatgtatgaaccataatttaataattagttttcagttgacaggtatatacactatttccagccttttcctattaaaacaaatgctgcaagttttgtcactgtacaaattatttctcacacgtgagaaagatcagtaagataaattcctagaattgaaatgtgaatttttaaatgttgctacattttcccattacccttcacagaagttgtacaaatttatattcctaccaataattgtctgattccctgcactctctccaacacatacatatcaaactttttatctttgccaatttgataggtgaaaatggtatctgattgtggttttgacttgcattttctcattaggaataacattgagggtctttgaatgtgtttaattgccatatatgtttccttatgtgtgaactgtttaggcctatttgtgtattttctatcgggttattgatttttattgtaggaacaccttatagagaagataaaacagccattttactataatttttattttactgtaatttcccccagtttataatatgacttattttaatgtaatttccctgcaatttgtagtatgactgggctttatttaatgtggttttatgtatatagatatgtatttattgctttgcagaaaccttttcttctatacattttagaaaggtctttctgacttgtagattttaaaaattctctcatatttttagtatgattataatttccttttttagaaattaaaaatttgattccttgcaatttaatgtaaggcatgagatccttacattgttagctaacttaatttttttccagattactacccaatttactcaatactttttgttgaataacttatcttttccccactgatatccaatgtctttctttttttaaaataataaccaaaatttccaaaaatacctaggtcaatttccaggctctcaggtctattaccattactgattctccatatagcaatatcaaatggttttaatgaatatggctttattatttgtttattatccaatgattttatttttccatgtaaactttgaaatcaccttgagtagttataaaaagcaaacaagttagtattttcattatgatcaccttaaatttatacattaatatagagaaaaatcaacttttgtatgatatttagtcttcctacccaagactatagtgtgtttttccacgtcttcactgtttctcagtaatgttttgaagttttatttcatgtctttgcatattttgttaagtttatgcttaggtatacttttttaaagttgctattgtgaacacaattatttcttcacagtactttctggcagttattgtttatatacagggatactttttggagtttattggtttggaagagctacctttttaaattatcttattaattaaaataattttccggccaggcacagtggctcaagcctgtaatcccagcactttgggaggccgaggtggggtggatcacctgaggtcaggagttcaagaccagcctggtcaacatggtgaaacccccatctctactaaatatacaaaaattaactggggtggtggcacatgcctgtagtaccagctactcgggaggctgaagtaggcgaatcgcttgaacctgggagatggaggttgcaatgagttgagatcacaccgctgcactccaacctgggagacagagcgagactccatctcaaaaaaaataattaaaataaaaaataaaaataattaaaataattaaattatttgatttaattctataaattaaaattatataatattatatataatatgtatacttatttaatttaattatataaaattaagataatttttccgtggagtctgttaggttttccatatatattgccatattatttggggggaaaacatgataattgagcctccttcttttcaactattatacaatttagttctttcttttatctaattgaattgactactagctgtaggataatgataactagtagtgacaatagtggacatgcttgtcttgttcctgactttaattggaatttgtttagtctttctccatttgccataatgtattttgagttatgttatagatatttagaggcagctatggagatgattgtatgattttcctgttttatgcccctgctatagtgagtcatatcagtaggttttttagcattaaaacatctttgcatttaaaccctacttggttggcgtgtattatttttagtgtgttgctgaattctgttcatttatgcttattattttcttcctccatattcataaatgagattggtcagtagttttctttttttatttgttctattctttctcaggtttggatctgactgctaagtggtaattaactgcttcttagaggttgggcagaattcagccatctatctttcacacttcttggtggtggatctttgacaactttcactatttcttctctttagatgttctctcttgtcttggtcacttgattaactcatgttttcatattcaactcttcataatggttgtctgtttcaattcaagttttcagatttctttacctagatttcagcaaaatcttttaatgtcttctctatctatcattattttccctgtctcttgttttattttgtgtatctgtgctttctctttctccctcccctcatttggttaaggtaagatggttacttattttattgttttttgtttttcagagactaagcttttagatatattcatttaaacatttatctttttcctaattcctaaatatctggtttcaaaaattcacaaataaatgttaattccttcccttctgcttcctttaggttcatattattgttactcatgtttcttgagagttttttattccttgttttataaatatgtttacttacagctatgatttttgctctgaatttttcattagctgcattccataggttctgatatgcaatgttttcattatccttattttctcagtacacattaagtttggttttcacatctttttgttccaagatctgttaaataaagtttaaaagtttctaagtgatagaattttaaagttttctttgtatttttgtcatttgataggattgtgaacagaaaatattgtctgttctgtttctacattttagaatttgttgagattttctttgcactatttacagctaatatatagtcccttctgtggctagtttagggacactttaatatgtgtcttctatatttagaatgtatagtcatatatttccccgtaccttgcaattattttatttatatattttaaaaccttacttttttgatccactaaatatgataaggacagagagagaacccataaaagtcttgatctgaatatacatttgccttcctttccttgaataatatcctatagctttgctttattaattttgttactgctatttggaacatagatattcatggctgctaactcaaactttgtatattattccctttaccattataaagaatctttctttgccttgtttaatggtttttatggtgatttgacttttctctgtttcaaatcaggtgtgtatcttttacacagtatatagttgaatttggtccagtttgagggctttttcttttaatatgtgagctctgcctatttatgtgtattgatatggcagatatgtttgttattatttttgttatgtgttctgttttctattttttattgcttaatttgcttttttacatgatctgtttttttccttactttgtgcccatgtaattcatttgggagatgtgtcctatctttagttcttctagcaatcccctttataatgataataattctctgttgttgtttcttttaatttagagagtatccactgattccccaacagaaatgatactgaatatccacttcttcccacctcccatctatccctttccaaacctcctttccaccattcaattctagttggtataatcacttttttttagtttttccaaaactaaaccttttaatatgcttgacttatactcctgtgagaaatagacgtgatttattctctttaaagatattttgatttattaactttaaaggtattatgcttgagtataatagctaaggaatcaacatgcatatatctcccactttatcttcctttttacctgataacttttgcaagttacatttttccattttgccatgattaatagtagttccattcctttccgatagcgtatttccatagctgtttcagtcttgattcagcagttaattcaatacttactgccatttctttgtccccactttctctcctcaactcttgattagctgacatttttcctacagtggtatcttcaatacaaattcaagaaacacacattttgcatgtttaaaaacatttgccacttgccttcttactacaatgacagtttggctggatataaacttttaggtcacacattgtttctctgggatatgatggcatggctaatatgtctccaaaactatatgattttcctttggatatcacagaccttttattttatttattaataaattgatttatttatttttgagacagaatctcactctgtcacccaggctggagtgctatggtttgatcacggcttactgcagcctccaccttctagcctcaagcaatcctcccatctcagcctcccaagtagctgggacaagacacacgccaccatgcccaactaattttttaatttttctctagagacagggtctccctatatttccaggctcatgaactcctggtgcaagtgattctctcgccttggcctcctaaagtatggggattacaggcataagccactgtgacttgccttgtacctttaaatgtatagaattaaatcttccttttgaaaagctttcttaaattatatgcttgatattatgtgtttgaatatttgttctcttccatttgtttatgtcttttactcaggaaaaccagttatctttttcatttgtcttccatatctagcagtttctctctaatcctttcaaattctttgtccatttacatttcattctgctcatttttctcaatcctccatggtactcagtgtgttttcaacaatacctgttttctttgggcttcttctagtgtgttcttcatttttctcttttacttctgccatgatatttttcatcctctattattttgctagatattctcagagtccttatctcttttctttgattccttgttttaaagggttaattatttcattaaatcctttaagttaataattgtatgtcttgtcacagtgtttatctgctttacagcagtattttttctaataaatgttctttacttatcatcgttcttttcctattcctttccttacttttttcttagtttttttttttttttttttttggtatagatcttatactggttctctttttcattattcatcttaaaatgaggtcaactcttcttggaccaactattttcagatttacttgaggaaatgaccatggcaagttctagaccagcaagaattctttttggcttagggaggaactccttatgacacagagagagagaagtatgtgtgttataagactcattgaaatgcacatttgcatctgtgcctgcaaataattttggaccctcctttccccagccggtagaggtgggtagctttgaggctgcccaagattcactgtcttcttggcctacctcattcctagaatgtccctacagaaatgccttgcctttgccatcttctctgctccctggtgggtctagggtctaagatcagttctgctgccatcctacacacccttttccattattctaaacgagagttgatgggttttctttgccaaggagctagtgtttcccactttggagagcagggctctgcaggctttgtctgaggcttacagccacaaatgtatcgtctacagcatatccacaacccgtgtcagatcatcctgagcaatgaaccgtcctgtctcattcattaaagtgcagagttacggagatatagttttaccaaagaaaattttctttttctttgttatcttgagatgatttccaagaaaaggaagaaacagatatttttaccgtcttaaaaccggaagaccttcttgaactttattttgaaaagtgagttttttaatctaaaaatctaaaagcaagctgcctcctctctgctgcagtttagtgagaccacttccatttccaagaagccaccatatccttactttaaaaaattacatttggaaaaactttgttttttggacaggatcatatgcaattttaaatttctttattatttatctcaaagcagtactcctttgctcctcatatttatacaacttaggaaagaagaaacattctacctttttcttgaacaaatagatgggaattacagccagaactagaaaccagttttcccagctattaaatgatttctctttgattgccttgctttttgtcatgccagagaagccttttctagtgtgcactgtaagctttgagaacccaacattcattttttttttagatggagtgtcactctgtcacccaggctggagtgcagtggcacgatttcggctcactgcaacctccgtctcctgggagaacccaacattcagaatatattttattcccacgccgataatgaggtctaccattggacagaaactttgacagttctcttcccttttctagtttgcaatatttttctttaataatcattaagatgatatctcatttctagattcacatataactttcccagtgttctgctaacaaggtttgtctccatcttttgcgggagcctgattccttgtttatatgccattgccttgatacaaaaatatcttgataccaactgatatggtttggatttgtatccctgcccaaatctcatgtcgaactgtaatccccaatgttggaggtggggcctggtggcaggtgattggatcgtgggcggtttctcattattggtttagtgccatcccctcatcgttgctcttgtgatgttgagtgagttctcacgagatctgattgtttaaaagtgcgtggcacccccaccccagtcctgcttctgccatttaagacactgttcccactttgccttctgccatgagtaaacgttccctgaggcctccccagaagcagatgccgttatgcttcctgtacagcctgcagaactgtgagccaattaaacctcttttatttataaatttctcagtttcaggtatttctttatagcaacgcgagaacagactaatacaccaaggcagtggcatttggcattcggcattacttttggctttggcaataccagtatcccaaagacatagtccctatctttgaacctttgaggagcccatggtccagtgaagggagacacagagacatataaaaggaaaataggtccgggcatggtggcccatccctgtgatcccagctattacggatgctgaggcatgagaattggttggccctggtggggcagagcttgcagtgagctgagatcatgccactgcactctagcctgggtgacagagcgagactccatctcaaacaaaacaaaacgaaaatgaaaaagaagaagaaaattgccagagtgctcagtaccatagtagaagtgtgaccaaagtgcaaagtgctataggggcagttagccctcccaaagggagaagaaagccaatgcagagaagctggcacctgaacacagttttgcaggttaacaggtattttccagatgatgaaggccctgacctgcagcctgaataccatgggcagacttagagatgtatttttaaaaaaaaaaaaaagaaaaaaaaggatataagaaaatgtcaacagtgtgatgtgggtaaaacggaggaggcccagaacacagtggaggatgagatgtggagtctgacttcatagtaagtagcccagagaggagtacatgttaaacctgggagtgatgtcatggacgctgataggtgacacctgtagtcgatttgtgagacttggctgtcagtgatgtgccggctgcctcaggaaggaatctgcctggtagctgagatgagggaggctccttgctgcaggctgtttgaggttttagcctaacttcaaactggatgagggagccagggcgtcagaatctgcttatcctggaacagtaggaataaggttaaagcacttaaactaacctaaagtcgcacccaaaacctggaaaggaaggatttgtttcttcttgtacccaatactacctcccatctgcacattatttcctcaatgatttttggaatagtagcatttttggagtacgtacaacgtgaaaagttaccaccttagccttaagaaagcaaaaaacaccattcgtataaaatctagcatcataacataaattaaagaggtggtcattcattttgtaaaatggctcattattttatgatattaattgtaagtttccgttgaataataaactccctttagctaatgcatgctgggcttaatacctagatgatgggttgatcagtgcagcaaaccaccgtggtatgtgttttcctatgtaacaaacctgcacaccctgcacatgtaccccagaaattaaaataaaagttgaaggaaaaaaaatattaagctccttttttatgcttaaggtttaccttgattttccaaaacttagagataccctattttagaagtataactgttatataaaatgcagcttactcgtgaatgtgtgattaatatcatgtatttttaataaatccagttcttaattaattcaaggatgaaagagaagaaagacaggaaatcaatattttctcctttcacccttgggaaccacacatataacaatttttatggaactcagccctcatttaaatgcctgagtcagtgataaatattattaatatcttcattttttcctttcaccaaatactgttcaaaaattagagtgaattcaatgaatgatctgggaacaaatttgcatttcaataagagtcctataaaagaaaaccaatgtatgagctcatcttagtatgtgtacatagtaggtttcatattagatgtggttaaagtgtgtttccattttagaattcacatagataaacccacattaatcctttcagcacttcagcagataattaactttaatacccagttagggctgagccagttcagtttctggagccgatgtctgggctggtgtttctcaggtgtcagaaatcgttcatgtcgcctgtgtgagagcaatggtttccctttcactttgtatgtcatattcaattccaagtacagtagcatttgcatggacccagcctgctgaaattaaatgaatctacatgaaaatgagccttttcagcaaaggccacaacttctgactctatgggagagagaatgctttcatcatcctagatgttccagagcagggttcttcaaactttagcgagcataaaactcccctgtagataagatgctctcagagattgtgcttcagtaggtctgtgtggagatggtgcctttcttacagccttccacattggagagctgctcagtgtggccccagatccacagtgtcggccttacgcagaagcttgttagaaatgcagaatcccaggccccaactccgacctactgaatcagctgaatcagaatctgcattttaacaagatctccagtgactcaccctccactggagtttggtaaataccaccctagatcactgttccccaaagcctggtttaggtattgctagggaaactggagatgagttcagagagtgtataaacattttaaaataatggctgtgtttattcttattattactttccttctttttattaccttccaagtgtttattcttcctgagatcctgtgtttattcttattattaccttccatttattcttagtattactttccattattataaaccaagtggtattggttttccatttatgataataaagtttattttccaaaataaacttacttgactgaaagcatgacttgatttatagtaaatgttaaataaatgtgagtttaggaggtatgcggctgtcacaaaaaccacgaaagtcatttgtatacaagtggccttacttagtatggtgcttaagagcctggcctctggagcctgacactctgggtttgagtaccaactcctccactaatgacactgtgtgaccttgggcaagtttcttgacctctccatccttcaattgcctcatctggagaatggagataataatggtatctatctcattggggtgtcatggtgcttaaaaaagggctaatatatgaaacactctaagaacagtgtctgacacatagtaagggctgtgtcagggctaatttgcttcactgttatctagagcacaaatacatgctcagtgattttttcatcagatttcccccaatcctgttcctggcttctctgcttactcaggccaacatgccccacctccccacaaaagctaaatatttacagattttttatatcattgagaagagtgagagcagcaacttccatttggccaaaaagaggacagtctcataggttggaagtccaaggagagagatgtgaacagagaatttgctcattaaatgacaagaaagtgacaacagaaagtgaccatcataaaacattctcatcatcacctggagagaagtttaaaaataaaattcttttattattttacttatagctttagaaactttactacatttacgttgagaaccctttatttgttccttgtttgcacgtgggcttgtgggctgctatctcctggccgcaaggtacctttaatagatgaatgatggacgcttagaggtggcaggaccctactgagatcataatgtgagatatatattgcgtcatggggtttattagccttcattggttcagaagtgagaaatcattattctcctccctctgccccattttatagccaaagaaacaagggatgtgtttctttgaaagaggaacagtgtcaaaacatacaaagttaggattgcacagagtaccttatttgcagattcctagtcaagtgtgttattttactattattattgttttgaggtggtgtctcactctgtcgcccaggctggagtgtagtggtacaatcgcagcttactgcagccttgacttccccaggctcaggtgatcttcccacctcagcctcctgagtagccggaactacaggtgtgcaccaccacacttggctaattttctttgtattttttgtagagatgggattttgccatgttgcccaggctgatcttaaactcctgggctcaagctatctacccatgtcggcctcccaaagtgctgggattacaggtatgagccactgcacccagcccacatgcttttgtcagatggtggcagtaatctttcttgcttatatttaaaaacataagcacactttctgtgtgtgaacagctgtactctcacagactactcttggagaaaaaaaagagtttgacgagagcaactagtgtgtaaaattacttacatgagttctttctttctgaaataactcacaaagtgtggttggaacacagacatatataattttttattaaaagagaggcaagcccagtccacatcacttctgaatgagtacagacaggctgaacatgtagggaaagaaagggatcaagtagggcgcccgtaccctcaccctggaatagctcccgctaaagaggttgcagtgcaggtcctgtgcgacctgcagacgtgttctgtgctctgtggcccactggcttttaaaaatgctttttaaattacatacccagatttcaaaattgaacttcgcgcaaaaatctagatagatatggggcttttggaagagggaagtagggggttctggccaatactgggctcgtattcccatggaatatcacccaacccatgctgagaggggctcctactgcagacccaggtccatgtcctgtagccatgtcccgcctgcgctctttcacctgttatttagcccacctctgagtgggtggtcacagcctgctccctgctggcaagggatgctggggaaggagttcctacttctggctggaggaggtgggactcacaatgtgggaaattcctccagcatagggtaagtgttcaaaagacggtgggcaaccacaagacagatgagcacccctgcccaaggaggaagatgcttgcagggtagctgagtgtcattgaagagcctccgtcatggcagccttttcctcttctcccccacacatgcagagcctcccaggctgcttgtgttctcccacttccaaatctctgattatttgctgctcctgcttactagaacagactcctttagtcacctctctgcctggtgaaaaataagatcacttccaccaagtgtttctttattgcacctcctcctcaagtttgaatggatgatgctatcccttagcactctctacctctcctggggcatttatctgactcctgcttttttttttttttttttttgagacagagtcttgctctgttgcccaggctggggtgcagtggcgcaatctaggctcactgcaacctccgcctcccaggttcaagccactctcccacctcagccagcctcccaagtagctgggattacaggagcctgccaccacacctggctaatttttttgtatttttagtagagacggggtttcaccatgttggccaggctggtttggaactcctgacctcaagtgatccacctgcctcggcctcccaaagtgctaggattacaggcgtgagccaccgtgcctgaattgactcctgcttttaacatagttatttgtagtggtgatgataagtgtcacttccacgtatgtgtcaggacgtgtactgtgtcttcatatacagtgtttgttttaatagtgaaaacaaacagaattaagcattatcactcctaatttacaaatgaagaaaaggaggcccagtaaggtaaagtgacctgaccaaggccacacggccaggaaaagggaaaggtggaagcggaacctggggccgcctggttctgagagcaggtgctgtattcgggcctcgcgtggaagtgagtgttagttctgtttccctcaccaccctctaatggtgcttggatgtgtatttcgatgctgttttgcgatagttcatgaattgggagaaagtataaaagcctttgagaatctgtccttttacatcctaaacattttaaatacacttcagagcaaaacaacatttttaaatgggttgagagaacacaaagcctcgaagagctcttgcgtgcagcccctgacttcctggagctcagcattctcaactgtcagattttaacaaatacttctttagataattgcttaattattgtatctggaaaaaaaaaaagcctttcacagccatcaaacactacatataaaactatcctctaatcctggattttgaaaaatccttgcctgtgacttcagcgaggcagcatctcggtggcacctaagcattcccaggttcctaaagataaaactagacggaaaccaaggccactcaggtgagggaggggcaagcagaagaattacagccacctttatggggtttctttcacttaagggtctcaaaaatatttttaaatctttgcaaaatggaagcagggatataacttgacctgaatcatatcaagctaataaagtaatgtggtacagtagaaatgaggttttaatggcaaaactccatctatactaaaaatacaaaaattagccaggggtggcagtgtgtgcctgtagtcctagctacttgggaggctgaggtgggaggatcgcttgaacccaggaggtggaggttgcagtgagccgagatcacgccgctgcactccaggctgggtgacagagcgagactctgtctcaaaaaaaaaaaaaaaaagaaagaaagaaatgaggttttagataagaaaaaccagggctttaaactcagctctgatgatctttctgaaatttagtagaaattgcatacttctctgaggcaaagttgggttatttgctacatggaaatatcagcgtctaccacgtggttgttgagaggattacataaaatgtcttagaagtccccagtgcagtgctgagcacctaccgggtgggagagtcaaaaaggtatagagccaatccttattacttgcagattctacatttgcaaattcacctacgtgtactcacgaaagtgtatttgtaactccaaaatcagtactcacggtgcttttgtggtcattcccaggcatgtgaaaagtggtgaaaaactgtagacactgacgagcatgttcccagctgagctgaaataacaggacactctgccttcttgtttcagctctcatcctataaacaagtgctcctctctcagtctgtgtaatgccacattttttccaaattttgtacttattgttggtggttttgcagtttaaaatggccccaagcaaagtgctgaagcgctgcctagtattcttaagcccaagaaggccgtgatgtgccttatggagaaaatataagtgtttgataagatttgttcagacatgactcctagtgccgttggccatgggttgtcttgttctatctgggccctcaacggattagatggcgcccacccacaatggtgaggaagacctttactcagtctgcagattcaaatgctaacctgttttggaaacacctttacagatgcacccagaaatgatgttctaccagccagatgggcaacccttagcccaattaagttgacacataaaagtaatcatcacgctctgtgttcatgacaactttctaaacataactatagtgaataatgagaatcaactgtattttatttagttcctatattggataggttcaatattagtggataaaacaaattaactcaaaaatcttcatggcttaacacaatgggagtttatttttcacatatgtaaagtctaatcaggtgtttggcaggtagtcttacaggtgagtcagggacccggactcctttcatcttgtggctctgccaacacataggacctttgctacagtcaatgggcggggaaagagaaaagtcgtgggcagaaggtctttctgaaccagcccagaagtaatagcacatcacttcgaccttcattgcattgaccagaactcagtctcgtggtcacacctagctgcaagggaggctgggagatgcagtctagccatgtgctgagggattacaggaatagctctgctgcagttctccttaaagtctctttatacagttattttttcttaggtaaatgacaaaacccttaggtaagtggtatttccgtttgtaaaggttattcttccccaccttttccagtttttcaccaggggaagcatttctgtctcctgtcatgtgtcttagttaaaagatgagatccttatataatgagacctctagatattctcgttctgttaatacttcaaccaactctttaatctttgctataaatttttgactaaaaatatttttgccactgaataaaagatcataaaaaatagacccagtgcctcctgtaaaagaaagtgttaaaatacaaatatctgataatttgtgcttgttccaactaaattgtgggcctgcatccaagttgccttagcaccagcctgtaaaatgctaactgtgtctaaccctatgtcattgtgtgtattagtttagtgcaccattagtttagttttggtaataaaataacactgatgttacctgaaagaaacacgtactaccccatgagatctctgctcaattttactatggttttatgctgtggactctgatgagtattttccttttcggtctttctgttcttgttttaatatcaaggaatgaggcagtaacacagtgatgatcaggctccttctttcaaggagcctgaaatactttgtaagaaaagtgtagttgtgtacaacaatcagcttatgcacctccttggaactcttaggaaaactatcatggactctttccccaaaaaagttgcactgacacacatattttacgccattttcaatttttgtacaaatttagattaatcctgctgggaaaaaagatggtaccatatgatccagcaattccactcttgcatatacgctgaaaagaatgaaaagcaaggtcttgaagagatatttgtacaccaatgttcatagcagcatttctcacaacaccccaaaggtgaaagcaacccaggcactcatcaatagatgaatggctcaactaaatgtggtgtatacgtacaatggaataattcagaatgaatttctgatccatgctacaacatgaatgaaagttgaaaacattatgctaaatgaaataagccagactcaaacggacaaatgttgtatggttccacatatatgaggtacctagactagacaaattcatagagacagaaagtagaacagaggttactgggggctgaggggaggagacagtggggagttattgtttaatgggtacagagtttctgtttgggatgatgaacaagttttggaaacggatagtgatgctggttgcacagcattgtgaatgcacttaacgccactgaattgtatacttaaaaggagttaaaatgataaatctgatattcttggactttagaacctgttaagccttggttccaatcccaggtctgctggttatagtataggtgactttgagcaaaagagttaatgtctctgaacatccttttctttatctataaaaatggggatgctagggcgttgaagccctgaccttagaagattcttgtagaaataagtgtgattagtgtgtcacataattgccatttataaaaagataaaaagaactaacatattaggtgagcaaaattcagtggactatgctaacaagaaagcatcacattgcataaatgcttttggcctctgtggagacaagaatattaacatgaaaaaacataaatgccacaggattttaaagatgaaaaaacatagggacaggccttgttctggtcctccagtaaccaaagggacagcaggaatacaaaatcacccctgcccaagtgtaaggtttatttcagtttctgctttgattgtttttaggttcttatataggtttttccaattcttataaactatggggtttttctttaatacagattttaagtccttgcagtgtgccttgctatgggttctaagacacatgcccacatacacacatatgcatgcacacatacaggctccacacatttatccagagatcagacctcctataatattaactatttgaaacagaatcatattggcagaatcatgccaaaaagccccctgcatagcaaataccagatagaaagtctaggcagaggagaggagtggcccatcctcatccagatggctgggtagaaatgatgacacaggaatagcagggaaagtaagagctgacaggagagaaagaggcaggaaaatgactagcgccctaagccttgctcgaggctggcatcatgagttcatgttgagcctgtgacattcagaaaaggttacatttcattctgtttgctctgcttaggaaaatgggagtctatgcagaatgattgaaaatgataaaactaaaaatttaatgctaaagaggtagaagtcagttatctggaaaaattattatggaatgaaggattgctatatatatatacatatatatgtatattctatttgtactgagacacaaatagctaaattctatcagttttaacacctattatctctagaatctggctgcttttgtcaatctccagcacttagcacaaagcttgcctcagagtgggcactctgtgaataaatgaatgaacaaatgagtgaatgaatgaacaggtgaaagaatcaagctgactataatatgcatgtctgcaagatacacatttcctgcatgtaagtaaagaaatccaagtttaaatccattctttttctctttttcagagcagaagccactctcttgggaccattcataagcaggagacatcaacaccgtgacacatgccagtgccaccgccacccccacctcctctgcctccacctcccccgcctctgggggctcctccccctcccccaccatcagcacccccggtaagacctttttttctgattggtttactgtggagcataaactgcttgaatacacttgagcagaaggttttaaatgttcagaagtagcactgcctagcttccctgtggcaggtggcatcttaggtggctggatctggcagctttagagtctgattccaaaccagcctggctcagccatttctctcccccattcttcggcagcttccacctccacctcattggtctactgatgtctacctcatttctcttctcattcctgctgcttggtacaggctcgcgagtctgagtgactttctgtctcactggaaacctcacgcaatgggccgtgccaaagtgcacggccaatgaggccttgtgaagtcaagttccagtgtggaatttggatggtgataatgatagattgagcttcagtcccctagtgtaataggaaattccacaacgagatataaaatccttacatgaagtttccctatctacacaagactgaatcgaggctatttcagttcgtgttgctgaatgttctctcttggtttcatagtttggtttgtgtctagaagtgggccactgagggtggtcattttgttttggaacagggattctcagccttggcaccactgacatttggggtgagatcatttgtgttgtttgggctgtcctatgcattgtaggatgtttagcaacatccctggcatctacccactagatgccagtagcaccccccaattgtggcagtaaaaaaatggccctatatattgccagatgtccccttgtggggcaaaaatcaccaccgcacacacggtttcagaaaaatgctagtgcttactgcttatggcaaacttttcctctgaagaaaaccaggagcacttctcacactcattttccattcctcacaccacttcagtgaggggcgtctcgcatccgctccgcagcttctgttttccgtggaaaatgaacgagatgacggtatggcacacagagacagggctgcttagggatggtgtgagccaagtcagcagaagccaggaacagaacctccctgccatcctccccaccggatgcaaccctccctcagatgtgcagatgacatggccctgaggagtgttggctatgaagggagagcctgcggcccctgctgcatgaccacaggccctggtgagggtgagagtatgcctgagatgtcaccccacgtgacattagtttggacactgaccctatctgaggtgccaagggcttagacctgcctggaacttggctcttgccctgcaagacagtagaaagaaagcacatagtataaattacgtttgagagctttctaaccaatataaacaaagaataggaataggtattgaagtttcactgctgaatttgacccaaagtcaaattcaaggtcattgccacaaagtgatggtttgtaagtaaacacacatgaaactatcatatggatcttgcaagcactgaagaagtacaacttagaataactgcaaatactgacgtacccataaatttagccagaataaataaactgaacaaaatccatgttattggaggtttgagaaaataatcctttttaaacattgctggtgacagacaaatgtctaggactcagtaaaagttgaacaggtctttctggagtgttctctgtaagaaaacagtaaatgtgtatgtatcatagttttcccctggtaatcaggtagttttatttttgagactgatttaagaatttaaccctaaaaataccaaaaagaatttatgcaaggatatgtccaacaatgctatttattctagcgaaaaaatagatcttaaatggcttacgagaactaaatgaaatgtgttatgtcatactgttaattaaaaattgcattatgcagtggtggtaattaaaacttacatctggcggggcacagtggctcacacctgttatcccagcactttgggaggccgaggtgggcagatcacctgaggtcaggaattcaagaccagcctggctaacatggctaaaccccatctctactaaaaaatacaaaaattagtcaggcatggtggcaggtgcctgtaatcccagctactcaggaggctgtggcagggagaattacttgaacccaggaggcggaggttgcagtgagccaacatcgcaccactgcactccagcctgggtgacagagtgagactctgtctcaaaacaaaaacaaaaacaacttacatctatgctgatatggaaaagtagatataaaatgatggattggaaacaacacacattttggccgggcatggtggctcacacctgtaatcccagcactttgggaggctgaggcaagtggatcacgaggtcaggagatggagaccaccctggctaacacggtgaaaccccgtctctactaaaaatacaaaaaaattagctgggcatggtggtgggcgcctgtagtcccagctactcgggaggctgaggcaggagaatggtgtgaacccaggaggcggagcttgcggtgagccgagaccacgccactgcactccagcctgggcaacagagtgagactccgtctcaaaaaaacaaacaaacaaacaaatgaaaaacacattttgtgcataatgaaatcaactacttaatatatgtaataaatagcaaaaatcagaagagaatttgataatgttgacaataacatttaatattttattagggaatttcttctttaaagatgcttaaatgcataataaaaataattgtacatttggttaaattttttgaattctctccttcatttctctctctctttctctttctgaagaacaggtcaatttaggagtaaaataatcatgtaaattttaatattttcttaaaacatattttctacatttatgtagaaaaataatgtgtacacttacaatacatattaaaggcaaataattaacgtctttagcatataaagagctcttacagattactatggaaatgatgaatacaaagatgggcacaggatatgattagattgaagaaatgcaaatattttaacctcactacagtttaataagaacaaattaaaataatgagaaaccatttttatctatcagtttagtgagatatttttatttatttatttatttagttagttagttatttagttattgagacggagtcttgctttttcgcccaggctagagtgcagtggcactatctcggctcactgcaagctcctcctcccaggttcacaccattctcctgcctcagcctcccgagtagctggaactacaggtgcccgccaccacgcccggctaattttctctatttttagtagagacggggtttcactgtgttagccaggatggtcttgatctcctgactttgtgatccacctgcctcagcctcccaaagtgctgggattacaggcgtgagccactgcgcccagcctagtgagatactttttaaatgttggctggagtattaggaactaggcacttataacccttggtgggagcaaaacttagtgaaatgccctaagatacaatttgtcagtaaaaaatggacctagtttcacttcaagtaattttcttgacatggcttcacttcaagtaatttttatttaagtaactaatcatagatatacagaaatatatagctataggagattaatgaaagtattacttgtaataataaccaaaaagaaagaaacaaaaaacaacccacattttttatgacagcagattcaataatttattatatatcctctaaatggtatatgaagcagccattaaaatcatatcagaattaaaaagaagaaaatgacaaatgttggcaaggatgtggagtgatggaaactctcatacactgctggtgggagtgtaaattgatataaaccctttggaaaaccgtttgacagcacctaccacagttaaacatgtgcatcctaggtagatatccaagagaagtatgtgcctgcatgacccaaaagacatgttaagaacatttgtagcagcatgaatagcacaaaactggaaacaaccccctatgtccatcaatggcagaatggattgataaaatgtgtgttatggtcatgctctaaagtattatacagcagtgaaaatgaatcaacaatacatgcaacaatgtggaggaatagccacgtgacaaaagaatacatgctgtatgatcccatgtatataaagctccaaaacagaaaaaaataaactacagtgtttaggaatgcaagacaagctggtaaaattatgaggaaaagcaagaaagggataaccataaaatcaggagatggcaccctttgggaggagagtgggggactcaggatcagaaaggccctgggtgcttctagagtgctggcaagactctaattcttgacacaggtggcgatgacatacagtatcactttatagaaatacgttaaactgtacaaaattattttatgtgcttttctatttgtggcactggacaatttaaaaggttaaaagagaaaaaaatcatatccaaattaatttgtaacttccaatgtcgtgattgattcagacaagaatcatctatgaaagctaaaaccactgggtgaaaggttgtgggggaaaaagatgttctcagggtcagaagtatcacccacagatgcttcttactgcaaaggggaaagtgtctctttaaaatggatcaaacttaccgtcacgtgtaatggaatgacctcctatcacaagcctctgctggatacaaggaggcgcacagagcgtcaccctgtggtaatctgcccggaatgaatgacctcatgagcaagcaatcagacacatgcagaatgtgggaccttctgcaacagaggctggcaaaccaggacccctgagccacagccagctcaccacctgttttttatcgtcctccagctaaaactggtttttacattttcaaatggctggaaaaaaattaaaagaaaagtaatattttgtgacacatgaaaagtatacgaaattcatgtttcaatccataaatagtgttattggagcacagccacactcatgcaatttgtctatgactgtttttatgctacagcagcagaacaccaattaagcaaaatgttattcctcaaagaattccattcttctcactagtaggcttgaattttaaaaattttactcaattattattactatgttctgagttctgtcaataaatattttgtggaagtttcttttctcttttgttatataagtatatacattatattctagatttttgcctcttggcccacatacctaaaatatttacagcctggccccttccaagagaagtttgccaacacctgtcccgcagtcagctgggctcattcagcctcccattcccactacccaccacccacccactgcagtagccagagatcttgcatgcgcacatcctctgcttctcctctcgagaacttcctggaccctgttgagctgtggcccactccatcctgcatggtctggcccctgcctgtctctaagacctcctcctgtgcccctgtcctggagtctcctacttaaggcctctgcatagccattgagagcctggaaaggctctacacagtcatcccagctcaggtgtcccttcctcctacattactggcttttatatcttttatatctgcaaaccccccacttcagagcaggtagtagtttttaacttttttaaaaatttgactggggtctatatttgatgttttgtgtcactcatgcctggctcgaaataagtactcaactcactgaatgaatgaatacatgaatgaatgaacaattatttatgtaaattgggttaagaaatggagttaaaactttttataatcagtgttcaggactctaaacatctatgttgtgaaagaaaaaagtatatttgaaggtagaaagcatggtaagaaagactttgtttaggaccatcacaacaggtggataggattttgcagtaggggagagagattgggctcaactccaaatacaacatgggcaagagggaatgtatagcccaggagcagggtgggggtcagtgaatatactaaaaagaaacatcagggctaaaggagattctggctgaatgcagctaacaagattcttactgaagacaagccagggtgatcggacataccctgggggttggtgaaggataaggcacctgatcggatatcaagggtgatcagatatcgagatggggtcgttcttgctaaaccgacgtagcagggggttttgccaaaactggattttacaagggagtgcacagatgggcctgggagaagctttggaagcttggttaaattttggttacaaggtcaggattctctggtcaagcagagagcctttgtcagtggcataagccagcatgtcaggttttattatatgtaatctttgtaagatggggatcattttgtgtgatatgtctgatcctctgtaacgaaatgcaaacttcacaccggctctggaagacctggggagtaggttagggggaaattaggctaaacattttttagtttcagccttctacctctctcccctcaccccttcttgctcctcctcatctccgtcgctgatgagcatcttttcttttttcaagagcgtggaacagagaaaagggctgattgagcctgctgaagctgtggagcaggcttaaagcaaagccagacgggctctcttcatctcctttccctcttttcttgcttctggttccccagtttttgagctcctttgtctgatctctttaaaattcaatgttgtctggcacagtggctcaagcctgtaatcccagcactttgggaggccaaggcaggtggatcacttgaggtcaggagttcaagaccagcctggccaacatggtgaaaccccatctctactaaaaaatacaaaaattagccaggtatggtggcgagcacctgtaatcccagctacttaggaggctgaggcaggagaatggcttgaacccaagaggcggaggttgcagtgaaccaagatcacaccactgcactccagcctggctcaaaaaaatagtaataataaataaaaaataaaatccaatatcaatgtcaaaattgcccacatggtgtgttggtccacttaaaattaaattattactgttgctttacttataagatgtaacctaaaaatatatctaaaggaaatagaatggatttgatatttgaaatgcatcagaattttaccaaacttttcctttcaactgtactttgaccccttggtagattccaagatgagcaaagaagcccctcgggggcctgtgatttcggttttcttgccacagtccctaaccatgggcagtgcactctccctacatgtcactgaccagctgagaaattctttggagttgggttgcccaggcaaagcctgacagtagggtttatggctacagcatttgtgtttatttataaaatagaatgtggatttttataccattattatttaatgttgccattcaagtttcaatatcctaaggaagaaacagttcacctagggcaggccatgtcttattatttaaatacaaaggggaaactggcttgataatcactttttaccatgaaaagcaacgctctaagtaggaagacactgaggtgccgtatatttctgcctgcccgttccgggagtgatgtttcatagaatgctgaagggagattacagtgagaggcttatcgcacccctagctgttttcctccctcgttcctgtttgccagagtctttgctttcaggaaattcagtggcatgatttttctccttgtagtctaaggattgcatgattcctcggcaaagtgggctttcgagtaggaaatataagctgtgacatatattgggaggttttcccaccgtctttaacatgctggggtgcatgcagtgtagaaaaacatgccaatctgtgaaagaaaatggagaaaatggagtgccctctgaagtctcatgagagctttttttggaattttgtgtttgctgttgttaaaaaaaaatgcaggggcagagggtcgctaggtggaagggtgcttagtagaattgcatattgcaccatattctggaaaaggtaatttgcatgtctgctggttcatttggaataatgaaaggcttaaaaattcttacacactgtcactcacttaggttcccctgacactctggtacttcgattagtgtcactaatgagggactggggacgcttaccaggaactgatagtggccactggaataaggataaggcatttgcatcaggccaagctgttaggatagtattaagttgacatttggttgctgcttaacagtttgcaaaatgacacctttgtctttaagcaattctaaaaacttgattttccctctcttctttggtggtgaacaccaggagcaggaacatggctttagtgaaaaatgagctagtgttggcagcaggtttccttgatctggaagagaaagaggtgtggcaggacctgccactcatacttccaaagggccattcagggtggtatttaaatgtgtttcttttttcacagctgtgaggtgggaggggtggcaggaacaaagaggagagggcttgcagtggtgtgcaggaggcagcgattacagactcataatgcccaggacttggcaagaaaagcctgcgagcgcttgttaagggcctttgttgagtttcataggagcccggagcataagccgctcgcaggcggtgtctgagctgagggttacggcaggaaggtgacagggggtacaatgccaaagggtgaccctagggtttgtctctggagcaatgattcctaactggagctttctgttatacccaaatcttctggctctttgccttggaaatattttaagattccagggtaactaacgattcctagaaaactgccagcgaacctttcctccctccaccaggtttgtcttttcatctgtacgctgctgtgcttgcgaaggtcaccatcgttgggaggctgggatctttggagccacttacttctttccccaaactgttctttccttctttaacctttcttgtcataaaagggaaaaaaaaactccacccacgtcaggttgttgctggtggttagagaaccagccctgcccagggaggaaaagctctcatcaggtggggtgaggaggggtggcccatgctgagctccacatctagtggtgctggactctgcaatgtgacttcctggctgccaagccaacacgccacatctctgcagtggagggctggcttggcagccaggaagtcacgtttcctagattgtttaataaaaggacaggtaacatgaagtgagaaaaacaggatacatgtagacagtgtagtcccaattacgtaaaagaaaactgtgtgtgcacaggcttgcctatgcactctcacataaaggctgtaaggacatggaaaacgtgtcatcactgggtatctggggtggaaaagggttgggtgatttttattttcttttttttgtgagtctgcgtctcctcagatgtctacatggaacatttgtttcttttataattagaagaaaaggtttttaaaaaggaatgaattatcacttacccattggctgagttggatcctgtaacaataatgcttcataataacaggcatctactaaatagctattgtgcccccaagtactgtgttaagcacttaacatggattgtctaaattatctaaatatttacaacaatccaatgaggtagggaccggtagtgccattttaaggatgagagaactgaggcacagaaagtttacttacgtgcccagtgtcacacagccagtcatgggtagaggctggattcctcccctgcctttctggccattgagcctaactgccgtgtgccccactgcctccagctgcgtgaacgggttcagtaagtggtactgatgactaggcaatgaacacttatctagcatttactatgacctttgcattggcctgtggactagcacatagtaattgagttattcttcacagtaaccctttgaggcaggtactgttctcattttaaggatgagctaactcaggcactgggggcacgtcacttactgggcagggctattattgggactctggccgaacggctcccggctgtgctctgaagcgctaaaccaaaagcccttcgatgcagatcttctcaaggattacttctacttctctcaatctaaaagccaggaagtcaatggattcggctccccataccttggccagagcttccacatttcctccaagctgcctcctgagattgctgttttctttccttttttttttttttctgtgtggttccattgttttccccacttgctttttggttcttccacccttctaataggaaaaaaaaaaacacaaaaaacatattgcatattgtcctcggaataaaactcatggtttagagagattctgatagagaatcagcatggaaaaagaagatgcagtgcaaaggaactcggttttgttttgtcttcgtttacagctaatggcagatgagctcagaaggatagggtctctgctgctagcagtgcggagcacatagtgaggacagtggctgccccttgagctcagtgacagcagactgtgttcttaaccttgatcaggctatcatgcaaatttaactgagctttggccacacaaaattactaagtctctgcctctgaagagtttagaacctgaatccagagaaaccagggcatgacattagtcactgcttggtcatgagaaagatgagtatagaattggcttcttattcctagactaaaactttgtaccatatgttgcctcttcattaagtatttcctgaatacgggatcctgaagtctcatctttaaagagccctcttgccctctgaattagtcacctttcatccctaagcttgcttctctgcatatcaggcattagatgtgcctagataatgttgtgagctctctcctaaacagaccagagtcggatgagggatgagggaggatcttggggccaatggtcacaaagcagctaatgagagatctgaagacagagagtctgtgcctaggtcagtccgaaggacgtagtgggcactcagttcctagcctttcttcctgatctagtgagtttagtgcagatactgtaattcaccaggcaaacccactatgagctaaccaaccacaattttccatttgccgtgagcctaagccttgaaagccagaacaacattctgcgttgtgttgtatgagaacaccatcaacattggacctggctgtgatatgaaagttattttttaaagaagaaataaaattaaaaaagaacaccctcaatgcatttaaattttagtaagaatattttataaagcaaatgcagttatatcagaagtaacaaatatagggacagcaaaatttaatacttgggtattattttaaaagccataaagtatcttttggcacagcctttctcattccaactcattattttccaagagaatagactctgtgccttttgctttgcatgaagattttttaaaaattcacagaaaggaacacagcgtacccactttgtacatgctagcaatagatttccattttaataaggtctgttcacaatagaggagtctgaatgtgttttcaagttggttaaagcaggatgccacctgtaccacatagagtatttaaaacacaatggtggccaggcacgttggctcatgcctgtaatcccaacactttgggaggctcaggcaggtgcatcacctgaggtcaggagttcaacaccagcctggccaatatggtgaaacccgatctctactaaaaatacgagaatttgctgggcatggtggcgtgcgcctgtaatcccagctacttgggaggctgaggcaggagaatcgcttgaacctgggaggcggaggttgcagtgagccaagatcacaccacattgtactccagcctggaagacaagagcaaaactctgtctcaaaacaaaaatcaaaaaacaacacggggtgtaaaaacaggtttaaacacgtttgtgtcccacagttgtccaatcagcactcattgtgctaagctgtctgcttcagtagggatcatgtaatggtgcagcctggtgtattaaaaacaaaacgtggattctagagtcatacaccttggaagcagaatttcagctgtgccatttcctagccataggatgtcaagcaaattacttaataactctaagcctcagtttcctcatttgtgaatgggactaataattgccacttcctagggtacattgctcctagaatggaaacttcatagagggattgtttttgtctattttgctcacaatgcatctttaatgccctgaacaggagtatagcaggcatagagttattgtgaggatcccataagatagcagtagcagctgttgcttaccaagagcctccttagtaaatagtacctactttcattttggggactggaaaacaactggataaataacccgatcttggaccgacatgttcaggtcaaaagtccttgtggtcaatacagggcaggaggtcagacactagaagccaagatcaaaattgagaacctgagttatccaagtgggaagtcaggccagcagtctgaaaatagcccaaaaataggtggtatgggaccaagggaaagcttctcctatgccctctgaaggtttgttaaaaatcactgaaaagaggccaattaacaggagaaaaggcatataaattttattaacgtgtacctgggagtctttagaataaagacccaacgatgtagcggaaattatctattttatgtttaggttgaacagagtattgacagccgtgtggaaatatgattagacaaagagggtagatccgatgctaatagactgaacaggggaaacccagcaaggtgtgtctgtctagactccttcggcctccctgagctgcattccttccttctgggtgtgggacaagaccctctctggaatgaggtcttatgacctacaatcaaacaaaacaggtcagataatttctttatggccagtttttacactgaaggcggtggggagttagagtaatatttttaggtttatggctggctttggggaaaaggggctctggtttctatgaccctccttggggaagaggggttctagtttctgtggttagccttgggggagaatgggactgagcgacaagaggtcaggtgaaggtcagagataaacttttgcctctgaggctacttctgaggccttcattttggggaattgttttaattccaagcaatgtgcagatgttaccatttctaggtcatctggggttccaagtccatggggccagtacttgctcctgcagcatgattcttaggagtggaatggtttgtcttctctcctcttttgctgagttgagtggacttgggcccacgggtgtagcaggaggtacctggaaccagccacagattagacccacatgggtgcagctataggactgtaactgctaaagctagcaacaaatacacgaagatccgggggcatcctgagcatccactccagtgagatggcagctccattcaaacattttaaacatttggagaggactttgttttctaagctgccgttggttcgtcatttcacaagcagcttcaccagtagcagaccaagagggaagggaaggacgtgggtttccctagacttgcgtttccctggaaggtttaatcgtgatactcatgcaagaattctggatcacctgagcccaagcccctctccaaagcaaagaaagaagttctttaggccttgtggcagctttgggatgctgagattctagtgctgtgggttggtctttctctacctgagccaaacattcatttaaaactctactacccagggaaatttgaacactgatgggatattggtttatataaaggaactgtagataattttacagctaattttatttaataatatgcttgttatattttaagagctcttttcttctatagctatatactgaaatatttgtgggtgatttcgtacagtgttggatatgtttttaataagcagggatttggagggggaacgtgggttgtggaaagacataacaagatgggctggagttgataattgttgaaggtggatgatgatgcctggaggctcaattgtactactcacatcacgtatgctaacaatttttcatagtaaaaaaactttagtggacatcaacaacctcacatttagtgcaaaatataagtgatttggcagaaccaaggaaggagttatgtagcatgctttcactaattcaggtgggcatttgagatcaaatattatatgctttttaatttaaaaaataaaagttcataagtcatctgcttgaaattctgtatgtcactgtgatttattccccttatctcgaccccagcctagcccaatctggctcctgtttttctagggattaacgttaaggttttattgtgttgttttgtttttaagctctcctgccctaatcgttgagttgacatatgcaatagtttgggtcttttctcctaagagtggaaatggatacaagcaacaggaatgtcagagaagctgtgggacttgccatcataatcttccttgctactttttatgtaaataaaccacagaccaaatgggaacaccagatatcaaacaatattttgtgaaactgttgcatttactgttctctgcccttgtacaaggacatctatcactagctggtgttttctcccacaaagcacagaggacattggggcaattattaaatcaaaagttcccagttggcaactcttcttgatgccaaggacaccagatatggaagaattttcaccttcagtgttttctagtctgactaaatgcctctcgtgactgtattgttgaagaatttcagaagatggtgagggggaaggagccttaaagccaactctaagagaaaagcttctggtcatggagatagcatacaaagtgtgtgttgcggctttaaaaaaaaatttgtgtgcatacacgtgtgtgtatttctttatatatacatatttgttaaagaccatcatctgaactattaagagacaatcaaagggaaaagaggtctttggttgtgctagaccttagcataggtcagtgtatgttctagaacagaaacatgtcagatgatggagttttctagaaaattaaatctaagaccgtggtggaatagttatttaagggcttagcatcatcagagcaatcgtttgtattttcttctgggttgcttttgggaattgctttttgtcagagggaagggtatgtctttagggataaaagaataattggaaatttaaaatatctcaagactcattcatatgccttttgggtcatcagaaactatatctgtttactaatacttgcttgctcagatagttacatttaaaaggagcatgtttttccatgaatgtgaaacttcatttcgtgaagaggcaccatgcttgttccccataacttcctctagtttttgttctaaaaaagtaaaattttattgataggtagttcctaaaaggaaaaaccaaaagcaatggttgatgtaaaattagagagattgactttggagtataaaggataatggaagaaagttcaggagccatgactttggagtatgaaggaaaaacggaagagaaagtttaggagccttgaattaggagtttgaaggagaatggaagagaaggtttaggagccttgaattaggaatatgaaggagaatggaagagaaggttttggagccaaactccagggcctctcccgagctggaggagcacagcaggtctggttctttgtggttacacagggcagggcagcgccccttcagtgattctcaagacgtcacaacatgggtacccggggacttctttagacctcacagtccaccacagagattcaggctcacacaggggaacatgccacccctactcaccccattgagaaccactacagaaagtgaggattgaaagagggacaatggagactcaccaataaacatgattccagggggccagagagcaccatgccccacctggcacacactcaccttccccatgtgttggagggatacctgagctagaaagaaaaggccacaggcctgtgtgtcaggtggacctggctcccgagtttagtcatctctgatatctgggccaattcttttggacctcactttcctcatctgtgaaatggaaataataatacctttatggggttgtaaaggaattcactgcaatgatgctttaaagcatcagcacagatcctggaacatactaagtgttcagttatatcagtggcagtcccctctcccccagtccttggcatctcgggatggtgctcagcctcactgagtttcgcactgtcctctctggaaatacagcaaaccctcctgtgtcgtattatgctcttgccaggcccgaccttgccggccatgtcaccttctgcttctgtgccaggagagactgccctcaggagggtgctgagactggaggtgggggacggagattgaacccccctttccccagggctctgcagagcagaatgtgaagctcacttcctggtgtctgcgatgttctccttggctcggccacaagcaagttcacacatcagctcctctttaccttattggggttgtcactttttagcccacctcctcttctttttttgaccgaatcttttcaatggaatcatcaaatcctgaccctcatctgggaaaaaccctggctgctcctcctcaccagggtcatgcaagaccactccctcctcaccattgacttacattcaaagtaacaatatacttttgtgttccaggcacacaaaatttccgtgactgacagtgccaggcttggcctgtttggcttagataaaagcaattgtcaagcagtggacctggaaggctcggtggactttatgacgttcaatgtcgttctttcctgctgttggcacagatggtgagggctattggcaagaccagctgcatggccgcatgctggtgcaggctgggctgactagacgggtgccctgagagctgagcttctttcacatctgcctcatcagtgccctctgggtaaccttggatttctgtgcccttcacccttcaggccccacagtggggacagtcctatagggagaggtttgagcgtgctattgattttctttcttgtttcatgttgcttttgtttcatttaaagtgttgctagacaatgcctgaagagaaaggctcctctaaagctttttattttaattttacttatttttatttttttaattttttaatttttaatttttgagatgggagtcttgctttgttacccaggctgcagtacagtggtacaatcatggctcactgcagcctccagctactggactcaagcagtcctcctgcctcagcctcccaaatagctgagactacaggcacacaacaccatgcctagctaatttattttttatttattttgtagagacaggtctcgctttgttgcccaggctggtttcaaactcctggcgtcaagcaatcctcctgccttggcctcccaaagcataggcatgagccacgatgcctagcctaaagctttaaacatgttcttcaaaggctgggttctcaagagtaaaacagggagaggctggccaaaagtagaaggtgccatgaccataccacatcagcttcctaaggaggatagaaggaacaaaatgagatttcataggaaaactctttaaaatacaaaatcatgtacagccttgttcttcagtgaaatgaactgaaatatggcagctatattaggacatattattcttgctttaacaagagccagacaccaagagaatcaagaccaacaagaatcatcttaccactcagttccctgattcactgctttgacacctggagcagtagccctagggctatgcaacctgctggaacttcttgtatgtcttccccaagaaacaggtgcatattgcgaaaccacttgttctctttgctgccaaatgtagttgccccctaccctgaactcaggatttctaacacagacccagtggtgatggctgagtttcaggttgggaggacaagtttagaaaaaggaaggagtgtgtgtccaaagtcacttattgacagggagacttttccacagcaattataatcataccttcctgttattattcataatagtaatcctctaacattttgctgtcagcagtgtgacaaattaaaaaacatctccccatagaatatcactggatctttcaacaccttcatgagacaggtaaggtctaattttgggctcccctaaaagtagattctgagacaaggctttgggtgcaagtagtttgtttgggaggtgattcctggatgccctgataagagagtgaggaagtgaaatagaagagggaggaaaaccagtaatgggtgtacggggaactggggctgcacccctgctgtatcctggagagactgtgtggagcctgcctcaagtcgttccaccaactcttgtgactctcaggcactttccccatctgtcttgcaggggtgtgccttctcctctaggagttcccctggcagagtccaacaggcagctagcccagaggggaggtgaagtcatcctctggaataggctgagcaggtgtgcatgggagacccacagcatctgctatggctgtgcttctcacagggacaggttcataggggaagaaacaggcacagtgagctccagtgcttgctcagagtccacaggactccatcccctgccctctgtcccctccaccacagtgcatcccctaaagccccagggcagtcagtattaggagactagcaacagggccagtagcaatggccttctctgacagtgtttctcacacaggggccctgcatggctggtgtggccccttcttttagaggctcttttagagcatggtgattaagattcctgagccagacttcctgtgttgccatcccagaagttctgcggccttggttgagcaaattacttaaatcttctgtgccctagtttcattctctattaaaatactacctatctcattatggctgatgtgaagactaattgaattaatacatatgaagagcttagtagagaataaggaccatccaggtgttcactggtggtggtgtggttgggcatagcgatgctctttttccttctactaccgttttcctggctttggaattaatgtgaaccggtaaaacaaaagctcacatttcattgcagcatttatgtctgatagggatctcacgaagtttaaacaccattacacttcggatgatttatgtatcacctgccttcactgcacgctggtaaactccctaaggaaggagattgcacttgccttgccgttcctggcatcagcagcatgaatcagtgaggcacccggcctttggagctgctcaggaaatacgcactcagtgaggagagcacatccttccataggttcaccagtgacaccaaagcctcatgttacacagcctagccacctgctgctggtggcattaatgtaagaagaattttaaaggctgcacaaaagatgcacttctcccagaattttctctatatttatagaatgctattataagaccctcaaaagtattttcagctgtggctcgattctttaatcccaagtaggatgaaattgaaagctaaaatatggagtgtggcattttaatatgcactattagcatccaccactgatgatcagtattaatgttttattatggatagcactatatgccaacaggtggactacatttaacacttgtttgactttgacacactctgaaaatgcatcagggccaaattgaggagtcctgtttaacagatgacgaatcccttccactgaggtgtacagactcccctgcagcagaagtgacctgggccaggtcgcttgttcacaattaccacgtttctttgataaatgtcagaggcacccagtagagggagatgggtgttggctccgcagcctgtgactcggtcgtagactcagcttcttgtgggctgaattatgtttctctggccaaattccaatgtcgaaatcctaacccccagtgcctcagaatgtatttagagagagggcctttgaaaaggtaattaagataaagtgaagtgctagtgcttcacttcccatgtgaatacacagggaaaagacagccatctacaagccaaggggagaggctctcagaaaaaaccagccagccaacaccttggtcttgaccttctaacctccaggactctgagaaaataagtgtctgcggtttaagccactcagtctttgtactttgttgtcagccctaacaaactaatgcacaatgtctttcttagcaagcgtgtgcagaaaccaactgaggctccctcagctctatgaagtcccagcttccatcctctgagatgctgccattaacctgaggaaaggcttttaggggtaaacgtatttttcttgaggcagaattcagtgttcctggacagaatctgcaccttgtatcttcaccccgtgctcatacatggatgtggatgcacatcctttcccccaagtgtctgtgctgttttgttttggtcgtacttgctttgttttgccttgttctgtctactgtttagaaaaagtgcagaatctctgattagaaggagccttttagggctttgcttctaatgacataaattgctgagtgtgctgcagtagcaatgcatttagaatcaatggacagatatctgctatttctagaagcttatatggagaattgtgtcaattccttgcaaccttggatggtctcagcattcattataggacagtctttcagtaatcacaaagtgaattgtccctctcacatgccatgcagcagctgttggctcccttttgggggccactgttgttctaattgattcttgctggagtgatggggctcagttatggctggagtggacgagcagacccagggttagcctcagggggacttagtgtaggctgatagttgcaaacatgtaccaaagaaaccacaagaagtgaatgttaactcactttttacaaatcatctcactcctgccctttctttgtctccattttttctcactctactgtccctttattattttgtctctgttgccagagtgagcaaatcaaagtacaggacaccctgttaaacttgaatttcaattaaatgacatataattgttttagtataagtgtgtagcaaactcacactaaatcaattatttgttgtttatctgaaattcagatttaactgtgaattctgtattttatctggtaaccctatgtctctcaacatgacttttgtgtgtttcttagatatgtatgtatatatgtagataggactatagacatacacatagctatcttcctcacagactttgctaatctgtccttttccattgtaaacctaccccaccctacatatctcccacctttattcatatctttaggggtttttatacatatcttttcttcttcctttgttcatgcctttgtattctattccctattgtatatctccctaatctatccttaaaaactatggtatttcctcctaaatattggtcatatttaatacgtactttaagtttccttcttactttaaaattctgagaagtaaaaatcttcaggccaggcacagtgtctcacacctgcaatcccagcactttgggaggccaaggctggaggattgcttgagcccaggagttcgagaatagcatgagcaacaaaatgagatctcatctctacaaaaaataaaaaaattagccgagcatgttggtgtgctgtctgttgtctcagatacacaggagtctaaagcaggaggccagcttgagcccaggattgcttgagcctgccatgaggtgtgaacttgccactgcacactagcctaggtgacagaatgagaccctgtctcaaaagaaaaaccaaacaaaactttctagctatctctttaaaaacagaacttgcattttattgtcattcttatttatttgtttatattgattttaccttgtcagatcaatggctcgtcattgaaaatgggatgatacccttagacagaaggttggtggggtagaatacttgtcatgtaagaaccttctgggcaacatggaaagtttaaggaataaatattttttcactcttgtcatattttattagcaaatctcaaaatccaccagtcaataggcacaagttactctaatgtctattttttcgcaaatcactatgctaagctatgggagacccaaatcagtggagccttatttgtctctgccgtcaggtaagacatatgaagagataatatgaagtaatatatattcattgtagcaaagaatgtaggctgagcgggaactgagtgataagagaccttggtgattaagggattggatgagaatggctgccctccttaccagcgtgaagcacagagcagacagtgctggggccctcactgggaactcacacacctccctcaccttacaccctaaccacctccctcacctcaccttgtccccaacctgtgacatagggtagttaaactttgctcccccataatctggcatttcagaagataaactaagttgtttctcttaaaaagaatcatggcaacgtgtccctgattcttttggaaaatataaattgatgaatttatttttcttgatttttagtagattatgccccaactcattccacaaaaagttgagacagtgattttcccgcagagttttcctacaccctttccatagtacttggcttctacagatttttttttctggtttataagatgtctgatttattttttgacaaaataaaccagaaagctcagtgcaggtgtccaccaattcaaggagaagacacacttttcagagctctgcttcctatggcccagctgctgttggccattggtgttacctggggtttctacattctcccacctcctacccagtgacttctcccagggatgttgatgactgtggagctttaatgtatgattttctttaaactattccatgtaaacattgaatatatctctgtgtgtatatgtgatttaatttttaaatggacttttttagagcagttttaggttcacagcaaaattgagcacaaagtacagagagttcctgtacacccactgctgccacacatgcacagcctctcccactgtgcacatcaagacttacattctgtattttttaaagattcatcatctttaaaaccctccttttcatggttgttgcagcatgaacctattgttactcaaaatgagcagactgagtaccagagattattggcattttaatgtgatttctttaaaatgtttatgtattagtttttatggtaagtgtcttacagtcatattacatagccatattttctcatattacatagccatattttctgccagtacaagtatttttggttcttaaagtgaaatggaatatactagagatcagaatagtagctgacacatcaaaggcagttgatgatgtttgttaaactacattgatattctatttctcagagtcttgtgacttccagatgcttcatggtctttaaatggcttctcccctcaccccaccctcaacaaggctgtagcctcttccatagcgtgtgggttaacttcactgaaataccaaggaggcagagacccatcagcacaaaagaaggacagtgtgtaaggatatatcttaggttcagagcaatggttacatcagcccacaccactctcattacatatagcctcaatcagcaggcctaattttaggaggtgcaagacaaaaacagtcgagagaagtgaactaaaaatacaccccccttattctgttacaatgtacttcctcagatagttggtctgttccattaagcaaaattctctgcctatcatagttgtcataaagacttttcgatgatgattaagaacaatgagagcctacattttattttgattcattgcagctgtcgtgaccttccacttatttctgctcctttttagaattgctggcattcacttaaacagatgctactgtacttttcagggagagtttgaggtggccccattttattaatatacaaagagtgtcattaaggagggtatgttgtatgagtcacactttaagtataccagtgggccccttctgtgattctcatgacaaaaatacttgtttctattttcagctcccactgtatttttcacattgaagaacctattttattttaatgaagctttaagagtgcttattatgtataagacactatgctcagtactggaagggttgattgagacataattcctgcctcaaggaacttacttggagaagacagatacatgtcaagatgtgaaactaggatgtctgcagttggcacttcttagggagggagctgtttttggggaaatatcttcatgaactatggaggtagggctggaacttgagggcaggaacaaggtagcagtaagaatggataaaccacaccacatgagacaaggcgaagaattcgttccatgcataagaggctgggcagagggagaagacggttgagcagggagctgagagagaagatccagaacactggtttgaggtttgggacaaaaggagcgctggaccaggtgacattccatgtcgggaagatcaaaggccatctgagggccagggatgcccagtgctcagtgtgagggtgttgatgatgcttgggagggagagcctttctgttctctaccacatttcaataacatctactgtgcttatcaggaatgctttatgtgagtgttttggggtttctttgttttgttttgttttgtttgggtgtggggactatcccagaaggttctgagctgcatttctgagagcatgaggaatacagcagagacaggatatatgaaagtaggaacctggaagcaaatgtgaccctgagacacaagctcccctgaaattgcagaagtctttggcaggcattgtacttcctgagggcgtcaagcgggaggtctgagccagtttcctctcgatctcaagggcttgggaaaccccagctgatatctgcttgtctgggttaaactgttaaaatgcatggccattttacataagtttataagagtggaaatgcacagaagggaataattaattctgactcagattaacttagggctccctgagagagccttcatagctgggccttggaagctgagtgtgagttcaataaacagaattggagaaggctgtgtcaggtagagggaatgcctgagaattggccttgagacaccaactgtgtggacaggacagggaatggagaactaggcatgtgtggttggcatctatagtgtgtgggtgggtagaaacatggaccgtggtcagattctggaaggccttaaactctgtgcttagtgaattttgacttaagtctgtggatgtctgatctgcatctagagaactaaattggagaaacaacatgaaagtttgtaaggaaaagttttgaaagcaagagtcccattagaagaccatttaaatccatgattctcaaacttcccacttccacctatacacctactatagtttggatacttgtctccccaaacctcattgtgaaatgtgatccccagtgctggaggtggggcctaatggatggtggttgggtcatggggacagctccccatgagttcgttcttgctgtattagttccctccaaagctggttgttaaaaagaacctggtgcctccccctgtctctcttccttcctctcttaccatgtgatctggacacactggctccactttgccttctaccataagtggaatcagcctgaagcccccaccagaagcagatgcttgcgccatgcttcttgcacagcctgcaggactgtaagtcaaataaacctctcttttcttcataaattacccaggctcaggtattcctttatagcaacacaaacagactaagataacccctggaggatgatctactcccatcgctaagattggagccatagttcaaatggtatgggtgagaagtaaagagagtgaacacaagaaattgtagtagaactagaaaggatggtaggaatcagagatacatttggaggcacggttgataggtggtaaaattgacaaattattgatacagggaattgttggttttaagtctggttaacttgaaagatattattgagctctgtatcacaataggagtaagagatgcataggagtgtgtttgtgcacggtggggagcggtgggggtggggcagagattatgagtttggttttggatgtgttaagattgaggtactagtgggatatttacatggagatgttcagcagccagttggaaatgcaggcctggggctgcacactaagctcgttcttaaatgacttatctatgtcgcataaatgccagcaaagcccagaggtagatggagtagattctaggtgtttcagctcattcctgagcctcaccatggaagtaatatatggaagtgtctggatttccccctactctgtccctgcccataggagattctcagtgaatgtttgtttgagtgggagcaataccctcagtttggtgattctggggggagtggaagagtttatactttacttgcaaatcatgatatggaagcactcatttactatatttgcttatatttgaccttttgtccatgaacatatggacataacaaatattttcctaggaaaagaaatgtaactttacaagagagatttttcttaaatacacagggcaaaggggtggtggcaggggtactgcacagtcttagtcctgccttcctgcctcctttcctttgttttctcttcgttgtgacctgttagcatagtagtttatactaccttctatttgccatttatttatttattaatatattgcttgtttattgtttctttattatagatatttgtcctctaaagagcagcagcctgagtctgtttttgtagagaacttagaccagaatggttgtgcttaatagaagaagaaagtcaaacaagtacggattgaatggctggcgtgcagggtcactgggcttatgtggtgaaaaatgaaggaactgacatttacccctcagggttgttgggagactcacatgccatcatatctagggacagacttataagctgcaaatgtttgcaatcataggacactgatgttgttgtcatcgttatttggggaaaatcaggtaaatgaagaaagattcaccagagttttcagaacatacttcatggaaaagatatatttgagccagacagagccattgtccattcttacgcagaagagggactgatggcatttggggaagatttatctggaagtgtttttgcagcaattcagccatgcagtagcgggaagccctggtgtggttgctgacatgggaggggaggtcattctggcactccatggtgtccacgggtcccctgaggcatataattcatggggcattttcttcccagaacacatccatttagattccttgctggcagcacctcctggcccacttaccttattctgtgaaggcctcacacacacacaaactagaccattagacaactcaacttgagttcaagatgaggctgggggagatgctccttctttttcctagggaaaatgtcagacttggttgtttccggatgtctaaactttctcatatgataaaagatactgtagggccaggaaatgataaaaggtcagtaagacatgggatagtcggcaaggatggtcacttgggctgggaaaggcctggtcatttgttggcctggggatatattatcatctctgtcctgaaaatgaaaagaaattagaactgagcaagtggcccagtgggcatatcaaatttttatgtgtccatggttaaaaaatgagctgtgcaaagagtcggcagtgaaaggagcaacattgcaagcgtagtttgtgtccgttaatggggctcactgttttggccagggtgtaagagagataataagcttattgcagtgtgttgagtttaagttgcaatctctaaataatatgccaacactgttatttctttatttatcacactgagacatcatctgttgacttgctactatgagtgatgaggatttagcttccttgaatcatccctcttctcttcttccccaccttcctccttattttttttatccttatggcactatttttacttccttttgtggttacctttgtaactttaaataatacactgaagcctctgttgcttttggtcagcttttgacagcattctttcaccctctgttttgtgaaatgaggttgtggtgcctctcccttttgctacatctcttttctatcttccatgtcccaatttttctcaactgtattttttattttgtttgtttttatttatttattttgaaattaacatatagtaagactgacttttgcaggggagggtaacaactttgtaaattgcaacacatgcatagatttatgtaactaccaccaccatcaggacacagtgcaattccatcacccctaaaaactccatcgtgccacccatttgtaatcacaccttccttccacccataatccatggcagccactgctcttcctttattatcattattattccattgctgggtagtagtcctcagcttattaatctattcacctcctgaagtacattttggttgttttcagttttgagcaattatgaataaggctgatctaaacattcatacataagttttcatatgaacataaatctctgtttctctatcataaccagaccataccatcttgattactgtagtttacaggaagtcctaaaatcaggtaatgtgagttatccaactttactcttcttttgcaaaatcattttgatgattctagttcctttgcctttccatataaattttagagttagcatgtctatatctattttcaaatcttactgggattttgattggaattgcattgaatttacagatcaacctgggaagaactgacatctttcctatgttgagttatccagttcatgaacatagcatatctcttcatttatttaggtctactttctttcattagcattttttgattttaagaatccatatgctgtgcgtgttttgttagatttatacgtaagtatttcctttgtacttggagcatattttaaggtatttttaaatttttgatttccagttttttgctggtacagtatatagttttgtgtactgacctggtatcttatgacctgactaaattgacttatcagttctatgagttttctacatagaaaatcatgttgtctgagaagaggtacaatttttatttcctccttcccaatctgttatgccatttatttatttgtcttatgttattgtacttgctagaatttccattatgatggtcagtgagagtggtgagagtgaatgtccctgctttgttcctgatcttgggagaaaatgttttaccactaagtgtattgtcagctatagttttgtttatttttttaaatcaggttgttgaagtacccttttattcctagtttgctgagagtttttatcatgaatggatgttgaattttgtcagatgctttttctgtatcaattgatgtgatcatgtgatttttcttttttagactattaatatggtggattttattgattgattttgaaccagattttattatattgtattctcagaataaaccccacttagtggtagtttattattatttctacatattgctggactctgtcagttcttcatagctaaggataacgtttgcgttcagttgtgtaatcgtattaagtgtttcctgctttgtctctacaaatgtctctaaaagttgaaaatctctgaaagacaatacttttagggttatgaagtacaaatactgtctgtatggaaacaaataggattgtatgattgcatttctctctctttgtgaccgaaatactctcaacgctttaatagggtaagatatgataactcctttcttactcttattaagttactcagaatcaatgtctttcttggacaattttctctttttcccacatttcagattctctatttttagtagtggttgaggaaagggagccatattctttcttcccttgaggcccagcatcgcccagcttcttagacgttctcttgctcagaatgtgttccattcttttctaatttgaactggctattttctaggcctgctacacagctgtcttccagggatttctttttattggatctctggctttattccagggaatgcaagctttaaaacaggaaaaggtggagtctgctgaaaattattagggggaactgatattaatagctaacatttattgagtaattaccaggtgccaagccctgttttaagctcattgtagggattgcctcctttaatctgcactacaacttatgtggtagttattactctcttccaaattttatggatgaggaaattgaggcttcaaaagtcaagtaacctggctaagttttgccaccaataaatggtggacccagaatcccaaccgaggtgatgggactctggagccctcatttttaactgcaaagaggggctgtcttgggtgtctttaggggtgacttactccaccaagcacacttggccactggcagactggacccagatgctttctgaaatgcagacagccagaacagaatagtaaattgaagaactgacccctgaactcagctctttccactataccacactgccttcttaataacgagtgggtaaatacgcttttggcagcccaactagcaggaagaagtggctcagagaagagccaagaatgttgaaaacatgaaccacagagacactaggggtatggaggatcactgcaaaccaaagaaggacttgttgggtgcagacagggaaggaaaggcctctactcttcattgacagggcctagaactggagtgaggccgagggatgacacagttatagaacacatatgctcagcagcctggtctggtgacctaggggcccaatccagagagatttggaagaaggttctggaatggaagagaattccattagatccagcaatgcaaccatttcaggactgtccttgggctagctgtgagtcattgtttctctaggattcaatccaagtctggacccagaggcgtctgttggacttttcatgcaaaggtcctagaaactgactgtaagacaaggaagtctaggctgggcatggtggctcacgtctgtaatcctagcactttgggaggccgaggcaggtggatcatctgaggtcaggagttcaagaccagcctggccaacatggtgaaaccctgtctctactaaaaatacaaaaattagccgggcgtgatggcacatgcctgtaatcccagctacttgggaggctgaggcaggagaatcgcttgaacctgcgaggtggaggttgcggtaaaccaaagtcgcgccactgcactccagcctgcgcgacagagcaagactctgtctcaaaaaaaaaggaagtctagattcacttacattatcatgtataacagacaatactgtggaaacatcttgaactttctagaaattttggaattttcccttgcttagttattttcattacctttgtctcctttcatatgtgagcaatgttcataaccactattattttagagccaacaaagggaggccaaatgccaaagaccctgcattttgccctgcagccaatagggagacaagcaaggagagaagaggcccaacactcacaagagagaggtggaccagcagggctgctccataagaggttctctgttacctgacaagggagtttcaggtacagcttatttacagttgagggtatcagccacacagcatagggttactctgtgcactttccattttaagtgctttcagtccccctgccaaggtggctgctggcatttaatgcactcatcaggctcttctcagagcctgtcattcagccttggctgtcctttctggctctggcaaaagcctagcacttagctcctttggccccagccttcttcggcgctccactcactgtctgtttctacccaccctcccttttccttctctgatgcccctttcctgcccactccttcctgctctggctctcacactgcttgtgaggcaacatctagcctggcctcaagccagagagcagtgggacctctccgctctcccagcttcaggcctgtcttgtatttcctgggtataagaggctgtgttgtgatgaagaaagccaaacttgcctgtactcactgctcagctctgtacttggtagcagtggatggtctgcttcacccttgtgcctcatctgtagactggacataatactcataactagcacctacattatagaattgttcagggcctttgaaatgaattaatacatgcaaagcagttgggacagtgcctggcacatacaaatgccttgccatttctttttattattggtattgtcattgtcacccattgcatgttgcagccgtcttgttaattcctttacccaaacgccaaagtcaccgctgtgtgcactctaagtagagagaaggagccgggactctgtaaaagactggttatttcaaatgagaaagagagcaaggagccatagggacctttgaggtttcgagcctggatgaatggggagaagcccttaacagagactgagggccagcagcactgtgagttggaaataacaacggtaatgttatttcattagtttgcaaattaatctgccaggcgggggcatgtttctttttgatagtactttttgtctagaagaaatagaagatatgaaacctcacactgttctaactaggtattatttattagttattcctggtgccatgcccttgactcctggctctgcccccgccccctccacaccccagctttttttttttttttttttgagttcatgagattgttctttctaggtccaacttaagtttgaagatcaaattttctcgtaatttaaaatttagtcttaaaagcctgagaatattggcatcattgtaaaggagagaatggtgcggaattgaattcacatctctagggacacagtggccaaaggataaaaagggtgaagacattaggatgaatcagggctgaaatgtgacctcaaaaaacagccacttctcttcccacacctgcgtgctttgtgggagcagataaatgtcaggggaggcagagtcgaagatccagggactaaggtttctatagagttcatgtcaacaaaatactgataggttgctcacagtttttttaagctggattcactggtaagagaaagtggagtggcttagtttttgtgctcaaaaataagaagcaagaccaatatgtagaagctataatactgggcaagatatgagcagtgctgtagagaattaaaaacgatgtgccttggcagcggaaaagcagatcacacaaggaaaagtttagttgagaaagtggaaaaaatacattttctaaagtaaactgtatttggtgtcaagagcttcacggggagatgaaaggtttggcagatatggcagagtggggtgtggggcatccccagaagaggaggtgggctgagcacaggcttggaagtgggaaagaagagacaggggataaacccagagcagctgaaatgaggctccaactggccaaggaaagatatcttgggacagtatggctgaattccttgattcggtagagattagtgggccattgaagcattttgagaagaggagttaattagcactttaaaaacgatcatttgaaggctgtctcaaagagagatgagagtccaattttggagaccagctaggaggctctgggtctagagtataaataatgagaagtatatatatatatatatatatacacacacatacacaaatatattaaatatatgtacatatatgtgtgtatatacacacatatatacagtgatgcatcgattaacaaagggtatatgttctgaagcgtctacattgttaggtgattttgtcatcatgtgaacatcctagagtgcactcacacaaacctggatggtagagcctactgcacacctaggttatgtggtatggcctgttgctctaggctacaaacctgtatggcatgttactgtactcaatgaatcctgtaggcaactgtaacgcagtggtaagtatttgtgtatctaaccatatctaaacataggaaaggtacaataacaatatggtattatactgttataggaccaccgtcgtatgtgtggtgcattactgactgatacatcattatgcagagaatgtgcacacacgcacacacatgtacatacaccccccaagcacaacatcctggcaatcttacccatacttcatccccactcttttttttttttcattttttgagatggagtttcactcgtgttgcccagactagagtgcaatggcgcaattttggctcactgcaacctctgcctcccgggttcaagagattctcctgcctcagcctcccaagtagctgggattacaggcatgtgccaccacacctggctaattttgtatttttagtagagacggggtttctccatgttggtcaggctggtctcgaactcccaacctcaggtgatccgcccaccttggcctcccaaagtgctgggattacaggcgtgagccactgcgccccacctgtatccccactcttaacaccatgcctagcacagagttagcactcaaatcttaaataatattgggttatattactattcaaggggttcgctttactgatttctatttaccatcttttcaagccccttctttccagaagtttctgtgaactacttttaccagttaaagtaaccatcatgtgcatttaaagacatgcttttgtctagtgtctgatccaccatttatatgtttaatgtccttttgaattgctagttatggggtagttgagtctctaatccctgcctctgaaatccatctgtatctgcccaatttacacatgtcccaaatctctctttctccatatttctttctattcttcccatccctaacatttattcttatatttttctgattattccctactaaagagacttagaattaatactggaatcgaaattctcattgttgctaaaaattagtactacaatatattgccagatgtgcagtttgtagttaggaagggattggcacacagtagaactgcttgataacactggtttgggtaggaaaaagctggcatttatacataaactcatggtaccccgtggaaatctgggcaagctcagcaggcaatactaatgaggcctctgattttcttccactgggtgagatggaaagtcattgcagattttgagtggaataacatgatctgggtagtagatgctctgctaagggtaagcatgttgctctaggaacacagatagggatcttcatctggacttccaggatcaagaggcctcttgggagacagccaagaggcaagtgtaaaaagagcagagatcagctcaagccaaggtctcgaggtgagcaccagcatggaaggctcaaggagtggaaagtctgggctggtcactaagggccttatgcatcgtgaggggatttgaatcctcaggattcaattcaaatggatgcagcaaagaatgacacaattaatgatacatcttttataaagattactctgtctgttgtgtgggggagggcaaggagacatgaaaaccacataagggaatccagaggtgatgaatgcctgcttaaggcatcatggcagcgatggagaagaggtgacagatttctgagaaatcaggaaaaacaacaggagtttgcaatggattggctgttaagaataaggaaaagggatgagtatgaggtgacctttacatccctaagcaaagatgtgacagctgcagatagtaaccaagttatgaaagtggatgagataaccttgatgggtatgcttgttttatgagtgtaaagaacaggaccagactcatagccccaaaaaaagaccccctcattttgctttacctccagggaagcaaaggggcacagggtgaatcagctctgtgctccaggtaacagtcacagttctgtacactgtactgtttaagatatcagaccttggccaacatggcgaaaccccatctccactaacaatacaaaaattagctgggcgtggtggtgtgcacctgtaatcccagctactccagaggctgaggcagaagaattgcttgaacccaggagagggaggtggcagtgagccaagatcatgccactgcactccagcctgggcaacagagtgacaccccatctccaaaaaaaaaaaaaaagaatcaggctttagaaaagaaggttagcaggtgcattctttttgagcatggattggaattggatatttgggtttctaaaaatgagacttggaactgttagatctcaatgtacctcattctagaacaacttgacttatgcacatatggggtgcagggaacactgtgtcagacctgacaggagaaagttagttttttaagcaaatatttcatgtctctcttttggattccaggttctctgtgttctcctacataaagatggcaacagtagaagggagacattgccattctggctgtccttgggattcagacttggtaatgaactgcaaacaccctggctgctgacgcctgtctgcccccaagttttaggagacaggggtaggctgagggctggggtgatcagcaggcttgtatgcctggaaacctgtgcactaattttcggttcaatggccacattggagaagctacttttaggagaccgcaaggctgaaattgtattaaaacgatagggtttggacccttgttgagagaaatgacccgctagattagaatcaaccagctaaggtttttattagtatttttcacaattacgagtattggaaaggtgaggatggcatatggtgacagggtgccaaatagcaggagatgtgtatgtcaaagttttgatctgggctggactgtcatctcccttccccagcctatgctgtaaggcagttgactcatttgttggaatgacaaatggacatgcgaaagcttttataatgtatccaggtgagagaaaaggcccctccgtattttttttattctatccttgactttgttaagactgttgttcaatttttgtatttctaatctcacaggcacacttcaggtctgcatcctttataaccaaggggatgagctaaggtgaacgtctattctacgatggttcatcttttggggattctgggctgtcttttttgaagcttgctgtagagctgagtcaacaaaagctttatgtgaaacccaacaaattgtcactactcaagcaccatgttaatgagacaaaacaagagtgaacttggaagtaatgttttgttggcttcttttttgttttgttttgtctgtgtgtttttagtttttggtgcatagttttgccgtgggaaaagtgtccaggaatggctttctctcccttgactgtctttttagtgacgttgcccatgatcaggattgcacaacatgaaacgttcagtgaatatttgaaaatcctttctttcctgtttctgcatcctgtaaccacagtaacaagaattcttgaggtggcaggaggttttttaagacagcaaattatggttgaattgttaataaatattgcagatgaagtggagaaatgactggttttgtgtaaagtggccttcagtgtgcaaatggatatgtccttttgtgcaaaaccaattaagtctaaatatactgtatatggtcgcttttgccacaaaattgttaattccttcctgccgcacaggagaggagaggattggcgaacactatattaagatcaggtgaggccgggcacagtggcttacgcctgtaatcccagcactttgggaggccgaggcgggcggatcacaaggtcaggagatcgagaccatcctggctaacaccgtaaaaccccgtctctactaaaaaaaatacaaaaaattagccgggcgtggtggcgggcgcctgtagtcccagcaactcgggaggctgaggcaggagaatggcgtgaacccgggaagcggagcttgcagtgagccgagatcgcgccgccactgcactccaacctgggcgacagagtgagactccatctcaaaaaaaaaaaaaaaaaaaaaaaaaagatccggtgagagagacctctagcgggagatcatcggggcgctcatcagggccgacactggagcagaagacagctgagaagtcagagagggaatgttaaatttagcccacaaggttgaactgcaccgtgtaagtaaacacactgtgacttgccatgtcctcctgctgacttggaagatgtttactaacaaatctgccctgtggaattgtcaagaacttattgaggcatgtccaaagttaaaatcatcattttaaggacatgcaacgttcttcacagccctcacctgaaatgcctggcctgggcgaggtcaaggagtgggggataccttttggtaataaacagtctaaattggatgagatgaccctcccctccaatccccaagggctagtgagggatggggttttctcatcattccagttgcttttttaaagaaaagaatgcaccattctcacccttgccttccctaaggctcctctgagttgggctgtgaatattattataattcagtgggttatcttcttatactagaaggaaaattacaaagcacgcttttttccccaaattccctgaccataatgcatacctgaagttgtaatgccaaattcacacaaaaattttcataccctcttagctacagttgtgatatttctttggtcccttatttctgtcattcattatttataaataaaatgagaggaaactttaaaaatcttaaaattttgcagcttaaaatgaactcatgatattaatggtttatatggggtttttaaaagcatattgtatgggaaatgccctgcctttctaaaataaataaataaatacatacataatatctccagtgaatcaggattgaggctccttgctctccactttcttgttgaccatcattcataagtccctctcaggggttcaaaagcttgtttccaggcagcaagaatcagactttgaagcctatgcccttcaaaacctgcataaggttcataacccacacagtggagtctgccagtgaaaatgtggactcaacacattttagccaaaaccgcaactgcctctgcttctagtctgtgacaccagagagcccatgagtttctagtcagccaacctggtttgtccttttttaaacagaaaatggcaatagcaaggattgataaatactatttatactccagggatcctctaaggtctcatgtcttccttgaagcctgctcagcctgaaaaacatggtcatttctggcctcttggtggccttcctctctggggaaccagcatggctgcccagtcctgtgctgtgcattgcacagtggcttaactcgctatagtgtatgcctctctgcttggtgcatgcgtatgcccttaagagcaaagacagctctgataccctgggtctagttcattcattcactcactcactcaagtcatttattcattcgttcatacagtagttattgagccagatccaattctactcttcggggatatttttgtgaacaaaacagacagaatattttttcctgatgtggagtccttggggttaatgaacattcaactcataatcacaaatggaaattttccacaatgataatataaacttataccctatgataaatgtgacagaggaaaaaggaatatggtaccctcagagaaaacagtgaatggccttatttagatttggggtcagaaaaggcctctgaagtggtgatatttaagctgaaacccaaagatacatggtatccccgtacagtagggctaacaagtatttcttgctttgagaaatgatcagccatttctaaggtcacgtggctggtatgaaccttataactgtggagaatcctcctggctgtggcttccagggcaaccccttccctcctttatttgccaccaatctcctaatgttctttctggtgttccctggctctactaacccgtggaaacctccaccatgtcagctgaagctacagctgaagtgaagcaggtgtatctcagggctacttgcagaaataggacaaaactttttcctgcaaatatattaatgaagcatcttgcagtccatcagacacttatcctaatgaaagagcatgtatccttggtagtcatcgttgcaaagtgaaaagcacatggcctttgggattcagctgatctgggtttgaaccccagccctgtagcctcaaacagacgatttcttagtctcagtttcctcatctgtaagatgagggcaaactcactttaaacgcacaaggtcttgtgaggactaatgtaacacacccaggcacagaagacagtcaccagacattcattgtaatcttctgcattccctttctccacaactttctgacctctatgggtcccagtttcccctgagctccccagttctcccctatgctccatgatcacatgaagaccaccatcctccattcaaagccagctcctagagcatgaatctgcttcccttaagagacacaatgggcccagcatgagccacccaggacccaatagcaaggaggatgtgagtacctaaggactgagcaagacttcggtcttgctcagcagaacagtccaggggatgacagggcacaggagcaactcccatcgtcaagtggggaatcagtcaaggatttggtccaggaggggacctggggcaccaagcaggatgatcattcaaaacctgagagcaggggccaggtactcaaggacagaagccctggggtggggagtgcaagagagaggaaagaggggctatgatttagggctccctaagacctccaggagcttgtgcacaagataggcacttgggacttggtcatctaaaataaagagtcccttctaggtcaccaggaaaagaggtgtgagcaggacccaaaagtgtctctcccataggtaatctgagatcagccttgggagtgggacggggaagacagagaactgcaagaggagaaactgacagcagacaggacattttgcttatctgaaaatgctactatagtcaaatcccttttactcccttacaggtaagcacagacacctccagcttgcgaagggcagatccgaaaggccggagtgcgctgttggctgatatccagcaaggaactcgcctgcgcaaagtcacgcagatcaacgaccgcagtgccccgcagatcgagagtaagtgagcagccgggccaggcctcctgtgagccaaagacaggacaggcatgtgaggcacagccagacacccctggctggggccacagctgcttcccaggatgcatatggagccatctcagacctgctcattggacaggccaagtgggcgagagaaccagagctttccctccaaatctgcaaatggtttagagcataacttccatccttttcatatgctaaaaagaacaactctgcaatgggacacctatttaaaaattttgataaaatacacataatataaaattcatcattttaaccattttaaagtgttcaatcagtgccaattattatattcacaatgttgttgcaacaatcacctctatctagttccagaacatttacatcacccctaaaggaaatctcatacccattagtaagtcattccccattagtccctggcccttgccaacccaatctactttctgtctctctggatttgcctattctgttatttcaaagaaatggaatcatgcaatatatggccttttgtggctggcttccttcacttagcataatgttttcaagcttcatagatgttggagcatgtatcagtacttcactccttttatcattgaatatttaattgtatggacacaccacgttttgtgtattctttgtagggtaacatttaaagatcactcaccttgtgtcaacatggtccttaaactcagtgatagaaagtgaagggctcactttgtaaaaaatgcaaaatttttgtttcacttttcacaaggagaaagatttattaagaattctgtttcagaggatgatatgactgaagcttgctgtcttctagaatgtgacagagtaaattgagtcctgtgctcaggtcagacgacccacattgagttctggttctgcaaccagacaaatcggggagcctctttgaggatgtttggtcatctgtgaaatggggagacaatacctggctccttttttttttcttggtcgattgttgaaagttgaaataatatatgcagaactctttagtacagatcgagcatccctaatccaaaaatcccaaatctgaaactttttgaatgtcgacatgatgcctcatgtgaatgatgaagatgacgttaaccctgaagaaaatgtgcctccaggtgacatggtggaaatgtatgatgtgtttactgaaggacaagagtagcatacattcataacagaacaagaaatgatgtcagtttacaaaatcagagagaggcttctgagacaaaaaccattgttgatgaagcagatgactctggaggaaacatttttaaaagccagctagcagaatgctgcctcaactctagaggacctacttcctggtctctcagtggtttctgatgtttcttctcacctaaaacaatgagatccagtgtccagtaacctttaatcaaaacacagcatcgcaggagactgaaagcctgcctttgtttgttgctgccgttgtctaacagctgatccgggtattctggtgatactactgtgttgcttagttaccttgaacacattatttttttgctgtgttaatggtatgccatatttttaactgctaagtacttatgtgtgaagaagtgtaggaaaatgattgcttattggtagcatagaaattcagtgtcaggaatgatggtaatggacaaaccacagattgtccacatgggaggctgagacggtgacacctttgctttctgatggctccatgaacgcaagctttgttttatgcacaaaattattttaaaatattgcatgaaattaatattttattaacttcaggctgtgtgtaaaggtacatatgaaacaaatacatttcatgtttagacttgggtcccattccccaagatatcgcattatgtatatgtaaatatttcaaaattttaaaaaaatctgaaatactttggtcccaagcattttggataagggatactcaccctgtaatgtaaggtattattatgtcttcctatgttttgctatgatgtgcgtgatggtaattcttaaagatagtcctaaaaatagaattatatctcctatctgtaattataaatgtcaacacacaaggatagacaaatttttaaagaaatattttcaacattgagaaatattttcaacattgagtacattaaaaattagtttctggttaaacccatgatcgaattggttaagcctaattaacaggtaaatcaatttcattgaaacactcacttcctaatcattctcatgagtaagtaatgtacaatattaatactcagaataatctggccactttcatccaccagtgggcactgtgccctaatttctctgtgcatattagcttcaagttgttaaatattttctgccaggaattcttgtctaagctgagtatcttctcgttttctgtagttggtaatcacacatgtctggaaggctggagttagtgacacctttcctcaggggctcatgatctttccgttccatagatgaaaaggtgcagggaggtgcgaggggctgggggcttgaaggctggagagacaggaaggaaactgccagggcacagtcatggcaggctttacctcctgcctgctgttctggtcagcgctctgtggacaagaagttaaaatgactgactgaattaaatctgtgggttttctttgtctagtcctccatagccaagttgaaaataagagcagctctacacctaccacatttgggttttctaattcgaaggtgctgccagttgctctgttagcatctacaaaatggcagtgttcaggtccctttgttttggtcacttttcaggggagctgggcacagatggttagttctttggtaggactggagagggcagggcatgtgagtctacagggtatcaaggcagagggtgcttggggaggatgctgagtgaaaggatgacattggaggtgggagaatgggaaggctgacaagggcagtggtagaccagtgttagaccatggtctgaaatgagacctggctgctcagctctgctctcaagtccttgcctatttgtgtcttctctctaaaggttctaaaggaaccaacaaagaaggaggaggttctgcaaacacacgaggcgcgagcacacctcccaccctgggagatctgtttgctggtggctttcctgtattgcgaccagcaggccagcgggatgtagcaggtaaggaagaattcattctggctcccttgtggtctgtatctccttaacttgtggaaccatctgggcaatccacacatgccagtaagcaacatggttttactgaacgggcatgatagagtagaagatcatgttcttgggaccttaagcactagaaacttccaaagtacaaaatggttcttgagaaatcttttaattcatcatcctgtttaaattattccattgtaatagcttaaaaatgacttgtaatagtgtgtaatacttagtgatggcgtgatggtagcccagactgcaaagtgtatataaacagaaggtccaaattgtaatagaacttcatagtgacatcactgtggatgcattagcaatgcatgagttgtaatgattcggtcatcatatcagttaggtactgctgtgtaacgaaacaccctaaaacttaaaagctttaaacaatcattttttagcctacaattctgtgggttagcagcttagagtagtcttggctgggctccctcttgcatctataaagaactgcaggttgtgtaggtagctttgctaatcttatatttctcatatttttccaacctctggagcctcagctataaccactggcctgactcacctctatcacgtggtctctcagtatccagcaggctgtctgggccttgttttcatgccagcagcagggttccaagagagaagacagaagtataaataaagtctcttgaggcttagtcttggaagtattactaggatgtaacttggaagtctaagaagtatcacttcctaccacattctcttagccaaaacaagtcacaaggatggggaaatagacttcgcctcttgatgagaggaactgtaaaatcatatttcaaagattatggaatcaagcataagtgggtaatgaaggccatgtctgtaatcagtctacctcagtgatttttgtttcagtgggcatcagatgttttgaaaatattgcattaaaattgaacaaatacaaatttactctgagaaaaaaaacctgtttttcctattcttgttctctttaaccagcaagctgaataaactccaggaataccattaatacaggaggaaatacaaaggcccaaaccttcctcgtaccagatcttccatcatgcgacttttctaactttttcagtggcttctgtgactgtttaatgttatgggatgattatgctgcctcactcaccaataaaagtccagcaaagaaaaagactctaggatattttgagatccaacttgaaccttctcaggggccatgttcatttcctcatttttgctgaggggttagcaggaaaggtagagtacaaggtcttcctcaataaagacagtggatattcttcagtgtcctcttctttttcaaaattcccgagtgctatcaaacaaatatcctttggaatagaaggcttccaccagtttctcttcatagaagatgggagaaatgggccccagtcaggttttcataggaagcagccaaaaatagccagcaggagtcctactggtctgcttgtcaccagtgggacataagtgtcagatgtttgagccgctgtaatggggaagacaagaatttatctctttagagatggaggtccataaggaagtgactaatgatgcctgttccaggatggaaactcaaggagaaagccaccagataaacacatggactgggtaccatgtcagggcaaggcaggccgtggctccctgctcccagcactttcccaacagcccccttctcatcagaggaagggacttgagcctttgctccctctctgatcttctggcctacctttcttggtggttcatgccatcccctccactcacactatcctccttgctgctctcacacaccagcatgttgctgccactgggcgcttgcaccaactctcccttggcctgaaaggctcatccgcaggtgtccacgtggctcagtctctcccttcctgcaggtctctgctcaggtggcagctgatcaaagtgtccgtgaggtcttcacttattatcccatataaaggtttagtcctatcctttcattccatatctccttttcctcaatttacttttcttgtattactcggcaccacctgacatatcatgtattcactggtttatctgtttattgtctgtctgatccatctgaagctaagctccgtgaaggcagggactatgttttgttcattgccatagaaatgcctggcacatggcaggtgctcagtaaatacttgctgaattgcatgtgtgaatggtagtgtggtggctgacattcattagggaccatagcacagtgtcatgggctcatggtacttttagggacccatgaaaatatttaaatttcttttaaaatcagaagaaaacatatgaccttttaggatcaaagaatgtatttgtctttgtaccaatgcagtcatgaatataaatatttttttaatagagaagaggcccacaaaggcaaaagtgcctagggaccctggagtcataatgcaaccttggcctagagctctaagggagtgagaattacaataagatatgatgagtaaacattatttctgggttgaatagaatatgtaatgagacttccaaggtcttctggagaacattcagatttgaggaagaagaaatatttcatcttttgctaaacctgcatgttctaaaagctgaatcctttcctatgggcacagcatccctgatgccctcaatctggcctttcccgccacctcctggcctcctttgtgttttctctggatttctagggctcgggtttccattgtgaaggacagcctcctcccttacttccttcaactccctcggagctctctgtcggcccaggcctgcctcctccacttgcctgcacttacaccatcagcccctttctcctctgcagtctcaccttcctccctgaggggcatgcccgccctcgcttctgctgcgcatgttaggataaaaatgagtttgcccacatttctcatttggttggtggcttcatcaacacaggatcccctacttttaactgactcactttaagggtttttgaatctctgagacatggtgtcctcagttacttaaaaggtttggataggctatttaagggtaggctttgctctgttttgtaaactttcattatccctttcaatttcattcagccactgggcatgtaggtaggctctgccttgtttaggcagctgcctaggttctcctcgtcatctttttgtattatatggaaaaaggtttgagaacttctaggcaggaatccctgagctgacacctgctaataccatcctcaccctaccttaagaacagccattccataatgtggttggaatattatggtctaggtgactgtcacattatagccagaggggctcatatttggaaagccagataccaaggtcttgcctacttagcttcacctgagtcacctctgctaggccgtgctttgattggcctggcttttgacatccagtactttaagtgtatggcttagcccctgattggggtaaacacacaggagactcaagtactgcaaatctcagaacccccaacagatgctggggtttctaatctgaaatgaaagctgcaggtcccatgctgcagcacccaggaagtagtgggtgtgagaaaacatcatttttcaagtgttgtccacatgttgtcatggtgattataaaatataggggaaaacaccccccagaattcttataaaaagagcactaaatctggaagaaatattttaatctgcctcctgagtagacagtgatactccaaggacatctctaagcagtaattgcagaacttcgaggcagtaaacaacgagaggaactttttcttattagagagaggcagagcgaaaaaagggtgagaactagcaaaaaggtgcaaggctgtgcggagtatagaggcccctcctggggacgtgctccacctgagtcttccatgaaaaccaaacgcaaatgcttatcaagagccaatggttgttgttgaatttaaaagaggaattgaatttcaagctggggcagatgcaatgaaggatctataggatgagaaagccaaaacccttgggaattagcataagtctttgggaaaggaggttttgaacttccagaggtcatagaactgtgaggttcaaggtcattggacctgggttgtcaagggcaaatgtctccctccagtcttaccttatgtattcagggaatcatgaattttctgctctcaacacagaaacaaagaaagtcaaatttcacaaaatgctgggagtgaagaaaacctccctagccaggagtgctggttggtacacctgagggtccaaattagagcataagggctgatggacctagcgggtgtcagtgaatgagttcgtgagtgtggccttgattaggaagggcaaaagacacccgggcagtcctggccctggctgggatactagaggcccaaggcagatgacagcacaggtggcatggataggagggctggaggcctgacctgggcttgtcattaatgctggcaaggactttggatctggtccagttggtccttctgggtgacagctgtggcacctgaggcctctcagtggacacgtgcagaaaaagcggtctacagtgcagctcactgcgggcaggcttgagtgtcctgagtgccgcctacctgcgggggctttctccttctttattgccgagctaacccagaatctctttcacttccaggtggcaagacagggcagggccctggctcccgcgcgccctctcccaggcttcccaacaaaaccatcagcggcccgcttatcccgcctgcctctcccaggctaggcaatacctccgaggcgcatggcgctgccaggacagccccgcctcgccccaacgtgcctgccccgccccctcccaccccaccccctccgcctccacccttacccccgccccttccctcttcctcccccatcaaaactccgcttgtgtccccacccggcccactgaccaaagggaacctcccggtggttgcaccccccgtcccctgtgcgccaccacctccacctccgccacctcccccaacgccacccccgctgcccccggcctcggttcttagtgacaaggcagtgaagcctcagctggctcccttgcacctcccgcccatcccgcccccgctccctctgctcccaccttgtgggtatccggggctcaaagcggagcccgccagccctgcgcaagatgcgcaggagcctcccgccccgccgcccccgctccccccttatgcttcttgctccccgagggcttctttgcccgcgccccctttgccaggagttaatagcagcagtgaaactccacccccgctaccccctaaatcccccagcttccaggccccaccgcagaaggccggtgcgcaggccttgcccgccccgcctgcccctccgggctcccagccgttcctgcagaagaagaggcatggccgaccaggtaaggagcgccgcctggcccagtgcccctggtggagtgcgataaaatctcgtcgttgcacaggactttattgttggaggtattcgtttcagagatggacaccaggggtgagggaggcagagagacttgcccaaaatcatgctgcatgtaagcaagggatcccggccttgatcccctgcccttactagctctgtggccctgggcgaccacttggcctctctgttctcccttctattcatctgtaaaatggggatagatggcaatagttgttacctcctgggtttgttgttaaggattaagtgagttcttaggtttgaggtgcttggaacagggcaacagtgagcttgagagggattatttattcttactaccaaccttccaactcccaatctcctccctgaggtggagggggcgtgagtgtggcttgtttccagaaccaggcctccttttatatttgcccgcgttttcctatctggctcccagccagaatcttcgccggccctcagtaaactggattcccactctgccttagttttcgcaggttctccggctgactcaagaaaactgagggcctgtattttgagccaaatattaaaaataattccttcacatatgcagcacaggttatttgaattgagcgttcatgccccatggctgatttccttgatcccgctagtaggaggcttcattcagttttagtgcccctgtgaatggaaagtacctccacacgtccacagatacacccacatccacacaggcagacacactcaaacatatgcacactcataacacacacatccacatgcacacccccaacacacatattcctttgtcttttagaaaatcttttgatgcagaaagcttcttaaaagtattttcttgacttaaaaataacgcaagcttgttgcagagctaatagaaggaaattcaaactggccaggtacggatggctcacaccggtaatcccactgctttgggaggcccatgcatgaagatggcttgaggtcaggagttctaggccagcctgggtaacacagcgaaaccccatctctacagaaaataaaaataaaaaattggctgggcatggtggcagacaactatagtcccagctacttgggaggctaaggcaggaggatcgtttgaatctaggtgttcaaggctgtggggagctatgattgtgccattgtactccagcttggatgacagagccagatgctgctgtctctgagtaaattaagtaattcaatcacccataataacatcacccagagatgaaaactgccatttggataggtttcttcaattcttttttctgaatatatgtacacgtttacatggttaataccatttttcacatacagttttgtgttctgtgttttatttaacattatgttaaaaacaattttatcaaattgttaaaatgtctttataagcatgacaatatattccatattcctcatgttagatatctaagttgattccattttttgttattatgaataatattttaagaaatacttttgtagaaattttaatccacgtttttgatatttttctaaaagtattggtgtcttaaagggaattcctggtgcaaagagcaaagatatttttaagcctcttgattacaagaggtaaggttttaatcattctcttttcaattgactggtcaccatgagggccagcatttgggctgataagccccttctgatatttgttattttcatctatttatgatgtgatgaaaaagacaaagcttttttttttttttttttttttttttgagacacagtttcactctgccatctaggctggagtgcagtggcaggatctcagctcactgcaaccttcgcctcccaggttcaagtgattcttgtgcctcaaccttccgagtagctgaggttacaggcgtgcaccaccacacctggctaatttttgtatttttagtagagacagggtttccccatgttggccaggctggtctcgaactcctgacttcaagtgatcagcccacctcagcctcctaaggtgctggtattacaagtgtgagccactatgcccggccaacaaaaacaaggcttttgattcagagggctatgagttcagatcctgggttcctcacccactcctgtggaaactcacaccacttgggtttgttttttattaatactgaattttttttatttgacaaatgggcctactaataacacctttcacataggattattaggaatatgaaatgagaaatctgcataaagggcttgcatgtaacttcagctccagcagcattatttccttaccacacagtggggcagctgttcacccagaagaggggctgcagtccttttactgcatgtgggagcaagtaaattcctcatagatccttgtgcccagaaagggaagaccagaaagggagaggaaggcagttgggaggaagaaaagaagatgagcagatgctgaagggacatgagacacgaggatggcggctgatgactgagaatgcctgctgcagctggggccccttcatctgctccagagtagtgagccccaggccaggatggggattcatatctggccttcttgtttgcatctttggatttgaaacttggtttgtccatgttcaaaataagggcaatttctactttagcccaacatggggggaaaagagagaggtagtagttgtgaacatcttagcacagatagtaataatgtaattgtcatcatttcaagaagcaaagtgatgtttgcagtgccactgaagaaataagcagcagtggaacccctgcactgatgtgccaggatagcagattttgggttgccagatgaaccatacaggaaagtattggcaaaggagatagtgagcctctcaggcatgatcagagaaggctggaggaagtaggttggattcaagttaggccctggagggcacgtaagatttaggtggaccggaaagagaaacaagcatttgcagtgctggagaaccagtgtgagcagggacacaggggcagaacaagcccctgaccgctccctcttcaagcctccctctgggcctcttctacagacagcccttcctgttcttaccactctctagtgattcccctgctttgggctgtacctgatgatgaaggttatcaccatcattaatattattgcagcagctaacatttattgaggacttactacatgccactcaacttaaattcaactcattgaatcttctcagtaaccctgggaagtgggtgtactattactactcccatcttacagatgaggaaactaaaacacaaagaggctatgctacttatcccaacaggagaactgcaattcagtgccaagcaggttgactccagaggttgcccttttactcgctgtatcatattacatctgaagatagaaatgcctaatatctcacataaggttatagcatccaccattcccatccgtgtttctgagtacaccatcatcttctctgtaaggggccggtgggggaaagctaaatccacctccagcaccccctgcgagatcacctaccacagagctttcaagcaagagccagcaggccacagcctggaccccgacgcagcagcctggaggtcaactgcgaaatggaagcctgcacatcattggtaagtgggttgcaccctctgccggtttggctgccagtaggaaagtgattctcccaacctctggagagagagtttgctggccacagtgctgccatctcagggtgcatgcttctttcatgaacaggggctcactccagcaccaaccagcccataggttctgttaaatagggttcctttcaaggctttctgcatagtttcaaggcccactgtctagccttctaattcagattagagaaagggaggaaaagcagcatttaaactgtgtgtgtgcgtgtgtgtgtgcgtgtgcgtgtgtgtgtgtgtgtgtgtgtgtgtgtctatggagaaatcaatgcataagcctgaaagagtagaatgatatggataaggagaaagatacatagaagactcaccaggtagagggacattttgagtacaagtatggaggtaggaaggaaagtcacctggggtcagatgtgaagccgtggaatctttcgatcccttctgtgtgctgggctagtgtctgacagaggcccagatcacaaagcaggggctcagcccatgaaagggccacaggagccctcccctcctgccaacagatcccagagcagaagctgtttgctttgtggagctcaggtcccaccctagacacaggccatgctcctccattccccagtcattctgcccacctctctctcccctcaaaaccctcccaggagcttctcaggtgcttcaggttgctggggctttgccagttccttgttggcaccagggtccccacctctgattctggaccctggagagccccatgccacttccacccctttagcagcttccttacggtgttattggttgaagtaagttcaggtgggtgacagggagtgactggatttccctcttcctgcttccctccatcccaaccaaccagtaaaacttgagaggtgaatggatgtcttagggagaatggccctgttgttaaaatccttgcactgagcaggcaaacagaaaacggtggatgcagtcagagtaatctctgtgctcctggaaatgatcaaaacttggatcatgacagtaacctgagtaactctttccatttcgcttgtgtgcagatgacttcgagtctaaattcacgttccattctgtggaagactttccccctccggatgaatataaaccatgccagaagatttaccccagcaagatccccagaagtaagtaccaccttgataagactcctggcatctcccgacccttcaaaattaggtgcccactgtgcatcagttggtcacagactgtctaaaggatgatgtcatgatttcactgtaccactgcaaggatgtagtgctgtgcatagttctggaactttcaggacattgatttctcctgatacctaagtgttcatttagagatttttatagaacactaagggtaactgtttggcatcagatttggatgcctaaacttaccactcatctctctcctccctggggcttttgataagggaactaaccaacccagataacagcaaaataggatattttgcatcaatcactgaggaggaacctgaaaacccctaattcagaactctggcaaatcgtgacatggagaatgtcctcaggtcaatggttctcaaccttggcaacatattagaatgacctaaggagcttttacaaatcctgaaggccaggttacatctaaaccacataatcagaatatcaaggtgtcaggatttttaaaagctgccaggtcattccaacatacagccaaggttgagaataatagcccagtaagggccctcctcctcctgatttcattgtgtggtcagactttaagagaggacatttaacccagcttaactgttcagccttaagagtagaaagatgagccaggcatgatccatgcctgtaaccccagcactttgggaggctgaggcaggaggatcacatgaggccaggagtttaaggccagccttgtcaacatagcaagattccatttctacaaaatattagccaggtgtggtagtgcacacctgtagtcccagcttcttgggagcctgaggtgggaggattgcttgagcccaggagttggaggctgcagtgagctatgattgtgccacttcactccagcattgatgacagagtgagactctgtatccacaaaaaaaaaaaaaagagagagaatgaggtgatgaggtggaagagccaattcttgtctggtactgggccaatcagattgggcaggagccagagtcagcattatagagtgagtgtcaaatgcgttcccacccgacaccctaagtaagcccccattccagacctctgtggacccagatggaaaatcagtgtccagggttagcctaagaccaggaatcgtgagccaggctctttgcccgtcttctttcagagggaccttagtgaagtcctttctgcagaactcaacttcctgcagagcagagggaatgcaggcctgccgtgtgctcaggtggagggcgcgtggacctgccctgtgctcaggtggagggaacccagggccctgtgctcaggtggagggggctcaggcctgccctgtgttcaggtggagggggcgagggcctgccctgtgctcaggtggagggggcgcagacctgccctgtgctcaggtggaggggatgtgggcctgccctgtgctcaggtggaaggggtgagggcctgccctgtgctcaggtggggggaatgcgggcctgccttgtgctcaggtggagggggcgcgggcctgccctgtgctcaggtggagggggcgagggcctgccctgtgctcaggtggagggggcgagggcctgccctgtgctcaggtggagggggcacgggcctgccttgtgctcaggtgtggtgaacacaggccttccctgtgctcaggtcgggggaacacgggcctgccctgtgctcaggtggagggggcgcgggcctgccctgtgctcaggtggagggggcgcgggcctgccctgtgctcaggtggagggggcgagggcctgccctgtgctcaggtggagggggcgagggcctgccctgtgctcaggtggagggggcgagggcctgccctgtgctcaggtgtggggaacacgggcctgccctgtgctctggtcgggggaaagtgggcctgccctgtgctcaggtgaggggaacacaggcctgccttgtgctcaggtggatgttcatctctgggtccgctgggacatctctctgctggcctgcgtggctgtacatttagagatataaccctgtgtgccctttctaataaaatgtaaataccaactgctctgagttgagagagagagaaagggatcagtatgaaggaggatggagggaaatcccacccactgaaggttaaatagaacatgaagggccagcaatgggggaagacaggtgctgtgtccatctcccatccttgctcagttcagcgcgctcacatgaaccgcctgtcatacggcaggcaccctgtaggcaccagaggctgcaaagtgtaagaaacaagctctcctccaccacgcacccaccaccctcctgagatagatgagaattagaccccataagagtgtcttaatcaatgattgtttagagtgccaagggggtgcaggtgaatgctgggggcctgaaagccagagagagagggtcacagttccacgtgggtgggaaggcatccaggctgaggacaggacagacccaggagagagtgtgattgtgctgggtgcatgtaggaaccatctgtcccacgtggtacatcagagcccaaggtgcctggctagataagaccatacagactgccggaggtgcaaggttgggagtgtgtgtccatatataacacccctttccccatcttgtgaaatatgcacaggaatcagctcgataaaaacctaagtgtttgtgttcttattggaggacacagcttaggttccccaacagcaggcctcctaatactgccccagaattaggctcctttactccctcaggcagcaggactcacacatgaggaaactgagcctggccccctgcagtcacagagtgtgcctcacgggactttccacatggcaaggagagcagagccaagggacccccttcatcaacaggcagctggatctcatagtgggccggaaggagccaggctgcacggggctgcctgcacatgaacctatggagacaaggagataagggtgccttctaacagtctgtgtcctgcctaaggcattggagcgtgaacctgtaagcagggaagaactgtcagtgcaaacactaaatgacagttccagggccgtcatggaccctgcagtggatgctgtggatgttcatgcctggcactgttctaggtgctttgcataccttatcatttgtccttaatgcagagagtttccagacagggaaaaggccaagtgacttgcctaaagcctcacagcagattaaagccagagccaggaattttgaacccacacctgtctgaacccagggccagttccatttggccgtggtgaactctgagaacggacgtgatgagatgcaggttgagacagataaccagtggcttgatcagaggaggtagagaccagggtcagggaacctgttagccagctattataagagtctgtgctgggaggctgaggcaggcagatcacctgaggtcaggagtttgagaccagcctggtcaacatggtgaaaccctgtctctactaaaaatacaaagttagccgggtgtggtggcggacgcccgtaatcccagctacttgggaggctgaggcaggaggattgcttgaacctgggaggcagaggttgcagtgagctgagatcgtgccattgcaatccagcctgggtgacaagagcaaaattccatctaaaaacaaaaaacaaaaaaaaaagagtctgtgcaagggaggttggatggaggaggtcctcagagtgatcagggtttggagaaccaggtgcagatgggatcaaggaaagtggaggagccagcatcccaggagtgcctgccttgggctggttggagaatgtgacaccaagaaggaactggaggtttcagggggaggtgatgggattcctgtcatttatggtgaggggaggtggctaaagggctacaagggggagatgccatgtggcaggtggagcgcagggtatacaggtctggggctgatagggtggggcaagggcaaggacttgatttgctggccattagtttggagatggaaatatagaacaatgaaggacatggccatgatgtcggccggggtgcgtgaagtaggtctgtctgtgtgacaggaggctttaagctgccaatgaacagggtcaactcagtccctcccagacagccaggcccgtgcaagcatttaataaatgggacttgactttggtgacctagacagaaagctgaggggggaggtaaggaattccttttattatactgtcaccaagttgtaaatcaagaatgtatactgtttttcttaatttaattcagtacacttattggcagtattgaaataactgtgcccttggaaaatgcaaatgtacagaatcccagctactggctcattcaggctcctttccttcccctgaggcagggtttgctgactggccacgttcatgccataagccccacagctttcccttacacccacctggcccctgaaggctttttaattgtaacctataccctaaaccagaggtcagcaaacatttgctgtaaaggaccagagaatacatatttgaagtaatgcaggtctcgattacaactactcaattctgctgattattaaatcaatcagcagccataaataatacataaatgaatcggcatggctgtgttccaataaaactttatttacaaaaacaggtgcgggctggatttggtctgctggtcatgttttgctgatctgccctaaaccattccagaaaacagattcctaaaaacctctttctgctcttcagtctttctcagtaatgtgctgtggggtccctcaaccttcagattcagtcagtgctaatctacagctagctgcattttatgtccgtggtgctcactcgcgtcctcaagaagagaagaaaagctacaccccctcactgcacacagcttgccaggagggtgcaattggcagtctgtgcaccaaaaataatctcctgatgtttacaaagagcagttttttaaacagcctattaaatgaactgacattgtacagacttgaaagggcaagtgcaatttcaaaattaagatactgttttagattgatgtggcatcggtggacacgaagtactccactagcctcccagcaaaattaaatatgcatgttcctgtcatccctgtgagccctagtgcagaaccttttaaattatattagtgtgaatcagatgtggtgtatgcctgtctgattacatttctccttaccagttttcttcttgttcactgttgacctggctccccaagatgagttcttcgtggtctgggagacagtgttgtttctatcagatgagtgtgttctcataccctgtggtctcctatgtgccctctgtccccacctgcttgtttgctgtctctctttctgacacacacacacacacacacacacacgacacacacacgagcacacacgcttagctcttccactagccatcatcactgtctccactctgcaggtgtttgctattttcttccattgagtgaatggctttgtttagttttgtgttttgtgtgtgttgttgtttttttttgttgttgttgttgtttttcgcttttgttttgtttcatttttttgaggcagtctcactcgtttgcctaggctggagtgcagtggcgtgatctcggctcactacaacctctgcctcctgggttcaaccgattctcctgcctcagcctcccaagtagcccatgcaccaccacacccagctaatttttgtattttcagtacagacagggtttcatcctgttggccaggctgggctcgaactcctgacctcaagtgatccgcccacctcggcaactcaaagtgttgggtgggtgagccaccgcacccagcctagtttttttttcctaatgtttttaaaatgcattagattcctcaataagtgaaacatataattaccattatgacccatcaattccactcttgggtataggctaaaaagaatttaaaactagtgttcaaacaagaacttgtacacaaatattcatagcagcactattcacaatagctaaaaggtggaaataactgatgaacacagaagcaaaatgtggtgtagccatacgatggaatatgattcaacaagaaataggatggaagcactgatacattgctacaacatggataaaccttgtgttagtttgttctcacattgttataaagaaatacttgaaactgggtaatttataggaaaagaggcgtaattggctcacagttctgcaggctgtacaggaagcataatgccagcatttgcttcttgggaagcctcagggagcatccagtcatggtggaaggcgaatgaggagcacttctgtcacgtgacggagcggagcaacagggagagtgtttggaggaggtgccacacacttaactagatcttgcaagaattcactatctccaggacagcatcaagccataagggatctgcccccatgactcagacacctcacaccaggccccacctctaaattggggattacagttaaacatgaaatttggtggggacacatattcaaactatatcaaaccttgaaaatattatgtaagtgaaagaatccagaaacgaaaggccacatgttgtataatttcattcagatggaatgtccagaagaggcaaatccacagagacagaaaatagattagtggtttccagagagaagaggaagaagggaatggtgagtgagtactgatggatgcaaggctttcttttggcagccagggcaacatagcaagactctgtctttacagaaaaattttaaaaattagccaggcatggtggtgtgctcctatagtctcagctgctggggaggctcacgcaggagaatcatttgagcccgggagtttgagactgcagtgagctatgattgtgcctgggcaacagtgagatcctctctctgaaaaaattttaggctgagtacagtggctcatgtctctaatcccagcactttgggaggccaaagcaggtggatggcttgagctcaagagctcgagacgagcctgggcaacatggcgaaaccccatcactacaaaaaaatacaaaaattagctgaatgtggtggtgcatgcctgtagtcccagctacctgggaggctgaggtgggaggattgcttgagcccgggaggtggaggttgcagtgagccataatggtgccactgcactctagcctgggtgccagagcaagactctgtctcaaaaaaaaaatttttttttaagttttccttttggggtgatagaaacattttgaaactacatagaagtgatggttgcacaacactgtaaatgtactaaatgtcactaatggtaaattgtatgttatgtgtattttacaacaataaaaagaaagtgaacaaaaactgtcagtaggaattttgggaaaaatgcaaaggtcacaaatatttgttaacataatgatggtataaagaatgacatcatcttcctatcaacagatactcactgaggcccttgccctttggagagatttagataaacaagtacctcacatgtgcttgaaaaattcacatttcaaacataattgtggttatatcccaagtcctgaacaactccccattctcctcttcccccagcccctggcagtacccttctactctctgtctctattaatttcactgctctaggtacctcatgtaagtggaattatatagcattagtttttttaagcctggtttattttacttagcttatgtcctcaaaattcatctatgttgtagcatatgtcaaaatttatttcctttttaaggctgaatagtattccatcgtatggatgtaccacattttgttatccattaatctgttgatagacacttgggctgcttccacctcttaacttctgtgaatgctctgaacatggaagtacaaatatctgttcaagtccctgctttcaatacccaaagtagaattgctggatcgtatggtaattccatttttaattttttgaggaaatgctatactgttttcatatctactgggccattttacacttctaccatcagtgtgcaagtgtttcaatttctctatattctctctgacaatttttattttctgttttttattttatcttatttttgttgtatagtggccattctgacaggtgtgaggtggtatctctttgtgattgaactcctattttaaaatagagttactttacacttaacagtaaaaacacgcaccgttatttccattagcaatggaaactctccattaggcactgcagtaatttcaacagtatggaatagttcatgtcataaaaattaaagaattagatgtcccaagacagagaacaaaacatactgccagtaggagggtatttatttccatctttgcggaaggcagctggggagtaagaacctctgccctgatgagctttccttggtgaagcctggtttttactgctgaccatacctcttcaaaagctgtcttccagcaccccactcttttaccacagcttctgtccttccaggacaatcctttatttctttgaacccatgaaggtactgtaatgtctataaagtatctctctggacctactctggtccctgagccatttttctgctcttctcttagccaacactgcctccacttccccaccccctgttctctctggagccaagtcctcccaggctttctcccctcagcaccatggtaagcgctcttaccaaggccaccagtggagctccatgttgccaactacagtgtcagaggctctagcctcagcccgtcactccctctttctgaaacacttcttcatttagattttatgacagctctctcctttctccttccactgtacactgactccttctcagttttttgttacaccacacacttcagagtcgtctttgacttctctcttctactcctgcatccaacttaccagtgaactcgggtgtctctccttgaaatgcacccagaatccgatctctcttacctcctctgccactcccattctgccctaagccactgtcattcctcacctgaattgttgctggaacctgctaacaggatccactgcttcacactgcagcccaagtgatttgtctacagtccaagtccagtcactcccctccgctcagaatcctccagggaatccccatctcgccccaagtcaactggaaattcctatcatggttcataagacctacgtgaacttcctccctcccctttcaccactctcctcctacctcattgtgctctaacaacacctgcaatttccagaacattccaagtacacatttgttcctgggctctgcatttgctgttccttctgatacctggttctgagtgatgataaccacttttaatacattggtgtacatatttctggtcttttctctctttatttgatcaatttcttttctacctaaatatacaaactattttttacaaaatttaggttttattttatgtactttttagtatactttctccgaatatccatgtgaccgtctccctactttctcttgatctttgatcaaatggtacctgtcttagctcaggctgccataacaaaataccatagactgggtggcacaaacaacagaaatttattttctcatggttctggaggctgagaagtccaagatcaaggtgctggtcaatttagtttctggggagggctctcttcctggcttgcagagggctaccttctcactgtgtgcacacttggtgccacacaagcttcctggtgtcctgttttataagggcactaatcccatcatgagggtcccatcctcatgacttcatttgcacctaacgacctgccaaaaaccacgcctccaaataccatcatactggggctagggcttccacatatgaattttggagaaacacgattcaatccatggcagtaacttatcagagaggtctcccctgactaccctgtataagacagaagctcttcctgccctatcactttttattctctttacactgttttttaattgtcttcaaagcatttatcacctccagacattatttacctgctacttgtctgcctccgcagtacagtgtaaggccctgaatggcagagactgcagcagtttttattcactggcttatttccagctctcagaataaagtgaggcacacagacactccttacgtatttgttgaattaataaattaaaatgttcactcatatatgcattgctgaaccatttacataataaaacaatttggaaatagcacacatctccagtattggggttaaataaatggaggcagagccacacaatggaatgctatgtaaccattacaaaatggggctatcaaatatttagtgacatgggaaaatgtttacctttttacgtaaaaacaccttgttatgtaaaaacaataccaaaaaatgtatacaaaaaagtatataaaataaaatctacattttgtaaaaaataaattcgtgtatctgcagaaaaggagaagttgatcaaatagaagagagaagagactagaaatatgtacaccaaaatattttatttatttatttattcatttatttagagattaggtctcactctattgccctggctcactctattgccctggctcgagtacaatggtgcaatcttgtctcactgcagcctctgcctcccaggttcaagtgattctcctgcctcagcctcttgagtagctgggactacaggtgtgtgccaccacgcccagctaatttttgtatttttagtagagatgcagttttgccatgttgttcaggctgttctcaactcctggcctcaagtgatccgcctgcctcagcctcccaaagtgctgggattacaggtgtgagccactgcacccagcctgtacacgaaaatattaaaagtggttatcgctcaatggtgaaagttgggtgatattaattttctttactaattagttcaagtttttataatacttgtgcattgctcttaacaatcttgaaatctactttttaaatttcaagttgtcaggagagagaatatgattagctcacctctggcccaggcacctgtggacaggaagtgaggtccgctggtatgtagggtgacctctctcagagactgagcgggctcagttctctacgaggagaggaggttgaggaaggagtgatggaggctctcataccagccaaaatgatgacaacaacagtgggggatgagaggaaaggccagatatgcagtctctaaggtttaaacctagaagacactagaatgatcatttccaatcacacttgtcatttccttcacttagagatgatgagaagcctccaatgtaagaacaagaaaggccctttgaggtcagacagcccaactccttcctgtacagctagagaagccaaagcagaagtaaagtggcctgccctgtttacagctggtggcaaagctggggctagagtccaagttctctgccctggggtccagcactccttgcaccacattgcactgtctctccactctgatgccagggcagcccatagcttagtcagacggtgttggcccagagctgacagttaggtttgcttcaaagccccctccctggctcacaggaattgcagcccagggctggtggttattctgggagggaattgcagcccagggctggtggttattctgggtggttatgaatgggagggaagaagagccatctgtggacaggagatggaagcagtgtccactcagcctgctcttaagtgcagtaggtgcttgagattgaggagagaggtaaacaatatttctgctgatgagttacagtatcccaagtgtgaaaacccctgatttggtgaatctgcaaagcccttctgtgggaagggagcccatgtgaaggactacttcagcagaatggctctgcttttgaattctgagattctggtggcatctcataagggaaattccctttaagggaatatttggattaaaagcactctgacaaaccctgactaagtcccggccactcacttctagcagcagtgattttttttttttttttttacaagacagagtttgcctttctgttttagggagaaattgattcccctttaacctccccaatattgtttcttgtcatatttatgaaaaccagtgggaagagccaggtgcgatggctcatgtctataatcccgacactttgggaggctgaggtgggcggatcgcttgagctcaggagttcaagaccatcctggccaacatggcaaaaccccatgtttctattttcatgtttctatttttctatttgaagccccattttttactaccaaaaatataaaaaagtagccaggtgtggtggtgtgcacctgtagtcccagctactcgggaggctgaggtgacaggattgcttgagcctgggaggcagaggttgcagtaagctgagatcatgccactgcgctccagagcaagtccctgtctcaaaaaaaaaaaaaaaaaaaaaagaaagaaagaaaagaaagaaaaccagtgggaattgctaacctatggtgaagcctattttattgcctagtggttcccaaacagggggaattttgcctcccaggagacatttggcaatgtctggagccatttttgggttgttacaagtggccataagcagggggctggggtgtgcaactggcatctagtgcgtagagaccggggatgctattaaacattctgcaacacacaggaccgcccccacaatagagagttatacagcccaaatgtcaataaagccaagattgcagacccctggcctagaaggtctttctgtagtggacaggagtttcttaaatctaagaacagtcatttccaaggctaccctctcacatggaattagacaaggggctgtatattagtgttttcttcttcttcttcttcttttttttttttttttactttttgctcagttaataaactagctaaaaatctagcagttactatatattttgctctaaaatatctttattctaggacaagtgcactcattaagaagttttaatgaaaattacagtgtccatttgattaatgtgttataagttttagagacccttctacgtgatagtccaatttaaaaaattgtaccttaccttaaaaggtttttataatgacttatatatgttgtagaaaagttgaaaaaatatttctgaagggagttttttggccaggcatggtggctcatgcctataatcccagcactttgggaggccaaggtgggaggatcacttgagcccaggagttcgagataagcctggccaacatggcaaaaccttgtctctactaaaaatatcaaaaaaattagccaggcatggtggcaagcacctgtagtcctagctactcaggaggctgaggaatcagaattgcttgaacctgggaggcggaggttgcagtgagttgagatagcaccactgcactccagcctgtggcaagactcagtctcaaaacaaacaaacaaaaaagagcgtgtttttttttttaatggtgattctaccacttagaaggaaacatttcagaatattattatgtatttctcaatgaatttttaaaatagttgagatcattctatttatacaaattcatttctccaaaatgagtctttgtaaatattcagtttcctgcagggtgcagtagctcatgcctgtaatcccagaattttgggaggcaaaggcgggaggatcactcgagtctgggagtttaagaccagcctgggaaacatagtgagaccctgtctctacaaaaaattttaaaagttagctgaatgtggtgatgcacacctgtgatcccagctactcaggaggctgaggtggaaggatcacttgagtccagaaggttgaggctgcagtgagtcatgatcatatcactgcattccagcctgggagacagagggagaccttgtctaaaaaataaaataaaatgaaaaataaaataataaaaaaacaggtgcttagtactccatcatgtaatactgaaccctacgttacctaaaaacctatgttgaacacaggtcattaattgttcactattataaatagtctataatgaacattcatgcttttctgttgctttttaaatagcacagcaatctggattgttctggagactttgggacatgattatttaatgcctagttcatgacagaaacagaatagataggtgtcctaccagtgcaacagaggaaacaccatttggaataaccaattgaagggagagttctggaacacctgggaatggggatttaagcttgggtagaccaaccaaaacatgtatctgtatatatacagatgtatgtatggaaataccaaaaagaaaaaaaaattgaagagataaacatcaaacttttagccatggtgactctgggatagaaaattgggattgggggaggaacaagaagagaagaggaactttgaggtttttttccattatctcctttattttttgaattcttaactataagaagatattcatatgtaacttgtgtaatacttaagcacagcacacttgagagaatgatttggttcctcatggatgggaggcctgatttgtcagcagttactcatcttttacttttttagccagccctggtattgctgggcacattgtggataatggatgagcatccctggagatggtatatttgggtaaagaagttctaacgtgcatttatttgatgggccttaataatttgttctcttctcagagtattagacatgactcttctgcatccatggtctttgacatagaagatgggagtggtggaaacagacagtctagggccaggatcctgaaggtttcattgttttaagtgctgatttagagaaagtttctctgtgaaacatgcacacccggtccctgggccaatagataatgagattgttcttttttccttcaggccgtacacctggtccctggctccaagcggaagcagtcgggcagagctctgatgacatcaaaggcagaaattctcaggtaacacaagcctcatgtctctgaatgtaaaaccaggaattctcctcaggaggcacagaaatggtaagggtatgctttctccttaacagctttatatttttcctcacactccttttcctcagggaaagccatttggtggaccttttttcaagccagaatgaaacactcaccatttcaaaatctgaagtgtgacaaaagggggcttccctggaatcaccactacatatagaagcaagtttagcaactctgacattctgcaacaatcatgccaatcacttcccattcttccttggttatgatggcctgtgagaaaaactgaataacatgtataaaacataattcagtattctctctcatctgtagaatacatggtttcttttagcacacttggagtttttttttcccccaccaatgttataattgattttggccaaatttagtcacaattcaagtactagtacccacaagaaatgaacagaactagaaggcaagccagacagctgcttttgtgataagacagtccttgaagaaacacctttaatctcacccagggcatcttgaaccgaattatttcctaacctggacacatttccctgcacatgacagggtctcatctttaaaagccctttgtttctttgaaaacatgtattcagtcgaacaataatctccccatttctgaatactatgtgacagactacagagtcacttgcagttaaaccaggcaattctgcaactgtgtggaacatcaaggaaagtgacctgagaaggaagaggctaggttcctggaagctaggatgagttcctcagaggaaaaagtacatcctctagcagataagtatcccccttttctaaccacagctgatgcaagaattgcagtaacgattcttagacgatcacaggttcaaaactgtgtgtatgattgtagttaaggaagaagtatatatacataggaaaaaagacaggaagaatatacacaatattgttaacaggtagagagaattctgagaagatggcagaggagaaagcaccaggaatctgtggacaacaattgcattggcagaatctgtctgatgtaatttgtctcatgtattttggaactctgggattcattaaaggcttgaaacttccatgggaaagcttggacagtaaattgtgctcttagtacaatagtaactactcatcctccaccccccaccccatggcaggcaactgggcacgtgttcctggagcagcttgcatacagcttgcaggagccaaggtgggcacaaaaaaaaaaccctgtcctccagatactggggaatctattctctgattggttattgctgcttctgatcacagaggtacaaataaagagatgggcagccattgttgcacctcctcttattgttgtaaatccctttccctctggctgaagtggcctcctggggatttcaagggctggtggccattttgttcctcctgtccttgctctttttttttccccatttgggagccaaacattaaagatgaacattcaaaggctactacatatatgatgaaaattagaaagtgaccacatatgcccagggaaaggcacaggctcagaaaagaccaagaagaccttaagattacacctcaggctgattcttagcacagagacagcctacaacaatcaaaaaaataaaatgaacaaaaacaataagaaaaaccagcaaaccctgggggacagagagaattgatatctagagttaccacattattagattaaaatgtagagttttcaacaacaacaaaaatcacatcatacaaagaaacaggagagtatggcccattcaaaggaagaaaaaaaacaaatcaatagagactgctcttaaaaaagacctgatgggagatctactagacaaagactttaaaacaactgtcttaaagatgctcaaagaactaaaggaaaatgtggagaaagtcaagaaacggatgtatgaacaaaatggaagtatcaataaagaggaaaaaaacattttctggagctgaaaaatacaacaaatgaaatgaaaaatttactagagggaataaaaggcagacttgagcaggcagatgaaagaatcaacaaacttgaagataggacaactgaaattattgagtcagaagaacagaaagaaaaaaaattaaaagtgaacaaagcctaagagacctgtgggagaccatctagcagattaacacgcttattgtgggagttctagaaggagaaaggaaagaaaaagggtaaaaaagactctctgaagaaataatagctcaaaactctccaaatttgatgaaaggcatgaatataaacatccaaaatgctcagtaaagtaagatgaactaaaaaaccacaccaaagaaacactataatcaaattttcaaaaggcaaagagaaaatcttgaaaacagcaagagagaagtgactcatcacatacaagggatcttcagtaagattatcagtaaatttatcatccaaactttgaaggccagaaggtggtgagcccatatattccaagtgctaaaagaaaaaactgtcaagccgtaattttctacctggcaaaaccattcttaaaaagtgagggagaaattaagatattcacagataaacaaaagctgagggagtttgttaccactagacctgccctgcaagaatacccaagggagtcctaaagggtcaaatgaaaggacacgaaacagtaacttgaagctgtaggaagaaacaatgacctcactaaaggtaactatatggccaattataaaatctaatattattgtaacaacagtttgtaactatactttttgttttctacatgatttaaaagacaaaacatttttaaattttttagtttaaaagctagtgttattgtaactttggtttgtaactatatatttagggttatacataatttaagagactagtgtatttaaaagacttattaatttatgttttggggcacacagtatataaagatgtaatttgttcacatcaacaactaaaaggagtggtgatggagctgtaaaaaagcagatattttgtatgttattgaatctaagctactataaaatcaaattatagtcttacaactttaggatgttaagtgtaattcctatgggctatggcctgaatgtttgtgtccctcaaagttcatatgccaaaacctaatccctaatgtgacagtattaaaaaagttgggcctttggggaggtgataaaccatgagggcagagccctcatgaatgagattagtgcccttataaaataggcatgagggagcttgttcatccctttcaccatgtgaagatgcagtttgaaggcaccatctagcagacagcgagccctcacaagacaccatatctgttggtgccttgatcttggacttcccagcctctacaaatttaagaaataaatttctgctgttttcataaattactcagtgtaagatgctttgttatagcagcctgaaaagactaagacaccatggtaaccacacagaaaatagctatagaatatatacaaaaggaaatgagaaacaaatttaaacatttcactacaaaaaaagtcaactaaacagaaaagaaagggtatgaggtacaaaaaagctatatagaaaagaagtagcaaaatgacagagtaaatccctccttgtcagtaattgcttcaaatgcaaatggattaaactttccaatcaaaagacagagattggcagaatggaattttaaaaatctgatccaacagtatgctgtttacaagagactcagtttagctataaagacaaataggttgaaagtgaaaggatggaaagagatattcctactgtgatcaaaagagagcaggggtggctctactaacatcaggcaaaatagacattaaatcaaaaagtttacaagaaacaaaaaggacattatatgttaatacaagtttcaatagagcaagaagacataacaattacagatattagttcacctaataacagaccatcaaaatgcatgaagcaaaactgacagaattaaagtgagaaacagacctataataatagctgaagaatcaaatatcctactcctaataatgggtgaaacaaccagacaggagataaggaaagaaatagagaacacaaaaaagctgtatataacagacatatacagtacagcctacccaacaacagcagtatatacattcttcttaaatgcacatgagacattttccaggagagtccatttgttaggccacaaattaagtgtcttaaatgattttaaaagatagatatcaggccaggcatggtggctcatgcctgtaatcctggcactttgagaggcctaggtgggtggatcacctgaggtcaggagttccagatcagcctggaacatggtgaaaacccatctctactaaaatacaaaaaatacccgggcatggtggtgggcacgtgtagtcccagctacttgggaggctgaggtgggagaatcacttgaacccaggagacagaggttgcagtaagccaagaccgtgccattgcactctagcctgggcaacaagagtgaaactccatctcaaaaaaaaaaaaaaaaaaagatagatatcagacaaaatatctttcctagcacagtggaataaaattataaatcaagaacagaagtaaaactggaaaattcacaaatttgtagaaattaaacactacactcttaaacaaccaatggatcaaagactaaatcagaaaggaaactataaaacacttggagattaattgaaatgaacatacaacataccaaaatttatggaacactgaaagcagtgctaagagggagatttatagctataaattgttacattaaaaaacaagaaagttatcaaatcagcaacctaattttacaatgtaaagagctagaaaaagaagaacaaattaaacctaaagctagcaagaaggaaggaaatgaagaaaattaaaacagagatcaatgaaatagagaacagaaaaacaatacagaaaatcaacaaaaccaaaagttggttattgaaaagattaacaaaactgacaaacctttagttagatagactaaggaaaaaacagagaagactcaaactgctaaaatcagaaatgaaagtggatacattactactaatccaactgaaataaaaaggattataagagagtattataaatacttttatgccaaaaagttggataacctagatgaaatggacacatttctaaaaacacaaaacctaccaagaccaaatcacaatgaaatagaaaatctggctgggcatggtggcttacacatgtaatcacaggtctttgggaggttaaggtgggagaattgcttgaggccaggagtctgagccagcctagacaacatagcgaaccctgtctctacaaaaaaatttttaaattagccagatatggtggtgcgtggctgtagtctagctacttgggagactgaggtgagaagattgcttgagcccaggagtttgaggctgcagtgagctatggattgcaccactgcactacaccctgggtgacagagtgaaaccctgtctcaaaaaaaaaaaagaagatagagagtagaaggatggttacaaactagcgggggagtggagttggggatggttaattggtataaaaaatagttagaataaataagacctactatttgatagcacaacagggtgactatagtcaacaataatttaatggtgcagtttaaaataactcaaagaatataactggattgtctgtaacccaaagataaatgcttgaggggatggatacccgattttccttgatgtgatgatcactcattgcatacctgtatcaaaacatctcatgtaccccataaatatatacacctactatgtacccacaaaaaaaaagaaatagaaaatctgaatagacttataactagtaaggacatttaaccattaatcaaatatctcccaaaaaagaagagctctgggcttcatggcttcactggtgaattctgccaaacgttcaaagaactaacccaatccctctaaaagctttccaaaaaattgaagaggagggaacactttttatctattctatgagaccagcattatcctgataccaaagccagcaaagacacaagaaaactgtagaccaatatcccttataaacactgatgcagaaattctcaataaaatactagcaaatcaaatccagtagtatattaaaaggattatataccatgaccaagtaggatttattcctgcatggcaaagattattcaatatataaaaatcagttaatgcaatatattgcattaataggatgaagggaaaaaaacacatgatcatctcaattgatgcagaaaaagcatttgacaaaattgaacaccttttcatgataaaaaaaattatcaataaactaggaatagaaggaaactcccttaacataataaaagccatatatgaaaaatctacagtgaacatgcccaatggtgaaagactgaaagcttttgctttaagatcaggaacaaggcaaggatgcctgctttcatcgcttctattcaacatagtactggaagtctatccagagcaaagttgggcaagaaaaagaaataaaagacatccaaattggaaagcaagaagtaaaattatctctgtttgcagatgatatgttgttatatgtagaaaatcctaaagattccaccaaaaaaaaaaactgttagaaataattcagcaaagtagcaggatacaaagtcaacacacaaaaatatggttgtatttctacacactaacaatgagcaatctgtaacgaaaattacagaaacaattccatttatgatagcatagaaaagaatgaaatacttagcagttaaccaagcaggtgaaagacttgcataatgaaaactataaaacatggctgaaataaattaaataagacataaataaatgcaaacacatcccatgttcatgggttagaagacattattgttaagatgtcaatactacccaaagcaatctacagattcagtgtaaaccctaccgaaatctcaatgacattttcttcagaaatagaaaaacccagaatcctaaaagaagaatcctaaaattcatatggaatctcaaggaactccttgagatagccacaacaatcttgaaaaagaagaataaatctaggggactcacacttcctatttcaaaactataataatcaaaacagtgtggtactggtataaagacagacatatagaccaatgggatagaataaaaagcaataaataaatagaataaaaagaaataaacccttgcatgtatggtcaaatgattttaacaagggtgccaagaccattcaatagggaaaaggtagtattttcaacaaatgatgctaggaacactggatatccccacatagaagaatgaagttggaccccttctaatatcatgtacaaaaattaactcaaaatgaatcgaagacctaaatgtaggacctgaaactgtaaaactcttaggagaaaacacagggcaaaaccttcatgacactgggtttgacaatgatttcttggatatgacactaaaggcataggcaacagaagaaaaaataagcaaactggatttcatgaaaatctttaaaatttgcatatcaaagacaatataaaaaagaaaaggcaacccacagaatgggaggaggtattttcatatcgtgtatctgataagagattaatatccatgatatatacagaacttataaaactcaacaagaaaacaaataacctaatttaaaaatgagcaatggacttgaatagacatttctctaaagaagataaacaaatggccaatgagcataggaaaagtagctcagcatcactaatcattagagaaataaaaatcaaaattacaatgagataccacctcatacacatcaagacggctgctatcaaaacaaaacaaaataacaagtggtggcaaagatgtggagaaaatggaacccttatgcactgttggtgagaatgtgaaatggtacagctgctgtggaaaacagtatggcagttcctcaaaatataaaaaacagaattaccatatgatctggcacttccacttctgcgtatatacccaaaagaacctaaagcagagcctggaagagatatttgtacacccatgttcatagcagcattatttacaatagctaaaatgtagaagcaacttgatcctcttgtagttcatgagcgtgatgattgagtattcatgtgcatgtgtgagatgtgccactctctgaaccttgttacaaccttggcacattacctgtctgacctgaacttggaaaaataaagtaaaatgtagaagcaactcaagtatcatagatagatgaatggataaacaaaatgtgatacacgcatgtacagtggaatattatccagcttaaaaagtaggaagttctaaaatatgcttcaacatggatgaactttgagaacattattctaagtgaaataagccactcacaaaagacagacaccatatatgcctccatttacctaagtacttaccgtagtagaaacagcaagtagactggtgcttgccagagattagagggaaaaagaaaattgagaggtattgtttaatgggtacagtctcagttttacaagatgaaaagagttaaacaaaagtgggtactgatgattggttgcaaaacattatgaatgtatttaatacccctaaactatacacttaaaaatgattactagtcagctgggtgtggtggctcatgcctgtaatcccagcactttgggaggccaaggcagtcggatcacctgaggttgggagttcgagaccagcctgaccaacatggagaaaccccatctctactaaaaatacagaattagccaggcatggtggcgcatatctgtaatcccagctacacgggaggctgaggcaagagaagcgcttgaacccgtggacggaggttgcggtgagctgagatcacgccattgcactccagcctgggcaacaagagtgaaactccgtctcaaaaaaaaaaaaaaaaaaggttactagtgtaaattttatgttatttatattgtaccacaataaaaatggagaaaaaatgttaataggcattcactctagaagactatggctgatttgtactttcttcttttggcgtttatgcaatttccaagttttctacaatgattatattattcccgtgaccaggaaaatatagtaataatcataatcatgttccttcatattcgtatggctctttacatttttcagttagcttgcatatgttatatcatctaatccttttaataaccctgtgatggaagctggagagatacctttaatgccatttttataaaagagaaaactttctagaaatttgaagaacttgcccatgtcacaatgcccaaaccttctgacctcttgttcagtgcttcttccataatgcctcactgcttttcctggcatgttagaatctccagggacaagaatcctcctcactaccaacgtgtcacacactgtgcaggatctggtctccagcctcacggcaggcatgcacccagatcacctgagtctggtggttttgatctccgcctgcaagtctactcaaagtggattgtagtctcctttgggcattccacagtcaagaagatctttgtatctcactggataccatcttaattctcactgcagtgagacacaaaacaattgagaaatcactgggttctagacattgcaaacaataccccagggactgctcttttttatggctagagtggtcagtgcatggggtgggagccctgggctggaagtctgaatgcctaaatcggtttcttgcttttccactgccttaacttggggtctccagcacgttttttttatttctctgagcttcctgtcaagtgaattgctgatgattggttctataaatgtttataagacagtattaggtcctcacataccatcaactacataccccatttcatctggtttccacccacagccccttgggtaaaagtcagctctttgcataggcatctccccaaacttgacagccttgcatgaatgagaagcttcggggcccagcctgtttgggggggtggaggaggaaggctttcatgtgcaagagtcttctaactccacctggtaatgttctgttatgtttccacagttatctctaaagactcttcggtgagaagacagatgaagcgaaggtcctggggttccaggttgcagaacaacatgtcagaccccacccaccccatgctcaagctgtaattcagttggcatacaggcttggaattgagaatttatttattgtaaatatgtgatttgcacgggctttaaagcagtattttaattgacttttatttcggtaatattttttaaaacacccctcatttttccattttttgcattgcatcttggcatttgtcagcacagatagagccctgtccctccacctagtgcccactccatgactgtgaatctgcttgcaggctggcccttcctagattctgaaccgtttgtagagagtccttagtttgcaggtagccccaaagttataaatatccacaacggcttcttattggcataatttcatattctcatcacactaactgcaaaatcaaaccaaataatgccttatcaatgatgcagctcagaggaagtagtgtgtcccccacacccagacagtgccgcgcagcctccagggaacgaggtgccatgtctcgcttccattttgcagtacagggaatttttttttttttttttttttttttttgctgcctaatgtaatacatcacaaagtaaaggcaagagtgggcttggccctccgatgccaaccacagggccccttttgtaactgaataatcctccaagtagccagtgctcctactgtttacagtgtccctcgtgcccaagtctctgtcactttcatcctgttccctccaagttcccagtcccatcccagtagccagctttatgagattttggtatttcttccctacagattaaaaacatacacaactcatcattatgctaaactaccagttgtatctcagaggtctccccttctgcccttgcttcgagtgtggacttccatggaaaatatgacatgaaaaagtgtagaacgaaacatcgtgtgaaatacctgccacaaatacctagtgcctcactgcccccatcttaggatccttggagccacccgtcaggcaaaacctagctcccttctgagctaaaggagaaccttgcctgacaactccacattcattcccttgtggtgggcacctgtctgtggggagatgtgtgcaagctcagccactctgaatatggaaaaggtcaggccgggctggtcctgctcttcactccctcttcttgatcctgtagggagtggaaatgtgtttttgcttgctgcctgacccctgatgttccccatctttggtcggggaagactgtgacagaggaaggagaaaaaatagaaggaaacagactgatccctgggctgtgctcaaaatagctgccctttaaaggaaatcaggcagggaggggagggaaaccagcgaaaaagaaatttgctttgcaacaacccacgcacacattcacccctgaagtatatcatgaacagaccaagccatccagaaaggcagccggtcaggagggtgtgggcaaacatgactgcatctgcctcactgttgtctggagtaacgactcaggtggtgtcctgcagcagtgctgtgctttctcattccagatggaagcaagtgagccagggtcaaattcccttctccaggggaatgaatcaagcccaaactgtaacagctaaataagtagaagtttttgcaggtcatcagctctgggcataactaatttgttttattggttctggaagatttccaaaaagccagaatttattattataacagtgtccactccactgccctcacagttgtgtaaaataattatagaagttttaatgatcctgattaagaagaccctagacaaaggcaattccaccttcagagtagactgcctgccctaatgaggtgtttagacattcgtgtctcctatggctgggatggaaattaaaataacactatttaaggacagagcgggccaggagcagtggctcatgcaggtaatcccagcatgggaggctgaggtgggtggattacttgaggttaggagttcaagaccagcctggccaacatggtgaaaccctgtctactcaaatacaaaaaattagccaggcatggtggctcacacctgtaatcccagcaacttgggaggttcaggcacaagaattgcttgaaccctggaggtggaggttgcagtgagctgagatggcaccactgcactctagcctgggcaacagagcgagaccctaactcaaaaaaaaaaaaggacagaggggaggaaggagcagaaaccaaaaatggcaattagggagaaatctcaggaatgtggcatcccatctccccttgagacctatcactgaattcacaacccttcgagctcatgctggtgcactgagtcccttgggcgctgtaaaggtttaaccccttgactgtaaactcagacttagagacatctgagtcacacagtccccgccattgtcacatattctcactgacactgcagtctgtgactcctccaatgtttcacgtgtattttatatttattgatgtctccttccgcagattcatttctttgtacttaataaactttagtaagtggaaatgcttccagtcgtttccttgttaaaacccatcggtggtcaccagtatcaatctaaaccaaacatttttaaggatcaggagaagttgaagttctaagaatgatagaaaaaaaatagatatttacatggatacggtgcttgctgtaacatactgtgttagaaacagggcctttctttcttgagctaactagcctaattggtatttggaaaaaacaagcaagaaaaaaaaaatttctcaggtgcattttttaaaaagtagataacactatatttattcagtttgattaacacagaatgggcagtgtattgcttataaattctgctaaattgtgttgaaatagaacaaccttccctctacgtgcacttagtccccactcccaactcagcaaaccccccaaaaaagcctcctgtaggaacagaatcatcttgaatccccctgtagtattttaaggtggacctttgggaacagggttcaggggaggtgagatttatctgctaggcaagctatctcagagctagtgcttagaaggcaaaccaggatctgaatctccattttgcctcttacaagttgcctcttacaatctgtgcctcagcttcctcatttgtcaaaaggggacataaatatgtacccgagtgtatattggtgaagattcaatgatgtaatacacatgggcaagccctcaacccttggatcacaacggagccagtgatgcacaccctgcaccccggggagcagccagtttgctggttccatgcttgggcacaaacagggctctgctggctgcatcccaggcacttcattcagtatttgctgagctactcagaccacacttcactaactctgctgctggataacaatgagagagcagtcattaaaattcatagatgttcctgaaataaatctcatctagaaactaatttcaaagctggttactacacactttgcatcagaattagttaaggggccgttttattgctctcttattggtggaggtacagattggctctttgatggccaaaagggccagtctgaatggggaagaaaaagtaagggccgaagataatctacaaagtggatgatgaacttcagagtcacattgagcatggccgtggtgaagtagctagaagtgtaagcaccttttatggagctaagtgtgagagacgtgcttcctagagagggagcaagttaatgggaagggccatggactccagaagcaagttccaaattctcagacggtgccccgggaggcttcagcatcctccacccacccattctgttatgggtcgaattgtgtccccacaaaaatccataggttgaagaagtcctaacccccagtacctcagaatgtgaccttatttagaaataggcccattgcagatatcgttagttaagatgaggtcatactggattagggtgggcccctgatgcgatatgactggtgtccttataaaatgaagaaattggacacagacatagacacagggagaacgccacatgaagatgaaggcagagataatcaggatgctgcttctatgggtcccaaagtgctgaagattgccagcaagccaccagaaggtgggcaagagacatgaaacacattctttctcacagccctcagaaggaaccaaccctgcagatgtcttattcctgggacgtctgggctccagaactgtgaaccaggaaatttctcctggttacgctgcccagtttgtggtactttgtgacggcagccccagcaaaagaatacaggctttgtcacccagagctttgcaggagggtacaatgtttatgaaaagagagctgggaataaaatttcagaattagcagctccttatcatgtaaacagagcagtcatctaccctgaccttgaaataggtcattcattgcaggtgactaagtcctatcttcacgagcaagacattcagttgcgttttacctgtcacagtggagagtcatggaaagcaagctggcatttctgggtcacaggagtgaagagagctggctttttccctaagtggcatcctctcctgttgtggcattgctgatgccttggaatcaagatgtctggcacagagtaccagccactctgatgatctagacttccattctaataactatggtaaaatacacataaagtctaccatgcttaccatgtttagtgcttaattcattcgtgttgcgtacattcatattgttgtacaaccgtcaccaccatccctctccataacttatcttgcgaaactttctgaaactctatactcattaaacagtaactcccaatttctcccccacctccagcccctagcaaccacccttctaatttccgtctctgtgattttgactgctctaggtacctcatagaaatgaaaccatataatattcgtgactggttgatttcacagagcataacatccttaaggttcatccatgtagcatgtcagaatctgcttccactttttaaggatgaataatattccattgtatggatagaacacattttgtttctccattcttccatctgtggatatttgagttgcttccagattttagcactgtgaatagtgctactatgaacatgggtgtgcaacctctcttccagaccctactttcaattcttttgtgtatacccagaagtgggattgcccgattatacagcagttctgtttttcattttttgagcaactccatactgtttcccacaatggatgcactgttttacattcccaccaacagtacataagggttccaatttctccacatcctcacccacatttgttattttctggttgtggttttttgttgttgttgttgtttttgttttcaatagtagctatcctgacgggtgtgaggtgatatttcgttgtggttttatatttaaagactgaatttatccacagaacattacatgatgcaagaaactgctgaactgactgttttctaaagattctagccagaaaaatatatccattctcatacattttctatattgcgactgaggcccacgtttattcacgagacacaaaacagaagaggccactccactggatgttaatttcagttttttttattgtatgcttgatgcatttagagacaattccaagggcaagcactggatagggatattatctgctttgtagatatttgtacaaaagactgttaagactacatggccagttcccactgcaggaaacagaatgattttcttttttttttattattattccctgccaatagcattttccatctaacacatttaaattctcacagcataattgcaaacatgtacatattggttcccacgagaaatctgcaggtgacatttcgggatgtttggagtcaatcagataaagcacattatgacagaaaccataagaggggagctgggacctgggactgtgcagaatgaaaagccacggctacgggaagcataagcttgtgctgcaacggcatgtgcacatgacctgctgctcctggccctctacgaagcatgcccagcaagggaacctcctccgtccctcctccacgtgcttccttcctaaggctgagagctcaactgaagaccttccccaataaatgacagatggctcttcagtcaggaatgcagttagtggtttcatgacagacacactggtcccacccggcttccctgctgaaccacccagtactgaataacacctgtaccaatgtgggatgacatcagctaggaagcaaagtaatttgcctggttgatgattattttttatacctaatgattcacccaatagtaaaggaaccccacagctaaggtctaacaggcatatacctgctctgttagtttataagaaagactcgttctaataacaccaggtcttatattattgagcactaaggaacctccataatttcgattatattctacctaaaatttcaaagcacctccaagaatgaaagggtactatttctgctttgctaatttactcctgccagagcttctgtccttgaatatgagggctatcttcacctatagtaaatcccatctattagacaagactagctagcttatgtttggttatggggcaagggagtgggggagagattctgtcctttctggctatggcttctttctgcacaagcatgctcagcccccaccccagtctgaaaagatacacaaagggtttcctaggaagctacttatacactatgacccttaaacataatttttgtatttcatcttgaatattcatgttccctatactgccttcagaaaagcaatccctggtccacaaattattcatgtaacaagcatttttcaaaagcaaaatctgttaggaacatttaaaaatgaacattcctcactataacagcctgctcaaaacccaacaacctatttccagctgttaatataagtacataaagtcactaaaagtaagcgcagccacatcagcagattctctgctctcttgtcgtctttctccacccatcccaatgcacaactgtcaactgtgcttatagaccacctccagacctgatgggagctgccacaccccttttaacttttgccaggctgtaccatgccctctagtggtaggactaggacatcacaattgtggtgcagagtattagccaagacagctctcaattagggttgccttctttaagatgcttgaccaaggtcaatgtaccctaacagaagtagccattgtgtttcccaatgggtaatgacataaagcgggtagggttatccatggcctttgtttggcccatagaaatgaaaggaggcttctgtgtaattaattcttactagacttcttttgatcaaatcctgaatcaccttggttatctcagacatgtcaggtctgatgagacatttcatagtaggcgaaggtgaaatcactcagtgagattttagagcagctttctgtatcatcttgctttacatagccacttggaacatggacttgggaggggagagttacctacgtcatcctcgaacctcactttcccccccccttaacagtgatagaaagacacttttagaatagccgccccacctaaaaggacactctaaattcaccaacagtgaaagcccaggccaaacctgcgtgaagctcttagcagctacaggccaccattattggttgccattaactctgtcagctgaaatcgtcttcccatcacccacaatgtgtggttaatgattttatatacagagtttacaaaactgctgactaaaaagctcatggcactcctatactcacgctctggagagttggtagaaaaaaagaatgtgttctgataaaacctctgatcctcactgttcacatccatgtaacagggctcggtcccctcaaaatctcatgatacagcttctgggaaggagttattaaccctgtcacttcccagattgctgatactcacaatgtttccatttgcagattcctgccaagaatgatgaggcaggattaggcccaactggtgctctcccactagctgctgtatttacatacacttctgttcatcatctctgcccgtttcaggagtagctgagagcttgaataggtggcggtaagctcccaccaccaccccatgcccagtgcagctacccgcctgaatgaaggcagctcctgggacatgtgaggtgtgaggagtggggggaagatccagggaagtcagctgctttgtatttgggtttgtgggatgtaatggccttggcaggaatggtggggcctgaactggtatcctgcagagaaatgcttctatatccatctatcacctccttgccctctgtcttcccaatgctaagcccatctggtcttccttgcatgcttttctatgctctggtggtaagtcaaatcctttaagtgaacccgacattggaaacaaatcagtttaattaaagtctctctgctgagataatgtagtgactgctaggattccagatatttaactagaatctaaatagtcaagagttcttccttttctttccctccttggctgagagattcactactctgggtggaactgtgccatagggccattcaattactcctagactagctgttggtaactagactgggaatcatttctacacaaggaatcctgtgatggctgtgctgctgtgtggggagagctgcctcctgggacatccatgcagtgattcagaaggccaccagcatggctatgtctgaatctcggaagtgaataggttccagctaacaaattatcagctctcctgtaagtggaagcagctctgcagtccaccacacataagcacagcgcatggaaaatgggaagacagcttcttcaggagcccaggatgtaggaaggagccaggactggagaggggtccctttcttccttccaattggttctgccccccagaagacacctgtagagacactgtgcactacaggcatgcactcacgggaggccacggagggtccccttgacaacacacacaagagccctgtgtgtgtgcacaaatgcctcttgttaacctgaaagaaaccgctactgagggaaagactaagacttcaaaagaatttgcttttcccgccaactcggcactgtgaagcctgcctttcaaggcttgatgaactctagtcctcttgtaaaaggctaatgtgtccattgccactgaaatacaataatagcagcttaaaatccacaattagtcacacaaccgaacaacaggcaacgggatacatgttacactgcacaggaaggagacctacattgcagaaggggacgctgtgagattcaaggtggaacacaaggtaacagtttgatctggcttcagaaaaggaggccacatattaactttctcattttactcaaacaggagagtggtttgttttgctggtaatttagtaaggtgggaagtcttaaataagaaggggaaagggaacgcttacttcacttaaagaacttaatctccgtgtcaacacagtcatagaaaaggtcccccacttccgcagggtccagtggctcggagctggtcaggatttcttccatggcttccaggccttgcttctccagctccagcatggtgctcctcagcttgcgaccttgctcctgaggaaggacacgactgctttaggtgtcagcaaaatagcaggggacattgcagcggacactgaaaccctctagggggccagctggcttcctgctcaaggtcctgtcctccccacactccgtttcacacacgactgccgcagggattgttctagaatgccagtatgattatgtcactgcccggcttagaacacctgcacagctttctgctgccttcaggacaaagcccagaccccagagtgacactgagggaaggcccttctgacatccaagaccacttcccctgcatctccccactcctcagctggactgaattcactgtagccctccagcctctgctgctgtctcgcccctgcacaggtggccctgccctctggagggccatcccctttctcagcgcttggtcgacgtgcacccatcttcagcttccttgcaaagcctttcctcttccccgcacagtgccacaccgttccccctgccatgggcgctgtctcccaccttgtgctggcttgcctctgcagctgtggccccttggatgggaactgggctcatttctatcctccagtgactgggagggcactctcaaaaaatgttcattgaatgaaaaaaaaaatggatcaatgaataaacaggtgccatgtctctcccctgttcactctttttctgagatggtgagttcacttcttccatgggactcactcatttatggcagatgacagtgaaagctttcatttgccccatgagtcccagaactgagaagctgctctcaccacccgcccaccactgcttcatgcagcatcatgtgactccacctgagagtcatttgtaaatttcaaaacccaccagcctcagcagcctcatcttgaacacacagccctttctacctcttcattctaatgaaccaaatacccaaaacaccatacaccacacagcgacagttttcatctacttggggcttatggtcatccaccaagaacataagcactatcaggaactaatgtggacagccctggagaaaacacagttgaatgcagtggcagcatgcatgcttccgattatctgccagcctttttaggctggcagggaggagagatgtaaaataactgtgcgacctttacgtgtcaaatggtcacttctatggaagagaagggcaagctctcagaaaagtgagacagcccttctcagagatgctttctgaattcatctggatttattgcttggatttttctcttgatatcctttttctatagtccaccatgtcaaatgcaagaggctcacacagtccacagcaccaatttacacaaaaggtcccccttttgggcccttcaggccagtttggacctattaaaagttgttacataaatagttggggaaaactgatgagtgtctaacaagcacgttccttcttcctctcttcagcaaaatataggcttgaatttatataaagtccatcggggtggctgctgtggacacactgggtgctgtggaacgtgctttgggtggttttcttgtttgaattgatgacttatcactttattaaccaaaggtgtgggactggggagagctgcactttgaaggattacgacttcttttttaaaactaggaatatgagtctgggcgcggtggctcctgcttgtaatcccagcactttgggaggcagaagcaggtggattgcttgagctcaggagttcaagaccagcctggccaacagggtgaaaccccgtctctactaaaaatacaaaaaaaaaaaaaaaaaaccctaggaatatgagaatattttctaaaactatgtttgtactatggtaaaacatatgtattataacataagattgaccatttaaaaactttaaaatgtatagttcagtgcattaagctcattcacaatgttgtgcaaccagcaccaccagccaactccagaacttttttgaaacaacatatgattgtatctttaataaaatgttgccagcaaataacaactttttacccccaaaagtacataaggaattttacacaatatataacagttatccctaacgtactgcatattcctattattcctacgtaaacagtaaatgtaagtaagatactcagcctgctgaattccaaaataacatgagaagcagaagctttgtcttatttggtttcaagagcctgggcaggaaaatggacaccagccttctaggaaaggccccaggaacctggtctctgggagaagcccggtcacactggatgggtgggggtagggtctagcttgacatctgcttccctgcctccttcctcgctgacctcgcccgcccgcctccgcctccgcctctgtggccctcatgcaagctcacctggtcactttcgatgatggcacgtgcccactcgtgggctttgtacagctcatgccggcggtctggtttctcctggaaccgaggctcctttttggcagggtcgtcatccccaaaacagggagactgtgttttggggacaagttttacgtcatcaacaaagatgaaaggcttgaatatggacctggagaggaaggagaggcacttcagccaggcagaggctgggacccgggaacacccagagactgtccttttattcagcaaacatttcccaagccaacttatggtgggtggtgggtgtgggtgacgggtgggtgggtgagtgccaagagagacataactgcatgttttagtcgctattttagcaaaactgcagccatttacaagctgcaaattcctctacttacagcaaagagacatcaaaacagacttcctttgttctgaaccatttgagaggactcttttagcaataaaaagtgaggcaaacaaacagtgttctgagaaacggtgcaaggagccatctagctgagcgagagaggtttgccttttttttttttaataccgtggtctgagaagcagcctttgggaaaggaagggccttttggtttgggtttgtttt

SEQ ID NO: 317 - DNA, 3962 bp, Homo sapiens
cccccaccagaagcagatgcttgcgccatgcttcttgcacagcctgcaggactgtaagcacagacacctccagcttgcgaagggcagatccgaaaggccggagtgcgctgttggctgatatccagcaaggaactcgcctgcgcaaagtcacgcagatcaacgaccgcagtgccccgcagatcgagagttctaaaggaaccaacaaagaaggaggaggttctgcaaacacacgaggcgcgagcacacctcccaccctgggagatctgtttgctggtggctttcctgtattgcgaccagcaggccagcgggatgtagcaggtggcaagacagggcagggccctggctcccgcgcgccctctcccaggcttcccaacaaaaccatcagcggcccgcttatcccgcctgcctctcccaggctaggcaatacctccgaggcgcatggcgctgccaggacagccccgcctcgccccaacgtgcctgccccgccccctcccaccccaccccctccgcctccacccttacccccgccccttccctcttcctcccccatcaaaactccgcttgtgtccccacccggcccactgaccaaagggaacctcccggtggttgcaccccccgtcccctgtgcgccaccacctccacctccgccacctcccccaacgccacccccgctgcccccggcctcggttcttagtgacaaggcagtgaagcctcagctggctcccttgcacctcccgcccatcccgcccccgctccctctgctcccaccttgtgggtatccggggctcaaagcggagcccgccagccctgcgcaagatgcgcaggagcctcccgccccgccgcccccgctccccccttatgcttcttgctccccgagggcttctttgcccgcgccccctttgccaggagttaatagcagcagtgaaactccacccccgctaccccctaaatcccccagcttccaggccccaccgcagaaggccggtgcgcaggccttgcccgccccgcctgcccctccgggctcccagccgttcctgcagaagaagaggcatggccgaccaggggccggtgggggaaagctaaatccacctccagcaccccctgcgagatcacctaccacagagctttcaagcaagagccagcaggccacagcctggaccccgacgcagcagcctggaggtcaactgcgaaatggaagcctgcacatcattgatgacttcgagtctaaattcacgttccattctgtggaagactttccccctccggatgaatataaaccatgccagaagatttaccccagcaagatccccagaagccgtacacctggtccctggctccaagcggaagcagtcgggcagagctctgatgacatcaaaggcagaaattctcagttatctctaaagactcttcggtgagaagacagatgaagcgaaggtcctggggttccaggttgcagaacaacatgtcagaccccacccaccccatgctcaagctgtaattcagttggcatacaggcttggaattgagaatttatttattgtaaatatgtgatttgcacgggctttaaagcagtattttaattgacttttatttcggtaatattttttaaaacacccctcatttttccattttttgcattgcatcttggcatttgtcagcacagatagagccctgtccctccacctagtgcccactccatgactgtgaatctgcttgcaggctggcccttcctagattctgaaccgtttgtagagagtccttagtttgcaggtagccccaaagttataaatatccacaacggcttcttattggcataatttcatattctcatcacactaactgcaaaatcaaaccaaataatgccttatcaatgatgcagctcagaggaagtagtgtgtcccccacacccagacagtgccgcgcagcctccagggaacgaggtgccatgtctcgcttccattttgcagtacagggaatttttttttttttttttttttttttttgctgcctaatgtaatacatcacaaagtaaaggcaagagtgggcttggccctccgatgccaaccacagggccccttttgtaactgaataatcctccaagtagccagtgctcctactgtttacagtgtccctcgtgcccaagtctctgtcactttcatcctgttccctccaagttcccagtcccatcccagtagccagctttatgagattttggtatttcttccctacagattaaaaacatacacaactcatcattatgctaaactaccagttgtatctcagaggtctccccttctgcccttgcttcgagtgtggacttccatggaaaatatgacatgaaaaagtgtagaacgaaacatcgtgtgaaatacctgccacaaatacctagtgcctcactgcccccatcttaggatccttggagccacccgtcaggcaaaacctagctcccttctgagctaaaggagaaccttgcctgacaactccacattcattcccttgtggtgggcacctgtctgtggggagatgtgtgcaagctcagccactctgaatatggaaaaggtcaggccgggctggtcctgctcttcactccctcttcttgatcctgtagggagtggaaatgtgtttttgcttgctgcctgacccctgatgttccccatctttggtcggggaagactgtgacagaggaaggagaaaaaatagaaggaaacagactgatccctgggctgtgctcaaaatagctgccctttaaaggaaatcaggcagggaggggagggaaaccagcgaaaaagaaatttgctttgcaacaacccacgcacacattcacccctgaagtatatcatgaacagaccaagccatccagaaaggcagccggtcaggagggtgtgggcaaacatgactgcatctgcctcactgttgtctggagtaacgactcaggtggtgtcctgcagcagtgctgtgctttctcattccagatggaagcaagtgagccagggtcaaattcccttctccaggggaatgaatcaagcccaaactgtaacagctaaataagtagaagtttttgcaggtcatcagctctgggcataactaatttgttttattggttctggaagatttccaaaaagccagaatttattattataacagtgtccactccactgccctcacagttgtgtaaaataattatagaagttttaatgatcctgattaagaagaccctagacaaaggcaattccaccttcagagtagactgcctgccctaatgaggtgtttagacattcgtgtctcctatggctgggatggaaattaaaataacactatttaaggacagagcgggccaggagcagtggctcatgcaggtaatcccagcatgggaggctgaggtgggtggattacttgaggttaggagttcaagaccagcctggccaacatggtgaaaccctgtctactcaaatacaaaaaattagccaggcatggtggctcacacctgtaatcccagcaacttgggaggttcaggcacaagaattgcttgaaccctggaggtggaggttgcagtgagctgagatggcaccactgcactctagcctgggcaacagagcgagaccctaactcaaaaaaaaaaaaggacagaggggaggaaggagcagaaaccaaaaatggcaattagggagaaatctcaggaatgtggcatcccatctccccttgagacctatcactgaattcacaacccttcgagctcatgctggtgcactgagtcccttgggcgctgtaaaggtttaaccccttgactgtaaactcagacttagagacatctgagtcacacagtccccgccattgtcacatattctcactgacactgcagtctgtgactcctccaatgtttcacgtgtattttatatttattgatgtctccttccgcagattcatttctttgtacttaataaactttagtaagtggaaatgct

SEQ ID NO: 318 - protein, 466 aa, Homo sapiens
PTRSRCLRHASCTACRTVSTDTSSLRRADPKGRSALLADIQQGTRLRKVTQINDRSAPQIESSKGTNKEGGGSANTRGASTPPTLGDLFAGGFPVLRPAGQRDVAGGKTGQGPGSRAPSPRLPNKTISGPLIPPDRLGNTSEAHGAARTAPPRPNVPAPPPPTPPPPPPPLPPPLPSSSPIKTPLVSPPGPLTKGNLPVVAPPVPCAPPPPPPPPPPTPPPLPPASVLSDKAVKPQLAPLHLPPIPPPLPLLPPCGYPGLKAEPDAQDAQEPPAPPPPLPPYASCSPRASLPAPPLPGVNSSSETPPPLPPKSPSFQAPPQKAGAQALPAPPAPPGSQPFLQKKRHGRPGAGGGKLNPPPAPPARSPTTELSSKSQQATAWTPTQQPGGQLRNGSLHIIDDFESKFTFHSVEDFPPPDEYKPCQKIYPSKIPRSRTPGPWLQAEAVGQSSDDIKGRNSQLSLKTLR

SEQ ID NO: 319 - DNA, 1185 bp, Homo sapiens
caggaaaagaggtgtgagcaggacccaaaagtgtctctcccataggtaatctgagatcagccttgggagtgggacggggaagacagagaactgcaagaggagaaactgacagcagacaggacattttgcttatctgaaaatgctactatagtcaaatcccttttactcccttacaggtaagcacagacacctccagcttgcgaagggcagatccgaaaggccggagtgcgctgttggctgatatccagcaaggaactcgcctgcgcaaagtcacgcagatcaacgaccgcagtgccccgcagatcgagagttctaaaggaaccaacaaagaaggaggaggttctgcaaacacacgaggcgcgagcacacctcccaccctgggagatctgtttgctggtggctttcctgtattgcgaccagcaggccagcgggatgtagcaggtggcaagacagggcagggccctggctcccgcgcgccctctcccaggcttcccaacaaaaccatcagcggcccgcttatcccgcctgcctctcccaggctaggcaatacctccgaggcgcatggcgctgccaggacagccccgcctcgccccaacgtgcctgccccgccccctcccaccccaccccctccgcctccacccttacccccgccccttccctcttcctcccccatcaaaactccgcttgtgtccccacccggcccactgaccaaagggaacctcccggtggttgcaccccccgtcccctgtgcgccaccacctccacctccgccacctcccccaacgccacccccgctgcccccggcctcggttcttagtgacaaggcagtgaagcctcagctggctcccttgcacctcccgcccatcccgcccccgctccctctgctcccaccttgtgggtatccggggctcaaagcggagcccgccagccctgcgcaagatgcgcaggagcctcccgccccgccgcccccgctccccccttatgcttcttgctccccgagggcttctttgcccgcgccccctttgccaggagttaatagcagcagtgaaactccacccccgctaccccctaaatcccccagcttccaggccccaccgcagaaggccggtgcgcaggccttgcccgccccgcctgcccctccgggctcccagccgttcctgcagaagaagaggcatggccgaccag

SEQ ID NO: 320 - protein, 346 aa, Homo sapiens
  VARIANT (1)...(346): Xaa = Any Amino Acid
KCYYSQIPFTPLQVSTDTSSLRRADPKGRSALLADIQQGTRLRKVTQINDRSAPQIESSKGTNKEGGGSANTRGASTPPTLGDLFAGGFPVLRPAGQRDVAGGKTGQGPGSRAPSPRLPNKTISGPLIPPDRLGNTSEAHGAARTAPPRPNVPAPPPPTPPPPPPPLPPPLPSSSPIKTPLVSPPGPLTKGNLPVVAPPVPCAPPPPPPPPPPTPPPLPPASVLSDKAVKPQLAPLHLPPIPPPLPLLPPCGYPGLKAEPDAQDAQEPPAPPPPLPPYASCSPRASLPAPPLPGVNSSSETPPPLPPKSPSFQAPPQKAGAQALPAPPAPPGSQPFLQKKRHGRPX

SEQ ID NO: 321 - DNA, 4221 bp, Homo sapiens
ccggtggccggggagcgagccgggcgcaccgagcgcagctcggcggtagcggcgccgcttggagcacgggcgctgcgggacggagcccggagccggaggcggcggcggcggagacgtcggccggagctcgagtccagtccagcccccggctccgccacctgcaggtagcgaagccactctcttgggaccattcataagcaggagacatcaacaccgtgacacatgccagtgccaccgccacccccacctcctctgcctccacctcccccgcctctgggggctcctccccctcccccaccatcagcacccccggtaagcacagacacctccagcttgcgaagggcagatccgaaaggccggagtgcgctgttggctgatatccagcaaggaactcgcctgcgcaaagtcacgcagatcaacgaccgcagtgccccgcagatcgagagttctaaaggaaccaacaaagaaggaggaggttctgcaaacacacgaggcgcgagcacacctcccaccctgggagatctgtttgctggtggctttcctgtattgcgaccagcaggccagcgggatgtagcaggtggcaagacagggcagggccctggctcccgcgcgccctctcccaggcttcccaacaaaaccatcagcggcccgcttatcccgcctgcctctcccaggctaggcaatacctccgaggcgcatggcgctgccaggacagccccgcctcgccccaacgtgcctgccccgccccctcccaccccaccccctccgcctccacccttacccccgccccttccctcttcctcccccatcaaaactccgcttgtgtccccacccggcccactgaccaaagggaacctcccggtggttgcaccccccgtcccctgtgcgccaccacctccacctccgccacctcccccaacgccacccccgctgcccccggcctcggttcttagtgacaaggcagtgaagcctcagctggctcccttgcacctcccgcccatcccgcccccgctccctctgctcccaccttgtgggtatccggggctcaaagcggagcccgccagccctgcgcaagatgcgcaggagcctcccgccccgccgcccccgctccccccttatgcttcttgctccccgagggcttctttgcccgcgccccctttgccaggagttaatagcagcagtgaaactccacccccgctaccccctaaatcccccagcttccaggccccaccgcagaaggccggtgcgcaggccttgcccgccccgcctgcccctccgggctcccagccgttcctgcagaagaagaggcatggccgaccaggggccggtgggggaaagctaaatccacctccagcaccccctgcgagatcacctaccacagagctttcaagcaagagccagcaggccacagcctggaccccgacgcagcagcctggaggtcaactgcgaaatggaagcctgcacatcattgatgacttcgagtctaaattcacgttccattctgtggaagactttccccctccggatgaatataaaccatgccagaagatttaccccagcaagatccccagaagccgtacacctggtccctggctccaagcggaagcagtcgggcagagctctgatgacatcaaaggcagaaattctcagttatctctaaagactcttcggtgagaagacagatgaagcgaaggtcctggggttccaggttgcagaacaacatgtcagaccccacccaccccatgctcaagctgtaattcagttggcatacaggcttggaattgagaatttatttattgtaaatatgtgatttgcacgggctttaaagcagtattttaattgacttttatttcggtaatattttttaaaacacccctcatttttccattttttgcattgcatcttggcatttgtcagcacagatagagccctgtccctccacctagtgcccactccatgactgtgaatctgcttgcaggctggcccttcctagattctgaaccgtttgtagagagtccttagtttgcaggtagccccaaagttataaatatccacaacggcttcttattggcataatttcatattctcatcacactaactgcaaaatcaaaccaaataatgccttatcaatgatgcagctcagaggaagtagtgtgtcccccacacccagacagtgccgcgcagcctccagggaacgaggtgccatgtctcgcttccattttgcagtacagggaatttttttttttttttttttttttttttgctgcctaatgtaatacatcacaaagtaaaggcaagagtgggcttggccctccgatgccaaccacagggccccttttgtaactgaataatcctccaagtagccagtgctcctactgtttacagtgtccctcgtgcccaagtctctgtcactttcatcctgttccctccaagttcccagtcccatcccagtagccagctttatgagattttggtatttcttccctacagattaaaaacatacacaactcatcattatgctaaactaccagttgtatctcagaggtctccccttctgcccttgcttcgagtgtggacttccatggaaaatatgacatgaaaaagtgtagaacgaaacatcgtgtgaaatacctgccacaaatacctagtgcctcactgcccccatcttaggatccttggagccacccgtcaggcaaaacctagctcccttctgagctaaaggagaaccttgcctgacaactccacattcattcccttgtggtgggcacctgtctgtggggagatgtgtgcaagctcagccactctgaatatggaaaaggtcaggccgggctggtcctgctcttcactccctcttcttgatcctgtagggagtggaaatgtgtttttgcttgctgcctgacccctgatgttccccatctttggtcggggaagactgtgacagaggaaggagaaaaaatagaaggaaacagactgatccctgggctgtgctcaaaatagctgccctttaaaggaaatcaggcagggaggggagggaaaccagcgaaaaagaaatttgctttgcaacaacccacgcacacattcacccctgaagtatatcatgaacagaccaagccatccagaaaggcagccggtcaggagggtgtgggcaaacatgactgcatctgcctcactgttgtctggagtaacgactcaggtggtgtcctgcagcagtgctgtgctttctcattccagatggaagcaagtgagccagggtcaaattcccttctccaggggaatgaatcaagcccaaactgtaacagctaaataagtagaagtttttgcaggtcatcagctctgggcataactaatttgttttattggttctggaagatttccaaaaagccagaatttattattataacagtgtccactccactgccctcacagttgtgtaaaataattatagaagttttaatgatcctgattaagaagaccctagacaaaggcaattccaccttcagagtagactgcctgccctaatgaggtgtttagacattcgtgtctcctatggctgggatggaaattaaaataacactatttaaggacagagcgggccaggagcagtggctcatgcaggtaatcccagcatgggaggctgaggtgggtggattacttgaggttaggagttcaagaccagcctggccaacatggtgaaaccctgtctactcaaatacaaaaaattagccaggcatggtggctcacacctgtaatcccagcaacttgggaggttcaggcacaagaattgcttgaaccctggaggtggaggttgcagtgagctgagatggcaccactgcactctagcctgggcaacagagcgagaccctaactcaaaaaaaaaaaaggacagaggggaggaaggagcagaaaccaaaaatggcaattagggagaaatctcaggaatgtggcatcccatctccccttgagacctatcactgaattcacaacccttcgagctcatgctggtgcactgagtcccttgggcgctgtaaaggtttaaccccttgactgtaaactcagacttagagacatctgagtcacacagtccccgccattgtcacatattctcactgacactgcagtctgtgactcctccaatgtttcacgtgtattttatatttattgatgtctccttccgcagattcatttctttgtacttaataaactttagtaagtggaaatgct

SEQ ID NO: 322 - protein, 479 aa, Homo sapiens
MPVPPPPPPPLPPPPPPLGAPPPPPPSAPPVSTDTSSLRRADPKGRSALLADIQQGTRLRKVTQINDRSAPQIESSKGTNKEGGGSANTRGASTPPTLGDLFAGGFPVLRPAGQRDVAGGKTGQGPGSRAPSPRLPNKTISGPLIPPDRLGNTSEAHGAARTAPPRPNVPAPPPPTPPPPPPPLPPPLPSSSPIKTPLVSPPGPLTKGNLPVVAPPVPCAPPPPPPPPPPTPPPLPPASVLSDKAVKPQLAPLHLPPIPPPLPLLPPCGYPGLKAEPDAQDAQEPPAPPPPLPPYASCSPRASLPAPPLPGVNSSSETPPPLPPKSPSFQAPPQKAGAQALPAPPAPPGSQPFLQKKRHGRPGAGGGKLNPPPAPPARSPTTELSSKSQQATAWTPTQQPGGQLRNGSLHIIDDFESKFTFHSVEDFPPPDEYKPCQKIYPSKIPRSRTPGPWLQAEAVGQSSDDIKGRNSQLSLKTLR

SEQ ID NO: 323 - DNA, 2372 bp, Mus musculus
  misc_feature (1)...(2372): n = A, C, G or T/U
gtgccggtgagccagggcgccgcggccccccaaccctcgtgccccagccnnnnnnnnnnnnnnnnnnnnggccccgggcgccccgccgccccgcgccatgctcacctgagcgacttctccggctccgacgcgcttctctccaagcccaccgaaggctgcgcccacgccagccccgagctgccccggctgcctgctagggacgctccctcggccgccgcgtatcctggaggtaaggagcgggtctgggagctcgaagactctgaacgcgatgaagggtgataggagaggcgcgcggggtggggggtgggggtccccaagcgcgcagtaccattcccacccccaccaaggccacaggcgcctgtgcgggagccttgggtgtgcgcgccctggggcgtccgtgggggtccctctgctgcaggatcggaagtgcacgaggcgctctgcgggtgccttgcgccaggaggactcgggtggagggggtcgcagctgtaggctccgaggcacgccctttgaggtgtgcggggctgatgcgtggtccctcctttggcaggcgacttcttgagctgggctttgagcagctgcggcgccgggggggacttaacagactcctgcttcctggagggccctgcacccacgcccccttcgggcctcagctacagcggcagcttcttcatccaggcggttcccgaacacccgcacgacccggaggccctcttcaacctcatgtctggcatcttgggcctggcacccttccccggtcccgaggcggcagcgtctcggtcccccctggatgtccctttccccgcgggccccgatgccttgctgccggacctctactccccagatctgagttcggccgcctttccggaggcgttttgggaggcagcgccttcggcgggcgctccctcgcagtgcctgttcgagccccagctctccccgcccgacgtcaagccagggctgcgggcgcctcccgcttcgccagcgctggacgctgctgcttcagccttcaaagggccctatgccccctgggagctgctgtcggccggggtcccggggaactgtgggtcgcaggggagcttccagaccaccccggaggcccgcttctctgcagtagggaccaaggtcgaggacctgctgtccatcagctgccccgccgagctgcccggcccggccgccagactctaccaggcaggggcctacgacaccttctcgttggccccaggtgacttaggggaggggaccgagggcctcccggcgctgctgacccctcccggcggggagggagggagcggcggcgaaggcggagagttcctggccgcccctccggcgcagctgtcccctctaggcctgcgcggtgccgccacggcggacttctccaaacccctggtggccgatctcccggggggcagcggcgtggccgcgccctcatcccccgccgcatccttccccgcggccaaagcccgacgcaagggacgccggggcggcaagtgcagcgcgcgctgcttctgcccgcggccgcacgtcaaggccttcgcctgcccggtggagagctgcgtgcggagcttcgcgcgctccgacgagctcaaccgccacctgcgcatccacacgggccacaagcccttccagtgccgcatctgcctgcgcaacttcagccgcagcgaccacctcaccacgcacgtgcgcacccacacgggcgagaagcccttcgcctgcgacgtgtgtggccgccgcttcgcgcgcagtgacgagaagaaacggcacagcaaggtgcacctaaagcagaaggcgcgcgcggaggagcgcctcaagggcctgggcttctactcgctgggcctctccttcgccgcgctgtaaccggagctggccccgtaggtcgggggcgccgggtgctcggcgcacgcggcacggtccggccggtccctcgttccccgctgccctccctgcctcttccacgcacgtccggggccacccgcagtccagctccagtttcccccgaagcgcccgccgctcacgcccttcagcacgggttccgcggacagcgcccgctgttcaggagccgccttcctccagccagcctctctggggacagtcctctcggtccacccacagagcaggcacttccttgggactgaagaaagtgtttttgtaactggcgtacgccccacgccttcctctttatccctccccagagacaagctggggatgtaccgagccggtctcttaagaactttgtacagcaagtctttggatgtgatgtttttgctttggggttatttcctttttgttgttcattttttgtaaagcagacgctactctcaagcatttgacaaaactgtttatttttgcaattaaaattattgtgctaaaagctt

SEQ ID NO: 324 - DNA, 2051 bp, Mus musculus
  misc_feature (1)...(2051): n = A, C, G or T/U
gtgccggtgagccagggcgccgcggccccccaaccctcgtgccccagccnnnnnnnnnnnnnnnnnnnnggccccgggcgccccgccgccccgcgccatgctcacctgagcgacttctccggctccgacgcgcttctctccaagcccaccgaaggctgcgcccacgccagccccgagctgccccggctgcctgctagggacgctccctcggccgccgcgtatcctggaggcgacttcttgagctgggctttgagcagctgcggcgccgggggggacttaacagactcctgcttcctggagggccctgcacccacgcccccttcgggcctcagctacagcggcagcttcttcatccaggcggttcccgaacacccgcacgacccggaggccctcttcaacctcatgtctggcatcttgggcctggcacccttccccggtcccgaggcggcagcgtctcggtcccccctggatgtccctttccccgcgggccccgatgccttgctgccggacctctactccccagatctgagttcggccgcctttccggaggcgttttgggaggcagcgccttcggcgggcgctccctcgcagtgcctgttcgagccccagctctccccgcccgacgtcaagccagggctgcgggcgcctcccgcttcgccagcgctggacgctgctgcttcagccttcaaagggccctatgccccctgggagctgctgtcggccggggtcccggggaactgtgggtcgcaggggagcttccagaccaccccggaggcccgcttctctgcagtagggaccaaggtcgaggacctgctgtccatcagctgccccgccgagctgcccggcccggccgccagactctaccaggcaggggcctacgacaccttctcgttggccccaggtgacttaggggaggggaccgagggcctcccggcgctgctgacccctcccggcggggagggagggagcggcggcgaaggcggagagttcctggccgcccctccggcgcagctgtcccctctaggcctgcgcggtgccgccacggcggacttctccaaacccctggtggccgatctcccggggggcagcggcgtggccgcgccctcatcccccgccgcatccttccccgcggccaaagcccgacgcaagggacgccggggcggcaagtgcagcgcgcgctgcttctgcccgcggccgcacgtcaaggccttcgcctgcccggtggagagctgcgtgcggagcttcgcgcgctccgacgagctcaaccgccacctgcgcatccacacgggccacaagcccttccagtgccgcatctgcctgcgcaacttcagccgcagcgaccacctcaccacgcacgtgcgcacccacacgggcgagaagcccttcgcctgcgacgtgtgtggccgccgcttcgcgcgcagtgacgagaagaaacggcacagcaaggtgcacctaaagcagaaggcgcgcgcggaggagcgcctcaagggcctgggcttctactcgctgggcctctccttcgccgcgctgtaaccggagctggccccgtaggtcgggggcgccgggtgctcggcgcacgcggcacggtccggccggtccctcgttccccgctgccctccctgcctcttccacgcacgtccggggccacccgcagtccagctccagtttcccccgaagcgcccgccgctcacgcccttcagcacgggttccgcggacagcgcccgctgttcaggagccgccttcctccagccagcctctctggggacagtcctctcggtccacccacagagcaggcacttccttgggactgaagaaagtgtttttgtaactggcgtacgccccacgccttcctctttatccctccccagagacaagctggggatgtaccgagccggtctcttaagaactttgtacagcaagtctttggatgtgatgtttttgctttggggttatttcctttttgttgttcattttttgtaaagcagacgctactctcaagcatttgacaaaactgtttatttttgcaattaaaattattgtgctaaaagctt

SEQ ID NO: 325 - protein, 470 aa, Mus musculus
HLSDFSGSDALLSKPTEGCAHDELPRLPARDAPSAAAYPGGDFLSWALSSCGAGGDLTDSCFLEGPAPTPPSGLSYSGSFFIQAVPEHPHDPEALFNLMSGILGLAPFPGPEAAASRSPLDVPFPAGPDALLPDKPDLSSAAFPEAFWEAAPSAGAPSQCLFEPQLSPPDVKPGLRAPPDALDAAASAFKGPYAPWELLSAGVPGNCGSQGSFQTTPEARFSAVGTKVEDLLSISCPAELPGPAARLYQAGAYDTFSLAPGDLGEGTEGLPALLTPPGGEGGSGGEGGEFLAAPPAQLSPLGLRGAATADFSKPLVADLPGGSGVAAPSSPAASFPAAKARRKGRRGGKCSARCFCPRPHVKAFACPVESCVRSFARSDELNRHLRIHTGHKPFQCRICLRNFSRSDHLTTHVRTHTGEKPFACDVCGRRFARSDEKKRHSKVHLKQKARAEERLKGLGFYSLGLSFAAL

SEQ ID NO: 326 - DNA, 22858 bp, Homo sapiens
taattactcaattttttaaagttttttttgctgaagtaaatgacatctttgaagtgtgataaaatatatcaatcacactttaaattgatatattttaaaggtatgtagtaggtcataagggtttataactgttatgtcatcgccttgtcattcatttctaagttgtcttccttttgacctcctgaaaacaaacatagaattaaacaacaacaatctacttccatcagtaggagaatggataaacaaattggtatatttaaacaatggaaagttagtgactgagaaaaaaggattgatacatacaaaacatttattaattgatactgatgcatgaaaaacatggagtgggtaaatcttacagagattatgttgagcaaaagaagccagacacaaaacagtacgtactgaattattccatgtatatgaagttcaagagtaggcaaaactaatctatagtgatatactgagaaatatggttacccgaaagagggggtatctactgactggaaaaaggtacaagggaactttttggaggatgtaaatgttctatatattgatttgtgttaaaaagtcatcaaatggtagattcacttaagatttgctcctttcactgtatataaattaaagctccataaataaaacgtagtgggtcagaggaagactctgtttctcctactgattctccacctaaataaatgaccactggccaggcacggtggctcatgcctgtgatttcagcactttgggaggctgagacaggagaattgcttgagcccaggaattcaagaccagccggggcaacacagtgagagccccatctttacaaaaaaaaattttttaattagcggggtgtggtggtgcgtgcctgtggttccagctacttgggaggctgaggtgggagaattgcctgagctggggaaagttgaggctgcagtgagccatgatcgtgccactgcactccagtctgggcaacagagcatgagagcctgtcttgaaaaagaaaaaaaaaaaaacgactaacccatggtcaaaactgaacccaagagtcaaccttgactccttcctctctcttttgccccaagggtagctattcacccttgtgtgtgtgttataaaagagctcctaaatggctgctgactctgaaagcttctcctttcctgttgccacccactgttcacgtctgagggcccactgtcagttgatttgccacagtggcctcctaactgatccccgttccaggtcaccttccacgctgtatcagagcatggaaggtggtcttagaacgctggtcattctaagataaaaatcgcatcgcctgtacagcttaaatctcttcaatagcatcgtattactctagggataaagtccaaatgcctatgcatagaagcttgtgatcagatgggtggggaaaaaaaaaaaaaagtccaaatgcctatgcatagaagcttgtgatcagataggtgggggaaaaaaaaaaaaaagtccaaatgcctaaacctgcttaaaaggtcttctaggatcctgagctcaccagtttctccagcctgaccccacttgcccttcctagcctctttccctcctcacactccagccatcatgggcttccgccagttccctgaatccttttctcctcccttgtcttttttctctcaccttctggcttttgtatatgctgtcccctttgcccagaacattctccccactcaacctttccctttttctggctaacttttacttaaccttccagtctccattcaaatgtcacttccttggggaagccttccctgaatatcttgttgagctaacgacctcctgcttccttctatgatctcaaaccatccggtccttctcccgctggcacatgcatcacacctttctgtaataagttgttgaactggctgatgtattaagtcctcaacaaatatttagatgaatgaataatgaatgaatgagagcaaggattggaagaaaacaactagtcatgaaattcatgtcatagtgaccaattccacccacatacacatagatgcccagaaaacacagggcacacatttggggtaggaagaattactcatcatttcttaactgcatatattgtttctaacctcgcctttttttttttttttttttttttgtagcaagtgcctgtgcttcaaccaccacttaatttgttaattctgactcttaatcctgagactataggtagagaaggtaacatactcccatttcacaggtgagaatgcacaagcacagaaagtatttcgaatttgttcaaggtcacagaacaaaccagtggcagaactgggtcagactcagttcctctgactccctggcttgaggttttactctattgtcagattctctatgtctcctgcaggccatgtgtccctaccaaatgtagggatcaccggtttggcctttgtgagagcaggtgcttagaaatcctgttgaactttcttccttcgctacctaccctgtaccagaaacctgctgcacaacattgataaaaccagttctattctaggccctgacttgctgctgcctggggaggtgacccccagggcattccccctcatgcttaactgaataaaactccctgctgaagtcttcacatggcacaccgcatgaacatgtgggacccactggttgccaagccaaatgtggctccagattattctaggaaacaaataaattgttttgctctggattgaaggaattgctaattagggatttttattttgagcagtgttccttggagctggcagacagatggagtaggcgacttgctccaggggcattgttaagcagagggaactatttctgcccctggttatgagaacgtgccagagctcattgctgcccagctcttgccctcaaggacaagggaggcttcctggctcacagttatttcctcttctctgggcctggccctcaaagcacaagcacaagaccctagtggtggtgtcaaccggatattaccctgcctgctaaccatataattgtcctaaggagaagaggagaggtcttttctaggattccctacctgtaactgggaatgagaatccatttatcacagaagctgaggtgtagaacacacagtctgctaaaggccaggttttcagttatcagggagaaaaaaaaaaaaggagctgagagcattctgaaaactcttagcctctgacacccagtgtgtccctgatgccctcacaggttggttgtttgacacttttttggattccccattcccttggatatgctgataatttcttctttcctcccctctttctttctttctctttcttttttctttctttttctttctttctctctttctttctttctttctttttcttcctttctttctttcgttcgttcttctctaagctaattgaggttgcatttctgtcatttgcaaccagaagcccagcctgatgatgatggacaggattcaaggacacacagaggacccaggctatggctcaacagacctagctgtggataaattgcctgggcatttcagagttatattgtccaatctcagtacgatgaccaatctacatcaaagaggtttaaagaaaactatggcaagatgggggaggagagacggtgaaaagacagtgagatgagctcagataagtgaaaatagaaggaggccagagagagagaaacatgccagatagataggttaagaaggcttgtttctaattccatttctgttctagagctataggtctctccgtctgctcactaatcctcctttttaacttcttaacacatgaattggaaattagtgctctgaacaccattacttaatcaaataaaaacatttaacaagatccaagtccgttattacccacaaagggataaccaggcttagatccaaagggctgatgggaggccgattccaaatcacagggcagtagcagtgtgaagtcactgtaaccgtccacctacctctgaccctcctagaacccaccctagtcacgcctcttctgtgatcatctacctctcggctctgtccagtgttgccaaaggaaggctatagaatggaagatgagagaaagaataacctccctctctcctgtaggagaacagctcagaagccaagccaccttggaagaatccacttttcctaatggcatgcagccaccttgttctccttgccacctctccccatgatccaaaagagaaagaacaggcccggtgtgctggctcacacctgtaatcctagcgctttgggaattcatggtgggagaatcacttgagcccaggagttagaaaccagcctgggcaacagagagaccccatctctacaaaaaatgagtaaataaaaatagaaagaattcaaaatagaaagaacaaaagtaaagagggtacataagccccctatgtacctgtccccacctagtcctcccagtctatgccacagcagagcagcctcactttcagtgcccactacagggatgtgaggagcataaggaaggcttccactcaaaaaaagtctttgggtgaggaggccaaaggtacgtgggtcactcaggtcaggagttcaagaccagcctgaccaacatggagaaaccccatctctactaaaaatacaaaattagcagggcatggtggtgcatgcctgtaaccccagctacttgggaggctaaggcaggagaatcacttgaacctgggaggcagaggttgcggtgagccaagatcacaccattgcactccagcctgggcaacaaaagtgaaactgcatttcaaaaaaaaaaaaaaaaagtatttgggtgaggtattaagcctctatatcacggaaaaggaaatactaaggccctgtgaaaagattctcatccttactgataatttttacaataaaaattaaaatatcactgggatgcctctttctgcttaccagttggtcctcatatactgctagttggcccagagattggaacaatctttttagagaaatatttaacaatatatataattttaagtgtttgtacctttgtcctaaaaccagttctatttgtcctaaaaaatttcactttttttaaggaccatactaatcttccctgtatcattccaattttagtatatgtgctgctgaagtgagcatgaaatttcactttttgtaatctagcctatggctatagtatgagttcagatcccggcatcatcactaacctggtaagcttgggcaaatttcttagtgttccatgctcaatttctccatctgtaaaacagagataataatactaatcaggttgtggtgaggattaaatgatgagtataggtaaagctctcactacctgtcagatagtgcccatagtaaataacgtgcaaatgttagctagaatactgtagtattattaccccatcaatgcaccacgtatacataaaagaccatatatagccagatcctttataatagtgaaagacaggaaactataaagttaaaaaattatattcatctacacaatgaaatatgctggtgaaactgttaccaacactatagatcaacactgtagatgggtatcattatggaaaaaattttaaaaaaaacaaggtacagtgttaattagttacaagagtacgtatagtatgaaaatgatgtaaataagaatgatgataataatgtgattgttgactaaatggatgttgactaaatggatgttgcatgaatatgcatgaaaaaaatctataggaatcaacctaaaacgtgttcgtgtgtgtgtgtacaggatagtgaaaggtattctcgttctttgcattataatttttaacatttgtttttttcaataagcctgttacttttgtgggcattaaaaataatagccatactcataatcataataatgacccaaaccacaaactaatgatgggccatgagcagggaagagaaaagagacggagaaggaccctgacagttggcctcttgcctcaggggccgatgatcacactacttctgccctactggctgtggaagcccgggggcactgcagaggtcttgggagtggagttgggcactgcagatgctgcaactggatgcagacttcatctctgctgcggcttcattagccatgttttttgttactctgatggctggccctgcctctgtccctgcttttaaataaatcctttaggaagaaaaaaaaagagggagtggagggaaggggtaggagagaagagaggagaggaaaggaaggagaagaaagaagcagagaggaaagaggagtgagagatgcagtgcccctgcatctccatggccccaggaagtgggacatggaactgttcctcagctctcgctgtcaggagtcgccatggagacagagtgctggcctcttcatgattaatactcccaggcagctgtcttcttggagtcttttaaaatacacacactattatttgaacacaatgatatttagagcagaaagatcaaggtagggtgtggaggagggagcagtagcataaccagaactatgacaggggctgagccctccccagaagagagagcagggaggctgcctctaccctccctctgcccctccccacctccttccctggattcaaagcttccagtctcatgcactgcagcatcagcatctgaagggccaacccagcacctggcactgggctgtgctcaatgaatatttgatgaatgaatttcttcattcattaattcattcagcaaatgtttgttcagtgcttgtctagaaagtgattctcctttgcaccttttcccatggaaatagaaaattcgctctcaccttccccaagatcacacatacacacacacacacacacacacacacaccaacttacacaacagctccaaagaaccttatatgtgctacttctcagcactagttgtgacccactgttttcctatccatggccatcactccagggaattcttgcagggatgggcaccagccagctcaagtttgcacatcacatcctatttgaaagctacagggagatcctccatctaaagccatccaacagtgaatccttttgtaaaattaattatcttttcctaaattgtcttatagagtaggctagcctggacttgactctcagctctaccactgactagaagtgtggtgtcgatcacgtcatttgacctttttgaatctgtttcctcatctgtgaaattggtctccaattccttactccatagaacttttgtggagattgaatgataaaatatttgtaaaatgctcaatgtatgtgatttcccttttttcccttgtgtacatttgtgtttttatatttgaagtgtgatttaaatggagctcatagatctaagctcttctctcttccttcccttcccaaagacttttattttatctgggcccagaatctctttgtaagctgttaaaacgtagggagaagaagggacgagctgggaagaactacaaaatgctcagccccctttatattccctcccagtcttcagagagccaaaggcagatgcaaattgccctccagaggtagccatcctctgtgcctgtgagtgtgtgtatgtgtgtccattggaggtaagtagcatagacatgggggtgtgagccatcccacacccagagcacaagctgtctcttccctatctcctttcctaatcactcctacccacccccgagccctgcccccaggtctggcctctaacacaagaaactttggtgacttggacccttgtcctaacacagacctagtccaacagcccttggcagagagaagcaatggcttggcaactcaccaagagagtaggggaattatctgtgactaagaaggaggaggaatgctgtggcagagggaagaacagcagaagggatgggcaacctggggctgaccaatctggcccgacggggcgacctggggagacctggacaccagcccagtcaaactcctcccctcctcctccctctcaggcagtaggatgccagagtggatttgagacatgtgtgccctgtgtgtctggtgtgggctcacctggccttggcaatgcatttggattagaatcaaaccctggatctgaaatagagtataaggaaaatcgtgcttggtgtgtccaatctttacagacatctgctgggtttctgcatttcctacatgctcatatatgtgctactaacacagaaccataggtgtagccatttagtaagacacactgcaagtgcatgaccctgtgagaacctttatatgatttgtggacttcaggagaagatgcatacaagtgtgtcagcatatgttttgcaggtgattgtgtgaagggacatattctgtgaaaacacttaataaggtcactgtgggatgaggagtgggcacctagtgctggagatggggctcagggtcccagcagacataaaaccaaagtctaccttctggcctgtaataggcacttaagaaatgaatactgaatgaatgaacattgagaaactgaatggatgtttggataatggacatagggtgaaaggactgagaatgtggtggggtttgggcattcttgggctctctctctctctcttgaaaaagagggtacaggggtggaagagaggctgggagctatactgcccatgatgctgagtccaccacccccaaagggctttgtttctatttcaaaaaaggagagaaggaaggaggagccctaaacctgcccaccttaccctccagcacacagagtctcaggaattgatgctcttcataaagaagaacatgctattccatgtatttatttaatccttcccccccatgtatttatttaatttggttccagaaaggagttaagtgagctataatacaaaataaaataaacattttaaaaagaatgagagaatgagacagagggaaaaccacagcagaagagagatgagactaggagagtaggcaagcttctttgctggagttggctctgatgcttctgcagccaagattcacagcctccttaaggctaggattttttttttttttctcaaaagaagcccaattatttcaagtactgattccagggagatatttcccacggattccctgtgtgttgctgggatcaacatccttagagcgaaagccatttgtatgaaggcagaaaaaatgttctgcagaagcatctcataccctgtgggtgagggaggagtgagcaggaattggccctacttttctggaagacaatttgccagttgtctatcaaaattttacatatactttggcacacaattacactcgttggaatttatctcacagacacattcacatttatatagtcaaggatgttgactccaacaacattggtataagtaaaaagttggaaactgcctacatgctcatggataggggacaaatcgactaactcaaggtcctcccttacaatggagtactatacagccttgaaaaagaatgacaagatctttatgtcaggacatggcacaatctctaagttatttcaagtgaaaaaataataataataataatattgcagaacaatgtgtatggttggatatacataaaattcttctgaaagaatacccaagaaacttaaatgtggctacctcaggagctaggaatgaaggtaggtggagaggagggacttttacttttcaatttagaatataccctgttgtgctagttgactttcctcctactgttaacaagtattacagtcctttttaatttaaattatttttcctagcacaaatttaaaaaaaaaaaacttaaaatggaaaaacacacaggcgtgagcaaaagaaatgaatggcaataatctctatggtttactgagtgcgcctggacatttatgtgctctcagtttctctccacaggaaatgcacaggtgagaaactgacgttaagggggactgagtgtcaagctagttagtggcagagggcagattcaaacccaacacggtcctcccctgctgcccctcggcctctgcctccaggtgggaagcgcatctaccggacggtcggcccggtgaggcgcagcgccccagactggcgcatccgcggccccagcgctccacgcctggggagcgcgcgcgcacgcagcggcgcgagcctggcggcggcggcgacaacaacaacgtcacagctcgagctttccttttcgggagtccccggcacacatcctgtgtccatgtttgggcatttacgtcacggcggcagggccggggcctcccaaaatggcagtggcccggggagtcggaagcccggagccagcgccgccgcagctatataagtgggggggctgtgggctgggggagcccggcagcgctttggagaggcgaggagccgccgcccgaggccggtgcgggcgagcgagggcgccgcggctccccgactcctttcccagaggtgagtgcccgaagccaggagcccgggcgcctaggtctgtgcgctgcggggaacccctaccgccagcctccccgccacccgcgcgcccccaagcccagcgggcgaggccccgggcgccccacagccggcgccgcgccatgctccaccttagcgagttttccgaacccgacgcgctcctcgtcaagtccactgaaggctgttgcgccgaacccagcgctgaattgccccggctgcctgccagggacgctcccgcggccaccggctaccctggaggtaaggagggcgagcaggggtgctcagacgacgacggcgcagcgcgggggcgcaccatacctgagaaccaggagggactgggacattggagctatgagaataggggcgatgggaagcttaggagtcctggggtgcgcacccccattcccacccacactgggccgccagcgcctccgcaggaacctgtgcggttatcggagcgcccttttgcctgtgcacgtgtgttttgcgtgtgcatgtttctatgtgctccttgggacgtatgcgggcccctgctgaatcagaatgtgcaaaaggcactttgtgtatatccgtgggcaccaagagttttgtaggtaggggctgtggactcaggtgcaccctttgatgtgcccagagctgattcctgctccctcctcagcaggcgacttcttgagctgggctttgaacagctgcggcgcaagtggggacttagccgactcctgcttcctggaggggcctgcgcccacaccccctcccggcctcagctacagcggtagcttcttcattcaggcagtgcccgaacacccgcacgacccggaggcactcttcaacctcatgtcgggcatcttaggcctggcacccttccccggtccagaggcagcagcgtccagatccccgctggatgccccttttcctgcggggtccgatgccttgctgccgggtccgccggacctttactccccggatctgggcgctgcccctttcccagaggcgttctgggaggcctcgccttgcgcgggtgccccctcgcagtgcctgtatgagcctcagctctccccgcccgacgtcaagcccggcctccgggcgcctcccgcctcgccagcgctggacgctgtctctgccttcaagggtccctacgcgccctgggagctgctttctgtgggggccccagggaactgtgggtcacagggagactaccaggccgccccggaggctcgttttcccgtaatagggaccaagattgaggacttgctgtccatcagctgccctgcggaactgccggccgtcccagccaacagactctatcccagcggggcctatgacgctttcccgctggccccgggtgacttaggggagggggctgagggcctccctgggctcctgacccctcctagtggggagggagggagtagcggcgacggcggagagtttctggccagtacgcagcctcagctttccccgctgggccttcgcagcgccgccgcggcggacttccctaaacctctggtggcggacatccctggaagcagtggcgtggctgcaccacccgtgccgccgccgccgcccacccctttcccccaggccaaggcgcgacgcaaggggcgccgcggcggcaaatgcagcacgcgctgcttctgcccgcggccgcacgccaaggccttcgcttgcccggtggagagttgtgtgcggagctttgcgcgctccgacgagctcaatcgccacctgcgcatccacacgggccacaaacccttccagtgccgcatctgcctccgcaacttcagccgcagcgaccacctcaccacgcacgtgcgcacccacaccggcgagaagccttttgcttgcgacgtgtgcggccgccgcttcgcgcgcagcgatgagaagaaacggcacagcaaggtgcacctcaagcagaaggcgcgcgccgaggagcggctcaagggcctcggcttttactcgctgggcctctccttcgcttctctctgagcaagagatgggtttatgggttggggcgccgccgttcggcgcgcacgagttccgggccgttcccctccccgctcttcttccaactcctcctcgcacgcccgagggccggcctccggtcccgcttccagtttccttgaagcgcccgccgcacacgccctattcagcaccagctccgcggacagttcccgcggtccaggcgctgtcacccttgtcagccgcgctttgggggaagtcttctgagaccacccagtgaataggcactaccctgggattcaagacagtcttttgtaactggcacacgccccacgccttcctctataacccccagagacaggctggggcagcgccaaggcggtctcgcgcgggactttgtacagcagtgtcttatccagcagccattggatgtaacgttttgctttgggttttttttccttttgttgttgttaatttttgtaaagcagacgctactctcaagcagttgacaaaactgtttatttttgcaattaaaattattgtgctaaaagcttactgaatctgccatgtaagctcctgacccttccccttagcttctcccccaggaccatatgtgccagaagataaaggagatccccacgctcatgggatacagaccctgaacatattacacacccactgtcaggcacacctgccaggaactgcggcacagagtaggcattcagtaaatgtgtgttgggttaatgaacgaatttaatcacagctcacctaagggctggaggtgtttctggaacttcaaagtggttaaaaggcgtaggtgttcaacattatgtatatattattctccttaatcctcgcattcccaaataaagcaggcatatacctcatttcaaagatgtggaagcaatgtagatagcttgctggaacaatgtagttaacccaggctaggaacagacaggtcaaacaaatctgtccaacttcaaagccaaccctcattttccaaccccagaatggagacacctaaacttaatagcactgattggaaaggcttcctaccagaaggtgagaaacaggtttggcagctagagggagctccaggcagtagcgacaacagcaaaaggctgcagtattttggtgctgtttgtgaaagcccagagtgttcagtgtcacagaggctccagacagtatctatgcatctgttcaagagtcacatgatgtcaggacccaaagggtctcagcatttagctagagcacacctgaatatagctgggagcaggcacttgccagagactgatggtcaccttagttgctcttcccacaaaaaggatcttctccaggtggcatcagcctacttaccattcagccatgcgcctgccacagccacttttctccagctgtccttccaagtgaactcttcatggctttgggatcagaggaaggctaggagggtgatgaggaaagcatgaccttgtaatggtgaaggtggcccctttttactctttgaactccccacccaaagcttttccactctttctggccaccttgggcagaccttggagcataaaaaggccgctgtgctctccatctctctgctccaatgacccctctctgataaggaagaaagaaggcctgtgtctgaggacttcattgttttctcttctgagctgagctgttcttgaattaagagaccttacagccctatgatgccagatcaaaccagcttctgatactcttgctgctttcttcactccttcactctaagatatgctcaccctccaccccacagtccagctgaccagagacaaaatgatcaactcagagaattccatccttttctctccctaggttttaagtgctttcatgtggccaagtatcttgtatctaagaaactaatttgtggtaaaggatttaatattacctcttctaggagaattaacattttagaacagtagcctgcagagggcaatgtttaacccaatgaagaggctcaaattgtggactgtcaggcactgtgataagtggtagattcatggagacacaagataatcatgaccctcattgtcttactatttaagtcaccacacctttcacttattaggcatgggccacctgacttcacttttcatgaagagtagggcaagaaaagcataatggcccatatttcaagcaactggtcccaaaacacacaagctgaacaaaggaggaaacgcagacagtgggtggctggcctctgatcacccctatcttgccctctccagcagcattccagcaagtgccatcagctctattattcttatcctcacacccacctaggcctaacatcactgatgagaaaattgaaccccaaagaagtgacttagtagtagtcctggtaccagagcccagtctggctctataactcctagctgagaagttcctgctatgtcccaagggacactgctcccatttattggagcttcccctagggattgtgagggatgagaatattagactagagatggaaagaattaaaaccaaacaatgtgaaaatccaaacccaggacccaaccagaattggagaccaaagagctcattttccttatttgctcctctttttcaactggtcctcaaaacatgagtgttttcctggaccagttcttagctctcttctttcctatttcaacactttccttacagagtgcattcattgccaggccttcagctattattcctacgtagatggcttctaagtcagacagccccatggttctaatgaatacccccatatggatgtcccaccaccattccaaatacagtctgtctaaaatcaaatcacccttccatatttctggtaatagcaacattatttgattccctggattcatctaagtaactacagctctgtgggattcacttttgcttcttcccaccccacacatccaggctgtcacttagacttgttgaatcttattgtaattcttcagggtcttctctactctcattcacggtacattgttccaggttacgtattataatctttagcttgtgagctcaacttcagtggggatttacttgggcagcaatactctgtggccttgggtgatggtatgtttctcctgagcagtttcctgtttgcttctaccagacactccaagagtatcacctgatggagaccaatcttttgttaatttcttggtttgaggttcttgtaacatgcagatgttttgagttcaaagtccaactcaagtagttataaattctcagagacagttcccacttctctaaccaggatccaggtcaggacaaacaagcaatatgcctcccttcccataccttctggggttagtcacagcacatctcatgcttatatttcttggtctcagtccccctattttggtccatgtagatttttttccctttcttgcaagctcagccaagcatttcaggagatgtctgttacattttatgaagcaatccacatattttgtagcaagagagtctttgggctatctagtcaacaatgttgttgaaaactgaagccagatgatattaattcttctattaaaatatttcccacatttatcctctctgtgcctattgccagcaccttagtccatgccactccctccatatacacacataccttggctatgtcaatttcatagaatcacataatagcgttgcagttggaaggagtttgtaagaacatcctgtccaggccaggaatggtggcttacgcctgtaatcccagtactttggaaggccaaggcgggtaggtggcttgagtccaggagttcaagaccagcctgggcaacatggcaaaactctgtctctatttttttaagtatttttttaaaaagaacatcctgtccaaacccacactctatagaagagaatactgaagcccaagatgttggggattttctgaagggcacacagataataagagaatgaaatgggccttgaacctgggccttccagttccaagaccagtgcatatctaaatatccactcactccacagatactgagtgctactacatgctgggccagtgattcccaactattttacttcctggggcacctgagaaattcgacacacacatcagtaacagaggctcactcaagtcctgattctcacaccagaaaggtgggaaaaagtaatacaaatcttgatgaggtgggatatgggggggaagtttgagaaagcaacccagaatgtttgctattttctccctcttcaccccaactcctgtaccctatttgagacaagcctacactatgccaaactgcgtcctgtggtccctctgcctccattatgcctctttcattccacattgcccagcattaatgatgaaaatttcctaatacaccattcacaacaaacaagagcttcatcccaaactgaccaaggtttccaccctcctataaaaacaatacctatttttcacccttgctgtgaaagccctctatatctgatccaaattcaccttccaacctcctctgtcatctctccctttgtgctttgctctgccacctcccttcccccaccagttatccaaatgctcccacctttgagcaccttcaagggcagaaacctcatttgatccacatgtgtggtccccatatcaccaagtctaacatgaaagtgcttaattattgtgtcaattagttgaacaacaacaacaaaaaaaacccaaaaggagaagggaaacagaaaggggaaggaggagggaaggaaggtggttggagagcatgaagctggcaaagagagagggaggagaaaggatcaggagggaaagatgggaaaaagcaggactgaggaccgagtctgcagcaaggggccctgataggcaccataggcctcatgagtgggtctacacctctggctagtctgggtctttccagctcttgctgagcccacaattctttgcctcagctctgggaccccagaggtgtctccgtcactgagctctctctctcttttggtttctctggttcacatggagtgggattcagtttaacatttttagaactgtggttcccataacaaccaagcaggaactgttgtctgtgaaatgtagcatgggcacacaggcgcacaaatacacatgcatacattcacagacatatgcgcacacacatgcacacaggtgcaaatacacatgcatgaactcttacccacacatacatgcatgtgctcacagatacacacatgcacctatgtacacttgcatatgcacaagtgtacacctgcatacacacacacatccacacactcatgcacacatgcacaaaagcacccacatacatagccatgcatgtcccaaattgttttgacacattcacaggatgcacagagtgaggagaaacatcacaacaaaggtgaaaccaagacaatatatggacatttttggccatctgcaagagcagatggatttggggaatctgcattttgacatgtgaaggtccagtggactgtattatagcagagaaggcaggagggcactgtggttgagcatagactttggagtttgatgacttgagttcaagtcttgactatgccatgtgttgagctctgaattttagcgtcttcatctgcaaagtagggataataataatattaggaagagcaaatgatatgcataaaaattattagcatgatgcttggtgcctggttaataggagctgttatcgtttgggtattaggaaaagtgatttctcatttgtccaatctcagaagacctccgcgaggaggaaagaaattcaggagctacagagaggaagagaagatcgagagagggggaattcaacctgattggccactgtacagcctctgtccttattaagtttgccattcccccaaagccactgacaagtttacaaattatccttcctgatactgaatgtcccaatgcctctgccttcacaggaatgggatgggggtcaaagagaattcccatgagcccgagttactggaatcctgggactaagttgggtttctgctctcctgcaaccagattgcccctcaaggcacatgtgcacagccctacccaagcaccaccctcaggctgaaataacacttccccctcaaggcacatgtgcacagccctacccaagcaccaccctcaggctgaaataacacttcccccttttctcatccaagcctcagctctgctctggccttggttgcctccaaaccctgtgtggtttctcagccccactgcagccctgtggacttcctccaagcgtacgacagccagattgtttctgcctcaccagcttggtaggccttaggccaaaggtggggccgtctaggtgctccagtcccaagaagcctggctgctatcttagccaaatggtgggagtgggtaggagggaaccagggacctggaggccttttcctcctcctctaggtccgggatgggatttgtgatgggtacacgtgttcctaggcggctctttaagagcagaattgggtctccggatggggtccagcagcagttccgcgggttccctaggaatgcccagaggggatcatcccaggcggtctccgcggagaccaagcatctgacccgaggtcgccgagtgcacgacccaggcgcgctgcccatgaggccgcttagggaccgtggcgcatgtctcaggagtagcgcctgcgcccgcccccttccggattcacagaaccacccacccccggatttgcccccgcgtggaagcaggcccaagccagagtgctagggttagggcggagaggccctgattcaaggtgggcaacagaagccacagctggaggtgcccagggcggggaatgcactgggcggtgccgggagccgggaagactgggacccgggaggagcgcggcgcgagccatccctacacccctagggcggcgccgaagacccctcccccatcgaaaccaccttgagcggaaaacgtggggtcccggcgcagccgctgctgggcgcatctgccgctccccagctcactggagagcccgccccggaggaggggccggctccgccccacctcggtgctgcctccctcccccttcccttgctttcctcggcccgcgcgccccctcctccccctcctcctcctcctcctcctccatccttcctcccgccgggttcgtgcgcccctcccgctgcgactggctgggaggttcggccgcccccgccccgagagggaggcgggggcgctagccgcggcggccacccaaggctgcggaggggaacgagatccgaggccccaaggcggccctgcgtctggaccgggcacgcgggggctcttctgcgtccccagccctgggccgctgggcctggcctcgccgcggggtggaggaggtaagggcgagtcgcgggcacgctgcgggactgctcccggagagggaaggagggaggaccccagccactgtcccttcttccccttccggctccttcacagccctccggaggcccgcgaggccgcccaacggggagggattctgggcaggccagaccagaggcagggaaggggttaatttaagaaattaaaatcagaacgtttcgagaccaggcttcccctcccccctctcgcctgtcgctccctgagccaggttttggggcgggggcgggctccagaaccccactgggactctggaccttggagaacaggggccagagggaggggggaggggaagcgccctgaaaccccaaccctccctaccggtttctgaggggctgggggaggggcctggtgttgaggcctggctgggcacctgtgcgggtgtctgtgcgtgccggtgtgcacgtgtgatagtctggaggtgtgcatgtgtgtgcacgcatgtgtctgtctcttcacatccagtgcctgtactggtgacagtgctcacagtgtctctgaatgtgtgcgcccctccgcattgccttgcatgtgagtgtgtgtgacacggggcctgtgtgcactgcccacagtcggccagcgagtactgtgtgggcctgctctctccttaggtctctctgcagcgaggggcccagatggttttctgggtatgggatccaggttctggagcctgtgtgtgaccttgggaggtgtatgcctgtttgcaggagcaggagagtaaggcagggcttagaacagaaaaagcagtgccagggctgctagaaggcagaggactggatgcattgacccctgagggtcttcgccaggctggagtgactactctgggaggtatacatgttggggccacagccacaggtgtggagagccagagccccagccttcttgggggactcagagggatttatagaggcagtggacattcctttactccccacccacaggggcctaataggggtataatggggacaactccggctgcctcccccatccttaggatacctccacctgctggcagatgcctcctaaaagtaccgagcttagagcttcatttctttggcttgtaaatccatctgttaacatccaaaccttccttccccatttctgtaatttccaccttctcagccccttttctgcatgtggattttatatggaaagagagggaaagaactgttgggccctgaaggccaagtgggatgaagagagaagatgccatgaatgtgatggggaggtggggaccgggaggcagggccaccagaaaacaaactctattaccttctcaattttgcctgatctgaatttaacagagaaagagacagacacagagagggagtttggtgatatccacagttgtttctagatttaggaatgcctaaatggcttcatttttgtttttgttttggaatatttgtttgttttagacaggctcttgctctgtcacgaaggctggagtgcggtggagtgatcatggctcactgcagccttgaccttccgggcccaagcaatcctcccacctcagtctcccaagcagctgggaccacaggcatatgccaccacacctgcctaattttttttcttttggtagagacagggtctccctatgttgcccagtctggtctcaaactcctgggctcaagtcctcctgcctcagcctcctgaagtgctgggattatagccactgtgcacagccttgttttggaatatttgtaatgggaagggggtgatggttgttgaaaagtaattaccatcctgcctttgaattccctagatctctttacctctctagtggcctatcataccctttatccattcatttaacaaatattaggccaggcacggtggctcacgcctgtaatcccagcactttgggatgctgaggtgggtggatcacctgaggtcaggagttcgagaccagcctgaccaacatggagaaaccccatctctactaaaaatacaaaaactagccagtgtggtggtgcatgcctgtaatcccagctacttaggagactgaggcaggagaattgcttgaacttgtgaggcagaggttggggtgagccaagatcatgccactgcactccagcctggacaacaagagcaaaactccatctcaaaaaaaagaaatttattgcatgctaccatgggccaacctgtgtgtattacactgttagtatgatgttccactctcaatcagaaggaacacaatgtggagaccaagggcatgagctttggtagtcaggtagtactgggttcaaatcctagtttatcatggttttagttattcattaggttgtaacagaccaccccagaatttctggatttaaaacaacagcgatttattattccttcatggtctgtgggtcagctgtgactgtgtctgtggctgtgggccctgctggtctcacgtagactctcacacagctgcattatgttgagagcctaacaggagagggacatcaaaatagcctctcattcttcagggtcttaatacacatggcatctaatcatttgctagtctagcccaagtttcttatgtggcagctggatcccaagagggagtattccaagaggacaagtcctaagttactgctgatggagcctctgcctgcatcaggcttgcaaatgtccagttggccaaagcaagtcacatggccaatccctgagtcagtgtgggaggagagcacataaggacaggaatactgggaggcatgtctcattgggaaccaccaaagcaacagtccattacaggccttccttgggcaagtgatttggacactgagcctcagtttcctcatcctagtatggaagcagtaccacctacttggcagcattgttgtgaggaccaagtgaatagcatgatgtctgaccagaatcattagtagataagtattcactgttttgattgttaaactacaggcaccctaatggcacaactctcattcatttatgtgtacccagtgcctaacatgggccttgtgctggacatcgtttgctgggtggataaaatggaatgaagcagacaagccctaagcctaagagctcagctagagcaaagctgcagcattgagaagacacagcaagctcttacctcccagtaggtgaccagcagaaccaggaagccacctgttattcaaggtgattcttggatttacttaattgtaaccagttcatccagttccatgataacaagtg

SEQ ID NO: 327 - DNA, 2458 bp, Homo sapiens
ctccacgcctggggagcgcgcgcgcacgcagcggcgcgagcctggcggcggcggcgacaacaacaacgtcacagctcgagctttccttttcgggagtccccggcacacatcctgtgtccatgtttgggcatttacgtcacggcggcagggccggggcctcccaaaatggcagtggcccggggagtcggaagcccggagccagcgccgccgcagctatataagtgggggggctgtgggctgggggagcccggcagcgctttggagaggcgaggagccgccgcccgaggccggtgcgggcgagcgagggcgccgcggctccccgactcctttcccagaggtgagtgcccgaagccaggagcccgggcgcctaggtctgtgcgctgcggggaacccctaccgccagcctccccgccacccgcgcgcccccaagcccagcgggcgaggccccgggcgccccacagccggcgccgcgccatgctccaccttagcgagttttccgaacccgacgcgctcctcgtcaagtccactgaaggctgttgcgccgaacccagcgctgaattgccccggctgcctgccagggacgctcccgcggccaccggctaccctggagcaggcgacttcttgagctgggctttgaacagctgcggcgcaagtggggacttagccgactcctgcttcctggaggggcctgcgcccacaccccctcccggcctcagctacagcggtagcttcttcattcaggcagtgcccgaacacccgcacgacccggaggcactcttcaacctcatgtcgggcatcttaggcctggcacccttccccggtccagaggcagcagcgtccagatccccgctggatgccccttttcctgcggggtccgatgccttgctgccgggtccgccggacctttactccccggatctgggcgctgcccctttcccagaggcgttctgggaggcctcgccttgcgcgggtgccccctcgcagtgcctgtatgagcctcagctctccccgcccgacgtcaagcccggcctccgggcgcctcccgcctcgccagcgctggacgctgtctctgccttcaagggtccctacgcgccctgggagctgctttctgtgggggccccagggaactgtgggtcacagggagactaccaggccgccccggaggctcgttttcccgtaatagggaccaagattgaggacttgctgtccatcagctgccctgcggaactgccggccgtcccagccaacagactctatcccagcggggcctatgacgctttcccgctggccccgggtgacttaggggagggggctgagggcctccctgggctcctgacccctcctagtggggagggagggagtagcggcgacggcggagagtttctggccagtacgcagcctcagctttccccgctgggccttcgcagcgccgccgcggcggacttccctaaacctctggtggcggacatccctggaagcagtggcgtggctgcaccacccgtgccgccgccgccgcccacccctttcccccaggccaaggcgcgacgcaaggggcgccgcggcggcaaatgcagcacgcgctgcttctgcccgcggccgcacgccaaggccttcgcttgcccggtggagagttgtgtgcggagctttgcgcgctccgacgagctcaatcgccacctgcgcatccacacgggccacaaacccttccagtgccgcatctgcctccgcaacttcagccgcagcgaccacctcaccacgcacgtgcgcacccacaccggcgagaagccttttgcttgcgacgtgtgcggccgccgcttcgcgcgcagcgatgagaagaaacggcacagcaaggtgcacctcaagcagaaggcgcgcgccgaggagcggctcaagggcctcggcttttactcgctgggcctctccttcgcttctctctgagcaagagatgggtttatgggttggggcgccgccgttcggcgcgcacgagttccgggccgttcccctccccgctcttcttccaactcctcctcgcacgcccgagggccggcctccggtcccgcttccagtttccttgaagcgcccgccgcacacgccctattcagcaccagctccgcggacagttcccgcggtccaggcgctgtcacccttgtcagccgcgctttgggggaagtcttctgagaccacccagtgaataggcactaccctgggattcaagacagtcttttgtaactggcacacgccccacgccttcctctataacccccagagacaggctggggcagcgccaaggcggtctcgcgcgggactttgtacagcagtgtcttatccagcagccattggatgtaacgttttgctttgggttttttttccttttgttgttgttaatttttgtaaagcagacgctactctcaagcagttgacaaaactgtttatttttgcaattaaaattattgtgctaaaa

SEQ ID NO: 328 - protein, 577 aa, Homo sapiens
MAVRVGSPEPAPPQLYKWGGCGLGEPGSALERRGAARRCGRARAPRLPDSFPRGECPKPGARAPRSVRCGEPLPPDPPARPQAQRARPRAPHSRRRAMLHLSEFSEPDALLVKSTEGCCAEPSAELPRLPARDAPAATGYPGAGDFLSWALNSCGASGDLADSCFLEGPAPTPPPGLSYSGSFFIQAVPEHPHDPEALFNLMSGILGLAPFPGPEAAASRSPLDAPFPAGSDALLPGPPDKPDLGAAPFPEAFWEDCAGAPSQCLYEPQLSPPDVKPGLRAPPDALDAVSAFKGPYAPWELLSVGAPGNCGSQGDYQAAPEARFPVIGTKIEDLLSISCPAELPAVPANRLYPSGAYDAFPLAPGDLGEGAEGLPGLLTPPSGEGGSSGDGGEFLASTQPQLSPLGLRSAAAADFPKPLVADIPGSSGVAAPPVPPPPPTPFPQAKARRKGRRGGKCSTRCFCPRPHAKAFACPVESCVRSFARSDELNRHLRIHTGHKPFQCRICLRNFSRSDHLTTHVRTHTGEKPFACDVCGRRFARSDEKKRHSKVHLKQKARAEERLKGLGFYSLGLSFASL

SEQ ID NO: 329 - DNA, 43297 bp, Mus musculus
  misc_feature (1)...(43297): n = A, C, G or T/U
gcactaaacagagtcagtgtatttcactttaaaacctcagtaggagcaaccctactgtttcctagcaaatcagtatgactgtgttgatacctaaatcttaattgccagattgaagagatggctcagcagtaaagaacatttactgctcctacagaggacctgggtttagttctcagaacccatgtgatgtggcagctcacaagtctctgtaaggccagtttcagtctgacagcctcttctagcctccccgagaagcaggcacccatgcggtacacatataggcaggcaaaacactcatacacataaagtaaaactaaaccttgatgtaaatacatttaactcgtggcaggccacaggtgtcttccacatggctatgatctgcttgttattttctgctttctacccagtgagtaaccagggacacagaagctctgcactaactcgccccttcctaactctgttaaattgacagaaacttatgcaaagctatttcatggttataaggacccaatgaaagcaattacatcacaactatgtgtttctaaatagtatacagaaatagttttactaaaggctcaggtgtcccaaaacataggcatttattatcatttggtcatcaaaaaccaccatcttagttcatgcagagcttctgtaaaaaagagcactgtatataataagtgaggacttggatcagagtcaggaacctcactatacgtcaggaaaaacgagggaggctttgatttttgctgcacctcaatgtgtcattttggataaaatgatctaaaacccacctagctgggttatttagagaagcaaaagaaaaaaataattatttaaaattacacattaaaagataaactctctattctgctatttagttcaatagaatattagcactaggcaaaaggaagcaaaaaaaaagcaaagaaaaatatgacttaaaacttttagagttcccaaataatattacatactttattgtctagaattttaccagctaaatttacctaataaatgttcaagagaaaaaaatcatgaaatgaagacattctttatacgacagaaagcaaaagaacttacttatctctaagagaatagtattatacatatatattaccagatttttcagaagctcacatcctaagccaccagctccaatgactagaactttacatgtatctaacaagaactggagtgactgtaacaaatagaaagacatattaaaatccaggtgatcaccacaagaaccatgaataaggcaacaaaccacacaatagttgttggtgtaggcacaaaagaggtcaattaacgataagaaacacacctggcatgttatgaaagagatgtaattacaaatattgaaatccttataatttcagagtttcaactttgacactttaaatttacttttactatatgaaattaagagcctgtttttaacaggaaaaccaccattaggatgagtcagcagataaggcacttgttgctcctgtagaggacccaggtttgattcccagcatacacatggtggctcacaaccatccacaccccaagctccagagaaaaggacaccctcttctgacctttgtgggcatttggcacgtgcggtatacatgcagacatgaaggcaaaacactcgtaaaataaaaataaattaaaaacttcttaaaaacgatccctagttatatcttttttcaagtgttggtatactattttataggtaatatagcaactttactatagtattctctattttcctcctcccattctttatgctttttctttgtgaaaatttaaaagtgtttgaaagtctaacaaaaactagataagagcaatcacatgttcctttctttgaacaatgagtgtttacaagacttgaaaaatcagcaagttccagatgagcagagataaaacctggacacactgccgaacagaagtgacagccctatgctactgtgcagaaacactatcaaagtacaagaaaataatatgcataactatattatccaaaggaagaattactactatgcattgtgctgaccactaaagaaggaaaacgatttattcgcacaagctactaaaccaaactcgagcgtttacacaactctatgagtagcgtttctctttcaaaacctcttcatgggcacaaaaggccataaaacacattacagtgattactttgtaataaaaaattctatctaatcaaatatttgcttcaagtcagacgcagttcaaaatatgtatctattctattgcaagcatatttttaacattcaattaattatagtcaatactaagtgaagatttcaactaaatttgaatacctgagtaagcgtatcttatagtcttattagaattgatttaccacttcagggctacaaacagggaaatatgtcttaggaatcattctaaactagaattttaaacataccagaatatgatgtcatcaacttatcctacacttgaaaatgtttaaacttatatgaaaaatataaaaatgcatttctaggcatttacataaaatcagttgtaaagatccaactcaattagattaatttcacaaaacaacttcattaattatctatattataatagcaagtttaataggaagcatcgtcttattttttaaatgtaagactattagagcagttgtttaaaaacaaatgtttctcacttcagtgcttggttcgaaatcggggtgtgtgaagggtccagaccgctcgaggaacttctttacatggttccagcgaccttcccagtctccagtgtccccacacccaccatcaacagccattctgcacagaacacagtaaattcagctgcaaagatcagtacgaaaaagccacgcccgaactattaggtctccccaaatggtaaccacacatcagacctgctcaaataaaaaggaaaactgagttgtggttctattttcccagttttggcttgtctggtatggggaagcactcttcacctacttgataaaataattctgcctctgtgttcctagcttcctcggcacccacagatcaaagtcgcaacactaaacactaagtgagaaaggacttccctctgtttggtatttacagtcactctgagtttccatcaaccgtttgttccttcagtagaagtaacaagtgcataggttgaggggggtctctgagaactatggtgcttcagtctaacactagttatggctcctcccaagttggaaagatgagagccactgaacactttggatgaaagcaatgatcatacatttctttcctcagaaggatcccagtatttttttttcctttaaaaactaaaaataaaaaacaaacaaacctctcctaatactaaggtccatttgttgtcacaaaacacacacacaagaaaaatgtttagattacaattatgccacagataggcatttatttaccatcaagaaatctttgagaacatgcaactaataaagtgggacttctctaaaaaacaaaacaaaacactcaaatgcactttataaccacagattcattcatgtttggttgtgataactttcctgtaaccccaaagtttctaccttcaaatatattagtgatttcaattgtttacaaaagggactaacatacattgcatagctgatgttctgatgcaatgctgggtctcacgccataaccaagcacactctagctttgagaagattccttaactgtcagaaacttcagctgtagactgcaactacttctgatggtcatgaggtaaagagatcatcaggtattgaacttaggggctgctcttggcagacagcaagcgctcaaactttgttatttcgtgctgagttgggaattaagcggtgagaaagggtgagcccttgcatttgaaattcacccatagggaggggcatggaaaagaccaaagtactactgagagctgacacagaaattatgaatcaccacacccaatacacgagtattttttcccccttcccacggagggcggggagaggaatcacgtaggattggccatatgaaaagaattttaaagtctgcggcatcaaaaaaaactaagtatttaatacaggttgtgtggtaaatgagagagcaagtgagttgccgtgtcctttaagacccaattaccttgcaaaaatgacaagttttaacacaattcctgattcacggagtgttcataaaaagtttatgtgtactattgtctcagtgttcatcaaggacccaaaacaggcctcgtgtccatttagatttagattggattcacttgccacaaggtcacagctctgacaatttgggttggaggaagaggggagtaccgggtggcttttgcaggagcatagccagggagcagccggccggtggctcgagctggggacggggtcaggggtgaggacgcgcggcctgctccaggtgaccccctcccagcaccctcgggcccgctgcggctggtcccctaggcnnnnnnnnnnnnnnnnnnnnnnnnnnnnnnnnnnnnnnnnnnnnnnnnnnnnnnnnnnnnnnnnnnnnnnnnnnnnnnnnnnnnnnnnnnnnnnnnnnnnnnnnnnnnnnnnnnnnnnnnnnnnnnnnnnnccagcagcactaacttctcagccagcagctcctctattctccttcttttcttctccctaaaagaaagagagaataaaagaagggtcagcatcaagctccaaagagggcgccgcaagggtatggggggcgaggggacggggaaggggttgggggacccccggctggcagcggtgactgcccaccgccgcgctctctcacaacccagcccaactcggcgctccggcaaaatcccgatacttacggctcctcgccatccgccatattgttccccgcctcttcccagaggccctcgcgccgagcgggtccgcccgggaggggcgggactgcaggtgaatggaaggagggagagccgagccagggaggaggggaggagcttcaggtaagaaagtgagggggcgcggcggggcggggcttcaaacggagaggcggagctggggtttgggttccgaggctttaggagggaaaaactgagcaggcgcggaggggcggggtccagtgctttgagactgggctattagaaggaggagcgaaggcggagccagtactagaggcgcggcttcaggggacgagagggaggggcgggagcgtctgggaaagctagttgaacagcgggaagcagtggctaaataggctgcttaggtccccttaggctttgcaagcatttcccagtgtatttaaaatctttgattaattgtgcctacttaatattataccatctataatgttgctatgccacatgaacttagatatgttacttatttatacacttatacgttgacacataattgcataaaatgttcatatattctatttaaaaactaaaatagccaccccaatatgccagtgcttttctccgggaaaattggtgaaagaaatttccgttttccatatatcaggaagattcaaaacccttgcttttatgggcatgaagtttaaagcattaaatagacatagggtgaagagtcttattttctttgtgacacttcagtgtcacaccagtctgtcagaaaactaatctgttatacatatatacatcaagatatatattagataaataaatgaatgatagataagatagatgattaggtatgaaaagtatagagatttatttataacctgtcacttgaaagtgttaataaatgaatgaatttttgactctattcttcacagtcatatattgtatgtaaatgactgattctggtagacaagaaaggaaagaataattgtgttaaacatatcacttttagtaaagtgagataaaaaaatttaatatgtaagtctgaactgaatttaaacccttactactcagctattaactgtgagcccttgggtatttccagatcctcatttgtaaaatgagaataacaacattcacgattttaagattgaaaattaagtgaatttttaagtggctctcaaatatggtttttgattggaattacttgaaggttacaaatgccaggtttgagttttatcacaagaggtggtttgtggacacactgtttgaaaaccagtgaagtgccctgatatagcttctagggtgctcattaaagggggacggggggggctgctactactcacttgaggcatgcaatctactttgtcctgctctcattgaaccttaaggaaggctcatctgttacgatcccccagctactttcatcaatagcacacattgagctaaaaattcagtcataaccagacagtgagaagaggaaactgagccttagaaatagaacaaaaatagcagaagaaggagaagaagaagaagaagaagaagaagaagaagaagaagaagaagaggaagaaagcctgcagggaacccaggtttaattcccagcacccacacagtggccttcaactcgctggcacccagcacacaagtggtgcaaatgtacatgcagacaacacacccaaaagaagttcacaaagatgtcagtcctgcatctgtgtgtcaccatgactcaccactttgacagctgacagcagacatcgtgagatctgcctaactgattagaaagagccacctccttttgttaataatgacagtagtagtggcaagtggccgaaatcctcagtagatttattttctttacagtgaagcacatcatcaagtattagacatcaagtattagacagacatcctccatagtctatggccaggccgaggagttatcaggatggtgcttgctaaagcttaagttcctgtggaaaagcctcaagagactgatttaaaaaaaaaaaagtttatttattttgtgtgtgtgtgtgtgtgtgtgtgtgtgttcccacagaagccagaaaaaaaaaagtgtcagtcctcttggagctggagttacaggtagttctgagccatgtgatgtgggtgctgggaattgacctctggtcctctggaagagcagcaagcactctgagccactgagccatctggtgtgagagactgatgcagtgaacatctttactcctactccccctcccccacctaaaaatagtgacatagctactagtaatagctcttaaacggagcctggggtaaagttgactcaatctgtgctcattcccatttaaaatagttggaggaaaaggtagaggaatgtagagggaaaaaaaaaaaaaaaacaacaacaaataaaactgatcaaacagaaacctaccatagtccaaccagagacagagcacactcaccattttcagagagagggaaggggctcaacctatgaagagaaaacaaaacaaaacaatgacaaacacagtcctctttggattcttctccctttttatttgtagtaatgagggatgaacctacagctcggtgcatactagaaaaaaacctaccctggagctatatccatacccattttctttttgttttgaaacagagtctcactaagttatccaaacagttctgaatttgcaatcctcctgcctctatctgccaaggagctgggggatagaaacttgcttgcaccgctgtgttgcgctgtctttggaggtttaatcaaataaataaaaatatatagccagctaatgtgtgttgagtatggattgcctgtgatggaggaataagcacgctactatttcattctgacagcctttattcctgcagttctgagaagttggaaggagaaagttcactgaagttgtcaatgctcacagatttctctaacaggcgctgggctctgtgttctctccccaccaaggcttatttacccacactgatgccttaagcttcgggaattcctccacgccctctgatttcctgtaactgaatagaggcctggcaaggctctatttagcactcacctcaaggtctcagagttgagtatttcctgcactgtaggcccttagaagacagagcaaggcaagcatttcccctttgtgactccccactgtgccttaccagcattaggaaggccttagaatacctgctagcagggtactaagcagtctcaacatttttctcccattttatctattcagaggcaaccacaatgatcaatgacaacaggacctgagatcaacagcagcaggtgtttattttaaaagtatagaaaacaggttaaaacactgtaaacatcaaccagaaaaattaaggactctgctagctatttggtttgtttgtttgtttgtttgtttgtttgtttttgtaataatggggtctgcacacaggaccaatgctgctccatgctaggcaagtttgatcactgaactctatttctagcactcttctcgctttttatgttgagccacaatcttaccaacttgctccggctggccttgaactcactttgtaatccctacaagccctgaacttaaaattctcctgtcttggtctccggaataggtctgcctcaccatgccagtttgtattattactgataacagtaaaatctgtaaatgctgcatatactaaacacttcccaaacatccctcatttagcctctgtggcagattttctactaaccccggtttacctaagaatcaaggaaggctgggggaagttaagacattcctccactggcctggagagatgactcagaggttaagagcatttgctgtcctttcagaggacccagattcaagtcccagttcccacgtggcagcttagaatcatctgtaactccagttccaagagctctggcaccctcttctgacctcagcaggcacaaagcatgcgggtacagcacatacacaatgcaggcaagacattcattcacaataaattagttttgttttgattttttaggaactacttttctccaaagtaaattgctggagtccattgccaggctatcctaaacaccagtggcagaagacattttcataaagcccccaatgatttcctcaactgcctttctaatcagctaaacaactaagtctgacttcgcctcaagtatattttactactctttgttttagggtaagttggtggtcttagtagagcactttgagtttggttaaaaattaacagttgcaaatttagaaacactgttaccttaggcactgccatcttagaagcctaggagtcagggggatcctggacaccacaagaaaacaacccacagcatcaactaagcagggctcataggcgctcacagaaactgaagcggctagcacagggcctacgtgtgtctgtgctaggttctctgtgtatgtgttatggttgtgtagcttggtggtcttgtagaagttgttttcttaggtaaatgttatttgtttaatattggaataaaactaagaaacctttctggcctgggaagccatgtttctgcccaggaacacagagcacctccagcagctgtctgctttgaagctgctaagagctcgctcaggaagaagtgaagtcatccgcttctatctatcttctatctataacgatggcacaacggttcagtaattttgccacaggacagcagaaatgaagggcgaagaaaaaggcgagctggcaatcactttatttcagttcacttcagtcaaacccttgctcccatttttttttttctagtgtgatttcacacaaagtgactcatgaaaattgcacgcatatgtggggagattagcaataccggacttcagtgacactgaggccggcttccattccattccacttatattgacagctgaacagctgcttttttttttttttttttttttttttttttttttttctcccttcagggcaaagaacacacacaagcgatgtgtttaaaaagagatggtttgtatttaaactgccagagagaactgacaccacctttagtttaggtaggggatttccgctagttactttttgtcctaacattggataaagcccactgctctgagtcactaaccacttccagccaatcacagacagaccaacacacccgcccgcagccaattttctgagccctgccgtgctttaaccgcagaaccaatccgaaggacccgctgtcatctttcatccagctggttgtcgctgccgccgcctccagattccgaaggcgaagctcgcgaagcagaggaacatggacgtgaacctcgccccgctccgtgcctgggacgatttcttcccgggctctgatcgtttcgcccggccggacttcagggacatttccaaatggaacaaccgtgtagtgagcaatctgctctattaccagaccaactacctggtggtggctgccatgatgatttcggttgttgggtaagtggggtcttctgcctggagcacctgtccagggtcaggacgtagggaccacgaggacaagatcgcgaaatgcaagactaggtccacacggagcgcctgcctcagggaagggtctcgggaagtggcccacccagtggaaacttgttctcagggcgaggccacagctctctgaggtcccctttctttctctttttgctctagaggcttgagcagggaccctgggagggaagaggtgaggaaaacgctgagaacttgggacaatgagaactaccccctcccacgtccccgtgctgaagatattcgcctgtcagatgtttgtagcacagtgggtgttttaaaaataagaaaaaatgtggtggtgttgtaaccttgtcctggggctgcctagcaaagcctggagtgacagggtgtggacccagggctgtgtttaagtggcctctccggctaatgtctatctatactgtacatagaactgagcttccgctcaggcggatgcgagtctcctggtggcgcatcttcccctgtgaggtgactctggaaacgaggccccctgacattttttttcccctagaagttgccggacacggtcgctttagctttgctccttagcctggggtcttaaacatctctgaaggccttttcgatgctggttaagaagttccctgtgctaagtaaggttataggtgaacattctggcgcacatacacgtacacatttccgcacctgtttcctgagaagctgtttttccttgtaggttaccctttaaaaatgcttcttccaccttttaacaaaataaatggttatattcgccattttattatctcttatacgaatttaaatagaaggttttacaaaacaccctcttgccctaaaagaagtccttttctaaggtttctctttccgaacaaacccaaagagaaagagaagctgctagggagaaaaacaaaaaacaatcccaaaaaggagagagaagagatgcacactcggggctcttaggaaggggtgcgtgataaggcgctgtcttaagttggcctgaggttagctggcttatttacttagctacctctgggcaccagatcccacgccaagctctgagcgcaccaagatgaatcagacttgaattctggcccagggacacatggcatttgctgagcctcaaaaggagcaaactcacagcacggaggagactggcaagcttcctcatttccaggcgtggttcggagtggtcaccggttctcaaatgtgggctccatgtgagatcttagctgtgtgtggctgaaggaactgccaactctggggatggcgtagtgtgcagaggacacaggctctagcggactctgactaaacgggcagctgagcaaccattagtcaggggaagaaagccagaggcagttgttcctgaacctgcccccaaaactctgcttcttcccagaggacagacttcacaaagtcgcttctttaaaataaaataactagctgggcactgctggtgcacgccttcgatctcagcatttgggaggcagaggcagtcgaatctctgtgagttcaaggccagcttggtctccagagcaagtatgagtatagttggggatacacagagaaaccctatcttgaaaatccaacaaaacaaaaccaaagaactctaataatgggtttacatctcttgtaaactttcatattcttttcttcctctttggtggttacctagttatggggtggattatcttctcttaaatagaaaggtttgacacagaccaatcaaatatacaaggaaaaaataaataaaatccccctcccctcacactcaaagcattatatgtccagactccagcacagccctggtcaccttgtggccttcatagaacccatttttcacagtcagctcttaactaaatatagctctctcattatgatcttaggccactgaacctggcagtctggagtcttcacctttctcatttctatgtcacatagaactattaattgttagctacgtctttgaagataaagagaaaagtacctgttgttatatatctgcaaagagcaggcaaggcatagtagcttatgcttataaacccagcactccagaggccgaggcaggaggattgcatgagttccagaccaaccagaaacataaaaatttctttataccccagaataatttgagcctgtaaccttaatttgtttctttttctatacatttctaagcactttctagctttccccacaaattcttcttttctttctttataactaattataataaacttttatagagggctctgtgtgctaagtactttgctaagtactgtgtgctgagtattttactgcattgtgccatgcagttccaccactaaactatgactatcttcattattgaacctgacactcagagaagttgaatgacatacttacagccacagacccaggcttgtccctttaactactgtggcatcttcctgagagtcaggaggtttagaattatagtgcctgaaaggtggaagaaatccaatacctttgggatcagagaagcgtagctgattctggaacattccccattctaaacagaactctcctctttggatgctgcaaaggatgggtgggtctgggcacttctgggaactgcttatctggatcctctgctggtgggtaatagtctctcatgaggaaatggtcagtgagtccatccctgtggccaggcagccccttggggacactggatggctcttaaggtcctctattgttttggattggcttggctgaggatagacagggctggtttgttttgtttttttgttttttttcagatctcagcatggtggaggggtgttcaggagtacatgatgtagctccagaagcagtaggaaacactagacagagatggagattagaaggggttaaaatagaggtagatgtgcattttggatcctgaccaggaagggcatgggggctagaagttaagtcttcaagcaaggcatggcagtgcatgtttattatcccagcaatacagaggtcaaggcaagagggtagagagtttaatggcagcctgagtttcatagtgagttttgtgctgtgtatcaagacttcatctcaaaaagaagaggaagtttggtctttgtcctaaaaaccgtggctttattcagtacttgacttccatgtacactgtgcatctcagattctgtgaactccttctcttcctcccccttctcttcttcctcctcctcctcttcttcctccttctcctttttctcctcctacttctcactcccctcctctttttcctcttcttcttttcttcttctacttcctcttcctcctctctttccccaccctcctcctctcacactctacttctcctcccaccatggttttgttttgttttgttttgttttgttttgttttgttttgttttaaagacagggtctcactcttggctggcttggaactcaaggttctccagctaccgtctcctaagggctatgattacaggtgtgcatcccttagcctcctagcccctcttgcagacagtttttattttcatctgtctctttaagtagtatgaattattagttatgagccagattaagtgtgttggactcccagatgccaggcacgagctgtgtgagcacactgcctcatcttcacagcagcacccacctcacaggcctgcctgaagactagccagcatcccataggtagtgcttttacaagagcctcctcatttctgctgcataaaatgttacttatctcttatcactgttagtgttgccaacaagacaactcagaaacacagctgctttagaccagtgacctctacccccagaatccagcctgggtctgttttcccacttctgcaagactcagcttcggtctcacctcatggcaaacacactgtccccatgtctctccttgccagtgttagttggaccccacatctgtacttgtcgctttcctgttaccccaaagtcttttgtgtatacctatatacaagaaaagaaagatgtctaagatgagagaccagaaactatcttcctatccatgacaagagccatccatgcattaagatattatatttacatcacacatgtcaacagaagttatcttaatcattgttctattgctgtgaggaggcaccatgaccacagcaactcttataaaagaaagttttgtatttaattggggcttgcttatagcttcagagatttagtcctttatcattgtggcagggagtacgttggcacactgcgctggatcagtagctgagaggtacatcctgatccacaggccaatgaggggtggggcagagacagaggttgagcctggcaggggcttttgacacctcaatgcccacccccagtgacacttccccaactaagtcccacctcctaatccttctaatcctttcaaaggtgtccgctccctaactgaacatcacaatacatgagactaggggaacctctgacattcaaaccaccacctcaggctttgctgttgtttttgtttctattttgttctgttttcccaaagtaaaaagaacacaggcagcgattaattacacttgaagtactaagtactaagtactaagcctgctctccactctagctgtgggtgaggatgtctgtgggcttgatggaatgcctacagatatgaactggaaaaatctattcaaggagcaatagcggttcacacttgggagttgatcagaaatgaagactccctggctcatggctgacctcttggctttatattttagcaagggtcttggaggattcgtccttacattaaaatttggtctactctgactcaagagaaacactgacagtgaactaatagcataattaaatggcacagtgacatacggcattgtcgcttttgcagattctgattgtgttgttttgttgctaggtcaggaatcggttgcctttcccccttctgactctccaagcgactgttatatgtatcccccaagtctaaatgagagctaggaatcctgctgagtacccacacttttggaaacatgaaggtttgaggtcatgcagccaattggaacccaaactgcttatggtagccgacgtgattgctagcaggtgaaataacttttcaatcaaaccacatgacaaatttgctaaagttcctgcttaatcagattaaactatgtgacaatgacatcattttactgttatgctaacttatcttactccttcctgatatgaaagctcatgttttgtattttctggtgtggcctcagagtcactaaccacccactgtatttgcaacttgtaaatgcttctccttgcctacaaggcacaggcacacattttgccctcccccctaacacagagtcctgttgctgctgggtgaatgagcccaggttttcttggcaggaatcactctgtgtcctgatcatttggcccctaaaagtgttaaaaaaaaaagggtgggatcaacagctgctactttatgcttctggcttgccaagacggtaagacatttctagaaggctagtaattatagatgtgaaaaaaaaaaaagaagtattacggtaattctcttcgaagaagtatggttctgtgtatgcccaaggcatatggctgtcagtatctggtattgagaatgcttacagtgtgcttttaaatgctacaaggagaaagagctggttgccagttggtgagggaagaaagagctaagaaagtcctgggtgccctgcatggggatatatttaaacatttgtgggaagaaaagactcgacatctgtgtcctcccctgctagcctctaaatagcccttgaggttgttcccttgtagctactgtcctttgccctggctttgatcaggtaaaccagatcatcttaggggtttgttgtttgttggttggtttttatatactaaaaggtagactgtaagacaaacgattcttggaatttttttcgtagaccgtctattgccattcatagatggtaagtgaaccctccacaagcccagacctgtttcacccagtgcccgtccactgaccctgtttgtaagtttatgctggtagctttgttccgcttacagatttgtcattttttttaactctttatattctaccagtgtaatgaatgataagaatgatggaaactactaacaattattttcatggttgtttgcaaatcgaataaatggccgtctgtttatgctttaagattagtgagtgccagtggtttctcagtggattcttgcttggctcgcttccttcattcactcaatgggagtgggaagcaccaccagcctttcagatgctgttgggaggaggtggaaaagagtgcattgtgattcctttatcgagattaaggtccagaggggtagtaagaccatgctgaaaaaggtccgaagtaattttatacacaccaaccaagcctacaaaaatgcataactatagccagatggtggtgatacacgcctttaattccagcactcaggagacaaaggcaggcagatctctgagttcaaggccaggcttgtgtacagggcaggacagccaggggtacacggagaaacaaacaaaggaaggaaggaaggaaggaaggaaggaaggaaggaagaaggaaaggaaagaaaaaatagacaactacatagttacaggtcttaattacacttagaaaagtctccagtgttagaaataggggaaacactgttatatggacaggtaagagggttattacatttttataatataatataatataatatttcaatcgcaattgacagtacttttcagttgaacaaatattaaacagggtgcttagctggagtcctgaggataaacaccccacctgcccaatcctcccagttttcatctccatctgccccatcctgcttctttaaatagacttcattcagggaagacacggtgtaggtggatgtcttcctctggtggatctggagggttttttggtttttttgtttttttttttttttttggtttgttttgttttttgtttgtttttttttactgcagatctttaagagatctgtcaacattcagatatttaatctaaagatctttaatctgagctgaggatgtggctcagagggagaacaagctttgcatacacaaggccctgtgttctatcccttgtaggcaaaataaaatatccttggtgtcatatatgtctcttgttcttcctggcttctctctgtcaccatctcttttttgttaaaagaattagtttcccaccctgcctcagtcaactaattggcatttctgtttcctttcactaggaaaagatttacaatgtttctaggtaaaatgaaataaatgtatatagtctggattgttctctctcttctcttcccctccctccctccctctctctctccctcccccctcccttcctcccttcctcctttcttccgttcttccttctttccctgcatgtatatctgtgtgagggtgccagaccccttgaactggagttacagacagtcatgagctgacacatgggtgctgagaactaaacctggatccccctgagagaacagttagtgcttgctatctctccactggcctcccctcttagaagttggagttgtgaatcaatttagggctacagaactctggacaatgttgggattctatcattttatactatgttatattatatgatttttcctctggacctgtgaattttatcctttagcattcatctttagaagacttaccctcgacgtagcatctgttcagggaatgcttttgcagtgtccactgagcaataatacctgcagtttggctcccattcaacagctgtttactgtaaataggatttcaggggcttgccatgatataacacatggctcagccttcccttcccttcacaggcaggcagaaaggccatttaatatagaaaatggcctttttcattgctacttttgttgtccagattccagcccaccaatgtgattgtataggttgaaggttagtgtgaaataaataagacactccctttctttctttctttctttctttctttctttctttctttctttctttcttccttccttccttccttccttccttcctttcttttttcttttttcttttttcttttttcttttttctttttttttttttagtttttcaagacagggtttctttgtgtaacagcctggctatcctgggactcactctgtagcatcaggctggcctggaagtcacaaagaatctcctgcctctgccagacactctatggaagggaacttagtatcaccaatctcattcgcatgtatccaatccaacttccctcccttgccatgcaacagttattctcaggttttccttcacagacagtacactactaaaagcattcagaaggaccagtttgtcaataagcaagtgtcttctatcacttccaacaggtccctggctgtggcaaggagcgagagcctaggcagtgaggagcatttgagcgttattcttccattctccccaacattgtaggtgatgaaggaggcgccccattatagaaagtttaaaaggacttgctgcagtctaagtagagttctgaccctgtggggaggactagttatggttactaactcaggtcctactgattgcttatcagagataaacttaccagtgctgggtgtggagaagtgaagtgcttgctgtgggaacatgaggatctgagtttggactcctagcatcctcataaaaaagagcagcctggggatgctgagaccggatgatccctggggctcgctggctggccagtctagccaaattggtggtcagtgagatatctcatttcaaagaacaggatagagagagcaatggaggaagacacttgatgtcaacctttgacctccatgtacgcatacatgtgcacacaaatatgcatacacataaataataaatacactaataaataagcaggtagcttagtaaatgtcagacagaacaaaagcagttagcaaagtatgccttgctagaaatatgttgagacgtcagctgtatagacttttggaggtggggagagcgcttagttgggtggtgcaaagcatacaggataccgtgaattctgtgagccttgctaatgcaaccaggtagagaaaccccaaggttatgttgcttggaccctctgtaacaagagagacatgctcctttcccacctaaactttcctttgtcctttgaagtctcctttaccctggtgatccttaggcccaagaggtgatggtcccacgtactgaagactaatttgtgtctaaagctcctagttatactttacagtcagatagaggtcttccgagctggctggattgcacagtggtagtggcacttgcagagaatcctagtagcctaagtttgatatctgtgtgggacgagaaaacttactcctgaacgttgtcctctgacctctacatcaccactgtggtgagtatacacactaagtaaataaatgtaattttgaaagatgatgaaggaagaggaggaggagaaggaggaggaagaggaggaggaggaggtggagaaggagaaagagaagaagaaggaagaaggaagaaagaagaagcagaagaagcagaagaagcagaagaagcagaagaagcagaagaagcagaagaagaagaagcagaagaagaagaagaagaagaagaagaagaagaagaaagaagaaagaagaaagaagaaagaagaaagaagaaagaagaaagaagaaataaagaaatagtccttgtcaggacagaagccatgttgggaaagcaaaacagccactgaacccttagagtgactgtgagaaacagaaaggaccctcaaaggacaggtcagcagcacactgannnnnnnnnnnnnnnnnnnnnnnnnnnnnnnnnnnnnnnnnnnnnnnnnnnnnnnnnnnnnnnnnnnnnnnnnnnnnnnnnnnnnnnnnnnnnnnnnnnnnnnnnnnnnnnnnnnnnnnnnnnnnnnnnnnnnnnnnnnnnnnnnnnnnnnnnnnnnnnnnnnnnnnnnnnnnnnnnnnnnnnnnnnnnnnnnnnnnnnnnnnnnnnnnnnnnnnnnnnnnnnnnnnnnnnnnnnnnnnnnnnnnnnnnnnnnnnnnnnnnnnnnnnnnnnnnnnnnnnnnnnnnnnnnnnnnnnnnnnnnnnnnnnnnnnnnnnnnnnnnnnnnnnnnnnnnnnnnnnnnnnnnnnnnnnnnnnnnnnnnnnnnnnnnnnnnnnnnnnnnnnnnnnnnnnnnnnnnnnnnnnnnnnnnnnnnnnnnnnnnnnnnnnnnnnnnnnnnnnnnnnnnnnnnnnnnnnnnnnnnnnnnnnnnnnnnnnnnnnnnnnnnnnnnnnnnnnnnnnnnnnnnnnnnnnnnnnnnnnnnnnnnnnnnnnnnnnnnnnnnnnnnnnnnnnnnnnnnnnnnnnnnnnnnnnnnnnnnnnnnnnnnnnnnnnnnnnnnnncccgtcattgacacatttatcaaatgcactgcgctaagtgctagggccaaaaatgggacctttctgttccttatggagcatcctatgtaggaggagctagagatgtgttcagtactcacccacatagctgtgaagctgaagccggcactgtggttagggctgcgggaaagaggcatatggtatcagagaggctgagaaaaggctgctgaaatgagcctgaaagagggttggagtgaatcaggcagagaaaacagctcctgcacagacaggccagtgggagcccgggaaagcagcgtaaactctagaaaccccctgaagcctggcataagtgcagaatcaagacatggcatcaggaagctggcaggaacggctgctgcgtgtcaagtaccaaaagggccccttagtagatgtaatgtaagccaaacaccgaggttggtgagtagagagagcaggcacctcactctgcagccaagcttcctgtccgagggacccacctcaggtacaacagtgtatatagcgtagtctgggcaggccttgtagaatgtacagagtgctgtttttataaaggccacgagaagcaagcaagtgcctgggtgtgttcttaattggtgtgagcccctgcctgggtaaagaccacaggaaaacctcatcttctcagagaagcgccctgtgagtaaacaggccttctgctccccatccatgtgagtcaggctcctctggaaccacacatctgaaacagctgctgggttagaagtcagcgtgagactgtttctgcttcagaaacacttctgggccttaggagttctgctgggtgtgacagaatttatcaaaagttcttgcgctgctccgaaccgtctgctttctttaactgtactgacagccctgcagttggtggccttgggcacggttgctgacttccttggctcacttctttctgagctgagggactttccaagatgctcctagccctagaactcagtaattgggtgggattttcctctcttgcaagtggatatgaatctgtagatgtggccagctgcatcatgaggacagtacatcattggggtgtatttcaccacagagccaccttcattcagatctctctctctctctctctctctctctctctctccctccctctctctcccatctttcccttccccctccacatgcacacactgggggcaactgctctctctatccctcagcggcccctcagcctctgcctctttctactcagagagaaataagaaataatctaggggaatttccatggtggaggaacagagcagtttggaatgaaggggttaaatccctgtctgcattgaggtgcttacccacacagaatgggtggactgtgaagcccagccctaccgtgtctcctcccccacatctcccccatgactatgctttcttgcttttttgaacctcagttttgtctcgtactgcacagtgggattgttttcgctcaccgtttaagatggcttcagaaactcacggtggcattctgaatgtttttacaatcaagaacaaccccacctcaggaaaaggtttattatccaacagaatggggtaatttatacaaatatgttcatctcaagttgaaaacatatttcatatttttagtctgcataattaggtttgtgttccacaaagaacagaatctcaaatgtcctgcctagtctccatcttctatcgtcttcttctaagtactttccctttcccttttcctccccatttcttattattcatggataaccagtaagtaagcccacacccgcagggccccgtgaaagatgagtgtcttgtttacggaaaccactattccaaaagtgtgttttatcttgatgggtgtgactaaccacccaaccattggcatctcagaccataactgcttcccagattcttgccctcattggaaaatgcacttagtcttgtgtttggtgtgtgtgtgtgtctgtgtgttattgtgttacaagtgtaagtggctaccagatcatctctgtggtgctcatttggatgactttcagaaggaagctgctcgtactctgaatgtggaagaaactaatttctcctcccagtaactttgttcttccccccacccccacccccagcttgaagcttgatgctttctaattatagtttgtggctggccacattgcaagctaaaaccagttctataggagcccttgcttcttttcccttgagcctgagctacaggaacaggtgaacagcaaatgtggaattgcttgagtcagctctggattttccattgttcttcatcgagggctttatttagacactcggttcagatctctgctttacttgtccaaagtaaaaaatagaagaaaaaatactttatgtgacttttattatacaccttacaaattattcttttaatgagaattccagaacgactgtggtactttgctgcagactcactagctcttgtttggagttcagtttgtcagagtcttcttcagctccagacttccatcctcagctgtctctctccccaccatgcaccatgcttttgagacaaagcctctcactgagacctgggcttgccaaacagacgaggctagctagtcactgagtcccagggatccgcctagctctacctcccctgtgctgggattacaagagcacactttcccactggctgttctcggggtgctgaggaccaagcttattccctcaggcttgtgtagcaagcaccttcctccctggccctccattctagttctttctgttaattttgatctttgcttttctttacagcccagaaacacttgggtgggtcctaggttacaaggatggctgtgtgagaggatatctttattatttttaagtgtcaggtatttttaattatccaagtagcatatggtgattgaacaatataaaaataaatgctaggcttggtggcccatgcctgtaaacccagcacttggaaggctgaggcagaaggattgccatgaatttaaggacagatgggctgcagtgggagaccttttcacaaaagtacacatacaaaagaaggaaggaatgaaaaggagactctctctgtctctctctgtctctgtctctctctctctctctcggtgtgtgtgtgtgtgtgtgtactaggaatgacaattttttaatctgtggaaggtccctggcctctgacacaaggctgtctaagatttgttcagaaggatatactttttgcactgtctgattctgcctttctcagattaagtcttggagcatggcgcatgtgctcttaatcccacctcttggaaagtaaaggcaggagggtcaagagcttaagtcatcggtgagatccagctagcctgtgctacatgagcctccgtctccgacaacaaacaaaaatcaaagctgggattgtatcaggagacaaggtatgacccagatgaaaatacacagtaaaataataatgacacagagaggcttggaaccaggagggagtaagggcaagcaggcagaacaacctgtgatctgggtgttgagagcctggaggaggtcagatggtccaaactggcacacagagtgcagacagacagcaggaagccaaggttgaggtaaagatggaaaagcctcaaggtggcgtatgaactcaaaccccagtaatgcaatctgagagatacgaagagagcgctaagcctcggctgcgagctgagaagcagttgatcttatacgtctatattttcttctttatgtagttatcttattgttattagaaaataacatgccaattataagccagatcaggtggtgcagacctgtaatcccagctgccagggaagctgaggtaggaagacagagttcaagggtagcttgggcaagttgctgaggtgctgagacacacacccctaacccagaaaaataaaaccaacaaaacaaaacaaaacaaacaagataaaccaaaaccaccagtttgaggacacagcttcatgatagaacctttacctacgcatgcacaaagccctgggctcagtcccactagcacactcaaccacaaagccatgaagcacatgtcaactgggcacggtggcccacatctgtgttccaggacttgggaggtagaagcaggagaatcaggagataaggttgtccttatctgtgcattaagtctgagactatggtgggatacatgagaccctaccacaggagggagggagggagggaannnnnnnnnnnnnnnnnnnnnnnnnnnnnnnnnnnnnnnnnnnnnnnnnnnnnnagagagagagagagagagagagagagagagagaaagaagaaagggaggtagaaaggaaatgtaaatgatagacatttctgctttaaggttatgtcacaagcataatatgctaaatataatagagggaatgtattattattttttcacccactcaatatattgtcaatatcttctcttttgtttttttgttttttgtttcttgagacagggtttctctgtgtagccctggctgtcctgaaactcactttgtagaccaggctggcctcaaactcagaaatccacctgcctctgcctcccaagtgctgggattaaaggtgtgtgccaccaccgcccagctattatcaatatcttgtgctactaaattataagtcacatctagtagtgcctgtctgtatacttaagctttttaatcatatatacatatatgcacatatattactatagtacctgggatatatatatatatcccagtccagtaaagcattgttcacataggttattcctaacagtgtttcacacacacaccaccagtgtggatatatctcagtcttggcaagattgtttattacctttgtcttctcaagcttgcagggtctcagtgttgtctaggattttgagtgaaataggcaactgtgattgtcctggcggggatggcactggtgggaatggatgttctgaagacaaaaggaggaaggcacacagttcattagctacactgtggtacatcaacagagggcaaggcagtagagagagcccatctgcacacagccactctgagaggggctgctttcatgctggaaggggagtgaatttccatgccggcaggcaggcaggcaggcagtggctctcaatgtcacagtgtcctggagtaattgcagttggagcttgtcatggttagaggctgtaatggtcttgccctgagtcagaagtagctcagcatgatgattatcctaagctggcacctgtattttctagctggggcttgtgtttccccttttctgagaagataagagtccttagactcctgagactggctcagaacagcagttggtcccagaacagcattcctaagtgttagaggctgtagtgtgtttaaactacagtacactactctttccattgtctaattctctgcatgctcacgctcccccagcccttttctgctttaaagacaggctctcactatgcagtcctggctggcttggaactcaggctgtagaccaggctgtccacagagacacactgttgctcacagagatacacttgtctccacttcccgaatgccgagactaaagatctgcacccacacatccagagattctttgcttttgttaagtggagagctttagcttcttctaagcagttttacattcattccaaccacctggcagcaaggataagagactttcactccctactcaaatagctgatgtttcagtaggatcagagctaaaatgtaaaggaattttcatttggaaaaggtggtgcacatatgtaactatagtacctgggaggctgaggctggaggatggtgggtttcaaggccaacctgggtgttttagttgcttttctatagtgatgataaaacaccacgataaaggcaactgttgtgctcttttagctagttattgggtttttatgtctaccactcttccaacccttgttccaccctgactccttccgacttcaaacactaggtaggagagaaagaaagttagaggggaaagggggcatagacctcaacaggctacttcttgctgactaggagaattgggttccttgtggcaagtccgatctgtcatcagactatatctagcagtacaacaaaccagtaatagcaaatgcaacagcagatgcagcagcagcaacagcaggatgaacaggtgggagcagagggggcagcggggaggaacagcagggaggagcagcagccatgagcagcagccacaccaggccctcttggagctctcccatttataccttctccagagtccccagaattagactatctacaactggcaaagatcacacccctgctagtgcacaaggcaaatcataatcacctgctgggaagcagcctctcatcccacacccggcattaaacacaaacatattcatatagctgaatgtttaaagaaaccaaaattctcacttaaggaagtctataaatgaaactttaaaatgggcttgccatttcagaaggttaggagtccatggcagcaaagcaaaagggcacggcagcaggaacagctgcgagcccatatttggtttggcaagcagaaagcgggtgccctaagaatggctggagtcctttgaaatctcagagcccaccgcctactgacacacctcctccaacaaggccatacctccaaatccttcccaaattagttctgacaagcaggaaccaagtattcaaacataccaacctgtgggagtcattctcattcaaaccgcaatattgggctatgtagtgagaatctgtctccataaaaaggaggggaagccagacagtggtggcgcacgcctttagtcccaacacttgggaggcagaggcaggcggatttctgagtttgaggccagcctggtctacaaagtgagttccaggacagccagggatacatagagaaaccctgtctcgaaacgccaccccccccccaaaaaaaggaggggaagactacagtgctgggtccttgtcatgtacaaaacatttgtggtaaatttcttcttcctagtgtttcctgcattatccaaagtcagtgacagttgtcctccgatgaagacctttgtctcatggcccagtgaatttagaggctatatatttggatttctgagttgacaacctatgttgaagatggttggggccgctggaaagttcaatcaaggggctgttgtgtgtatgtgtcagaaagcataaaccaatgtttctgtggggcataaggattagatcacttactgcgatcagcagcttgctttgggctttcatgtcaaggaagcgatggcgggtagggatgactgggctccatggaagcgatggtgggtagggatgagtgggctccatggagagcctctgttcagcctcagggagaaggtattccagctgctgggttacaaaatggaaggtgggctcagagtgattgaattctcttgttccaatagaagcaggagttaccccatgttttgttttgtggtttttctataggattcaaagaaatactccaataagcactgtgtagtccaaacagaaatatgactgtagacaggatcttgttcataaaggccattgtatgatccccctaccctatacatatccatcgtggatagatgaattaattcattcattatttctactaaacatgaaacacttagtgctaaaaataaataaaaaaaagaacaaagcaactggtgtgcagtagtgcttaggatgtatgaaagttaaacacaatgcaactataagaacatgggctagccgggcatggtggcacaagcctttaatcccagcactcgggaggcagaggcaggcggatttctgagttcgaggccagcctggtctacaaagtgagttccaggacagccaaggctacacagagaaaccctgtctcgaaaaaacaaacaaacaaacaaacaaacaaacaaaacaaaaacaaaaaaaagaacatgggctcttcaaattgtggggctctcgtaagatatcctggcaagtcgggtgggcgccagactgctgtggtggtcttagttccactgtttcctctgttgttgttattgattaccccttcttccctcctcttcctcttttcacatttttcatatttttcacattttgttttgttgtagggggttgttgttaagatagagtcttgctatgtggctaaagctagctttgaactcatgatcctcctgcctcagcctcccaagtgctaggagtgtgtggcccgccatgcccagttgtaagtgtcaccgtttctaactactaaggctgtttctctatttagaatcaaccagttcttctacctcataggttgtgggctttaaagttccggtgttgatgaagtacttcgtgggttctcagtggttttcacccctcctcttcccttctctgcccatgctccacctgccgttgagccagtcattctccgctttcccaccccaggtttctgagccccttcaacatgatcctcggaggagtcattgtggtgctggtgttcatggggttcgtgtgggcagcgcacaataaagacatcctccgccggatgaagaagcagtacccaacggccttcgtgatggtggtcatgctagccagctacttcctcatatccatgttcgggggtgtcatggtctttgtgttcggcatcactcttcctttgctgtgtaagtaagcctgctttccttgtctcccttcattaaaataaatgtagatgaagttggccagtgagcactgcatagcccctcggtatatctaacagtgtcagcatcttctaagacagcacatgaaagcctggcagttgcttatttccatagatatgtgtgggcacttgcagtgtgccatgtggctcttcttacacagagataccactcaacaaaacaaatgcaaatcccagtcacgtggcaagaactggtacaacctgcatggtatcttcatggcagctcacagccatccacaactctagttgcaggggatctgataccttcttcttatctctgcaggcagcaggcattcgtgaggtatgcatgcatgtttacatacacacatacatacatacatacatacaggtaaaactctcatactcatagaaaggtaagtgtaaatgaaaaaaaaataggtggaccacgatataaacactaaatactatgattctggtaaactagatattttctaaacaccttattttctaagacctcaaacagtatgaagtaaaacaaagatctaattccaggtctcagcagcagagatctggctgaaatgttagtgtcctttctgacgagagaatgtccctttacatttgaaaatgtttcgtctaggcatgtgttaaaaagtaaataaaatcatttgcttatctgagatcttgtcagattgagcccaaaatatttacaaatgaatcccacactttattatgtacagtctatcaaccagtaagttcaagctttgggaaagtttcccgagattttccttgctgtactatgagttagtgccggaatgatcccatttaaatatactgcctgttaactacagtcccttctctgcctgagagcctgagccaggccagaggaatgaaagacaccgcagagtcgatttgtttctcttgccagatttacagaaaccagagcatcatcggtcgccctaagtaggctgtgttcacccatctctgagacaaggaaactaagatcagttactcccaaactctgatacacgaggaacatctgttcaagaaccgtttgaaaacatgtatctctaagccatatcctgattctgtgggtcaacagtggtaccccaagtgcctgacgcttagaaaatggcccgtatctttaaaggtcagcgtaggctacggacgtctagtctttctctggattgtacatagtgtaggatggaaatttgcttatagtaggctcttttgtttatgtatgtattatgtagtacatgtacgtgtgcatatgcatacatgcgattcccatgtgcgtaagggtgagcatgcaggcccagagtttacatcagttgtcctccaccagtgttctccactttattgatttaggcagtagtcacttggctactctgtctggcttgtcctgaggatctcctgtgtcttccttataagtgctggggttgcaggctggctgccatgcctacctggcttttaggttgatcctggagactccagcactcacacattatgcactgagtcattttcttgccctttatttttaatttttcaaaattgcatctatttatcatctacccacctatccatccatctatccatccgtccttcatccagccagacataatcttgcccaagaaactgtggaggtaagaggacaactccttctagcatgtgattcctgggaatcgaactcaggtcaacaggcttggaggcagcactttacccacagagccatctcatcaactccccagccctatttaaataggctctttgggtgctgtgtatgtacatggaacaaataactgttatagatcacatagagtgtcttaaaatacagattctctatcccattcccttaaggttccgagacaagaggtccacaaagaaggaccagggaacctatttcatagtaaacaaggccaggtcattcccagtgacgcctttagaaaacatgtttctttggaggcaccttaaaggtggggttttcctagattctggcatttaaggaacaaagtacagataaaccaagaatgcaaaaaaaaaaaaaaaaaaaaaaaagtccgtcctgggaaaccgtgggtaagtggattcatagtcagactggagtcacatcagtgagcaattgtgttgaatgtcgtgttgtttaaggaacatttgcaaggtagagatttcagtgggtgggataaaagaatgtggctgccagatcaacggtcttccaaatgagcactgtgttttcttccacacacacaacagtcagtgtgtggcttgggaagcagctttatataaaggctatgtaaccatctgaggataagcgaagcaagcagacctgacagctaaaagacacagtttactgtatgtgtggggggttgaagtggggattattgggctggtgagatggctcagtgcttaagagcacagaggacccaaggttggttctccacatccatgttaggtggctcagcaccacctagaacgccacctccaggagccacctccagggggacctgatgccattggccgctgcaggcatcagcgctcacgtgcataaacccacagacatagacatacccacccacgattcaaaaacagtagaaattgtatttatttgacattatttgatgctgtcacttctttcagtgatgttcatccacgcatccctgagacttcgcaacctcaagaacaagctggaaaataaaatggagggaatcggcctgaagaaaactccgatgggcattatcctggatgccttggaacagcaggaagataacatcaacaaatttgctgactacatcagcaaagcgagggagtaagcacagcccgcccagtgacggggccccgcagcaggaatccggttgcactttcccccttgttcagacccattttcagtctgtggtttttaaacagaaggtgcacgtcttaccacccacctctccaaggcatcatgcatgcacaggcccactgctaagatctccgatatgacccatagaaggcctcagaaactgcaaaaatacagacccactctcccgttgtgtctgaagtgtccggtgtgcttttgaaaaagagtgtggattagacggccacagtgccatcttatcgtagggaagaagtccctgtagagcctggaggcaatgtggaggacatgaagatcagttaaagtcgaggatgttgtgtgtcagcctgtttctaatgctgtctgacatcccctccaaaatcccctaagactctgatgtgtcgggtatgttagtttagcggtattatttttgttgttttaaaaccagaggctatcacttgggcacctgtttgatgtgcagtggaaactgggtcagccagttgtttatattttgtttacgaatatgaaggtagctgtttaggacaatgttttgttaaattttgtaaaatttttaaaagggttagtaatatgctttcaccagcaggtgtttcttgcaaactaaatgtcaacctcctggggtaggggtggggggtggggggatggttacaactctgtaacttctgttattcttgttaagaataaatacaatagaaccaaacttgagttctgtctatatggcacatttttcgttactacaacaataaaagggtgtccaagataatgatatttgaatggtttagattttttaaaagattttttattgcttttatttgtgtgtgtgtgagagagagagagagagagagagagagcgcgcatttagaaagaaagaaatgagcatgtattttattaattccttaggagatcagggagagcaaccacagttgagcttttgagcctgcaaagcttccctagagaaccaagccaaaggagtttaaacagctcctgtacctcaaagctgttgacagtacgcatggtggccatacacttacataaatagcactggagttaggatggcgtgagcctttgcattgcactacagttacccctttatggctcatatattaagaaatagatgacatgtgggtgtttgccagttgggtgatttcacaggtgaaatagaaaacacttaggttttcctaacattgaaaggataactggtggggccttttccaaagcccttctgtgtgtcctaaatagcccatgaccaccctggcagctctgatgtcttgtggtttagcctctcagtcgacatgaagccttatcttgagcccagagcttcagatagggtttagaatctgtagcattacccaagtaggaagaataaaattggaagcattttagtgagactttattcaatgtatatctgtgctaaatatcaaaaacttggcaatatcctggaaaaaaactgaaaaaaaacttaatacttctaccttgtattttgaaagctgtttaataaaacccattataggtgtttatttgaagctagaaaaacaactgaagtttggcagaatcttttaaacttgctatgggtttatatgcatttaaaccctgtgatggtttgtatgtgctcggcccagggagtggcacagttagaaagtgtggccttgttggaatagatgtgtcactgtgggcatgggctttaagaccctcacgctagctgcctgggagacaatattctgctatcagccttcagatgaagatgtagaactctcacctatcctgtaccacgcctgcctggatgctgccctgttcccactttgatgatgatgaactggtcctctgaacctgtaagccagcccccattaaaagccatccttataagagttgcctttgtcatggtgtctcttcactgcagtaaatccttaactaagacacccccacacacacactttttgttttggggttttggtctttgggtttttgtatttgtttttttggaggggggttcaagatgttttctctgtgtaacagctctggctgtcctgaaactcaccttgtagaccagggtgagtctacaagattcacctgcctctgctgtgggagtgctgggattaaaggcgagtgcccagcaccaaaccccatccattttaatgtcatatattctgacacaattgtcatgaatttgtaggaagcgatagcttgaaatttaaaaaggtattcagtgcaatttccaacagccagtaatcaagcccagaaagatgacttcttagtttcccttcctggtgctgtgataaaatactccgcctaatgaaagaggctacggtagaaaggaccaattgttaggcactgatttattgatctgtttagtgatttacttacattgctgcctggaacagaatgacctggagagacagttgaaacaagggagcattgtccataccaacctgctgactggcacttctgtaaaatcttgcttgtttgccctgtacatccttgtggtttcaaagctgtggttcacacccttcctaatgttgtgaccctttaatgtagttcctaaaatcagggttgctgtttcagagtctaaaacgagaatacaaactggacccaggactgaggcgtttcacaagatgtcctggcttcagtctaccagtgacatctcctctcttccactctcattggtgtcagggtgcttattccacaaagattcctgcaccatgaaagtaacttaagagagaaaaggtttatgctagcttacaggtcaaggaaggtacagtctatcaccgtgggaaagtaaacgcaataggagcctaaagttgctagacttactacacccacagtcagaggcaggaagtgatgagtgcatgctgtcgtccagctccactttcatctagggaatggtgccacccacagtgggcggatcttcccactttaatgtaatcaaggtaattctcagctggtatgctcagaggtctgtctcccaggtgatttcagattctgtcaagttgataatgaacaccatcaatcacagaaaataacaggaaaaaaaaacccatggtgtataaataccatattttttaaatttacatttatttattttgttcatgtgaaggtcagaatacaatgtatggtaatcacttctctcctactgtgtgcgttctggttgttagcccttggcagcaagcatgcttacctgttgagccatctcactgaccctaatactacctacctcttaaaacaaattaaaaccgtagataaacaaagagcacagtgggaactgctttctctctgtgtgtctcccttgaccttgatttgatttctggaatccatataacgggggaaggggaaagctgattccactgaggggtcctctgaccataacctatctatgacatgcatgtgcatgctcttacacacacagctaaaaataacacttttgaaggggataacaaagctattatctgatggctatttttttaaaaattgcttagctgaaaactacataaatgtgtccacttttgtattctctatctttaaaaccaaaaccaaaccaaaccagaaagtccagaattttttcataatttgttcttcctacgatgaactgtttctagtttgttccactagagcagcggttctcaatctgtgggtcttgacgcctttcacaggggtggcccaagaccatccaaaaacacaggtttaactttacaattcacagcagtagcaaaattacagttataaaatagcaataaaactaattttatagttggagtgttgtgccaggaagattttatgaaccccaaaagaccacgaaagagccgacttcaatgtaaagcagccctgaactctcattgagacaaggttttataggaaaatgggagcaagctgggggtgggggggcaggtttccatcctggtaagcatctaactgaatgcctatattaagccaacaggtgggtgctctgaagcaagaaggtatacagtcaggaagggtctgaaagtacgtctgaaacaatcagactaagctttgattaactgttgctaagaagaagctagggaggaactctggccaagggcaagccatggggtccttcctggtacttgggtttagctgcaggtcaagttctcaggctttctgtttttcttttaagatgagggtggttccaagatggagtaggtttgccctctggcggggaaggggggggggcgtgtcacaacttgaggaactgtgttaaagggtcacagcagcgttagaaaggctgagaaccactgcattagagagattctctcccagccctctttgcctgtgatacatcatctatgattattaaaaggaaagagaagggaggtgttgctttctttttcaggtaagaaaacagaaagtacaaaaaagaaaagaaaagaaaagaaaagaaaagacaagacaagacaagacagggtggtagtacaagcttttaatctgaaaacttaggaggcagagacagccagatccacgagatcaaggccagcctggtctacagagcaagttccaggacagctaaggctacacagagaaaccctgtctagaaaaacaaagcataacaaacaaaaagaccaaagaacccagaaagtcaccaaaacttgatttcccaattcctgtattttcattacttaaaaaaaaaaaagttcactatcttagagattttattacagtatcttaaattctgtgcatctcctaactataatgctaagaaccgcagaaacttggaaggagggaaggaaagggcttggagctgttgggaatgctaaaacagaagggataggacctgccatgtggttgggagattggacaggaccttcatagatggtggatgtcttggacttttctacggaaaagtcaaagaggacagctacactgcatgtgtaggaggatggacggatgttctgtcaggagcaacttaagactttcaagggaagagaatggattggctcaccagggcctggtgatagagtatcctgaagcagaggatgagggatttaatcctgtagacatgcctcctttagaagggttctaaagagactcaggtgtgtgtgtgtgtgtgtgtgtgtgtgtgtgtgtctgtgtctgtgtgtgtgtctgtgtgtgtgtgtgtctgtgtgtctgtgtgtgtaaaaactgccaattactgtattatttatcacccccacatttttatctaaaacaacatgctgtctgtcgctgtccctaagttcagaatcacagcagggtatttgtatgtatgaagggtttgcttttctcctgaatttttctggtcacactttgctttccccacagcctgttgcttgcacgctttgctcctcatagacacctgtagcagtagactacttcaagacatcagggagtcagcaaggagatgctgagcagagttcaggctgactaattgtcactggtagcttgcctggatttagaatcacctaggagactcacctgtgggtacatcttggggaactttccagagaggctgaactgaggagagaagatgaaccctgaatgtggatggcagcatccctggcctagggtcctagactgaatgtcacgagaggatgtcactgaataccatctccatctccctctgcctcctgtgaccaatgggaccagctgccttaggctcctgctgctgtgccttacctgggactccatgataaactacaccctcaaatcatgaaccacagtaaatccttccctccttaagtggcttttgttgggtattttgtgagaccaataacgagcagagtgagaggagggattttcactggttctccaagaactagccaagagtcctttattccaaaaaactgcagaaggcctggcaggcactcacctcacatttattcccttttagatgtcatgcagtgatgacagaggagatgggaggaggaaaaaaatgaaagggggctcgacagttaacacttccttcatatttattgtcactcactagaagaaaacaatagtaaagggtttaccaaacgaggttagcttctgcttctagaagcacaacgctacaattttcaggcaaggcagtcaaactctgagaagaagaacgtgttgtctgtgaacatgggtgttctgcatccttcccttttctcttgggcctgtgtcttctcacagcccaaaccatcctcagcctggctggagccacggccccaggtccgtcgcctgcactgttcgtgaaatggcctccagctctgagcttgctgttctaggtgactctgctcatcttactccagctcctttggcagttgcacctgcgttttaagcatttgaagaagaagaagaagaagaagaaaaaaatgaatcctggaaatgtaagagctgtaaagcaaaaaatcataaatcatacatgtcttggtggatgcagaagacgttagaaatattggctgcattgctctccaaaatcaccacagaggcaaaagaaccaaagccactgttactgggcatttaccaatccaaggcttgtggggaaatggaccacagaaacaagggaagctcaaagcctggtgccaagagtttacgcgctgcttggtgggtgctaagtatcgctttcctccactgtaaaatgacagtaagagcttccagtccatagtgttaaaagatcaagttatataaggggagtgagcgataaacagggacaattactttaaaaaacaaaaccaaaaggaaaaaaactaattctttcactgtgtttgtcctacaccagccttttgaggaggaggaggaggaggaggaagaggaagaggaagataggggaagaggaagaggaggaggaggagctctgtgcagacatgacttccctgaggtcacaaggctagaactgctggatagacgctcagctgttaaaaacagctcttgcagacgaccagaatttgcttcccagcacccacattaggcgctcacaactccctgaaactccagctccagaggatctgatgccctcttgtggcctctccaagcacctacactcacatgcacatagccacacacaagcatctacatataatgaaaaattatatatgttctaggggctgagggggagatagcttcgtaagtaaagtgcttgagtggcaaatgaattagatgtctccagacaacattaaaaagccaggcgtgatggcacctgctcacggttttagcattcgagagatcgacacactgactcaggaggctccttggccagcctctgcttatcaagcttatcaggccagtgagaggacctgtttcacaaaccaaggtaaatagctcccaaggaatgatgcttgagtttgacccctgacatgaaaacacacacacacacacacacacacacacacacagcctatccttctcaaagcacatttctaatatttcagtaacatttaaaaacagaatatatttttcaaaaagaaagtaaactgtatctaggtaaacttcacaaggacaaaataactacaaatgagtcacatctgcccaactctaagatcgacattcagcttctgttgcatagcaacagcctcaagttcaagtccagccagtccttaaagaggtttaagtggtgctctgccttaggaggtgactcgagcatccatcgtgtgtgcattttcagaagatgctgacagtgctaagacgcttgaagtttgttaacagctgagcatgtttttcctcgtccctgcccatgtgcacctgtcagtgtgacgagcccttgtgggttctgcttgcagtcagttctttgtccatgtcctctggagaggaatgtttcacagtgccctgccctcctgaggggacattcaatatcctcttcaggccaaggaaagtccccatgtacctctgatcctctgcacttctggtgtcagacttcaagaggaagggggtggctgtgtctgggtagggtttacccatgaaaaacaccaataattaagagcaatgggattttaaaaactacatggaatgctttaagtaatttgtaaacctgcaagcaagagctaaaatagtatgatctttgtatgtgtttaaacatgtatgtggaggttaaataaataacattttaaaaagcaaagtggggctatagagatggatcagcagttaagagcatatgttttttgaggagaagacccagattcggttcccagcacccatatggtagctcacagttatgagcaactccagttccaggggttctgatgccctcttaggacctctgcaggtaacaggtacatgtgtggtgcacatacaaacaaaacatgcatgcacataaaataaaaataaagaaatctaaaaaaaaattttttaaagcaaaatgtagctttggcccattataggaaccagacccataataccatgttccaaataagctgggagctcagagcaagggataaagggacaagacactgaatcttcattacctgcctggaaaagaatgataaaggagagatcttgcaccaacttattttctaaagtttaaccctttaatttatccacagcagtaaacattctgtgaaaagcctgagccttttaaataaagttgcaaggagagaggaagacatgtttagtcattagagcgaccatttctcagcagagcaagcagaaaccaaggaaaagatgactggctttgatgttgcaaaaactcaaacttgagctgggtgtagtggcacatacctgtaccctcaggacttcagaggtggagagaggagaaacaggagttcaagactagccttgctacttaaaacagtaacaacagcaacaacaaattttaattaaaggttaaaatatcaagatcacaaacaggagaaaatcaattcctgttattagtaggggttcctttctgcttaactcattaggttagtatttttaaagtgtatttgggatgtatgagcacatgcagccttatatagagtgcacacacagagagagagagagagagagagagagagagaggaagatatggcaggattgtaaaatgtactttagtggtggttatttaagttgttatcttgaatcgggcgtggtggtgcacgcctttaatcccagcacttgggaggcagaggcaggcagatttctgagtttgaggccagcctggtctacaaagtgagttctaggacagccaggtctatacagagaaaccctgtctcaaaaaaacgattaaaaaaaaaaagatgttatcttgaatctgactgtggaccaacacctcagtgagtatccagaatagagagaaaaagacacccattaaggaacttgagagatataaacggtccaaaaggaccttaaccctgaagcagattgtgatagatggtataaaagaagttccagatgaaggtggttccagataaagatataggatggacactattgctggcttgattttgtgtctaggaagtagtagacttggaagtaaacttgggacttgtatcaattctaatggatagaagaagagatcatttgaggctatagtgtcccaagaatgccataaagttgttttcatcaaactatagtgcctcaaataagcaccatcaatatcactagaaattgggcagagggggaattccccatctaagaccatctgaaccgaaattctaggaaagagcccagaaatatatatgagattctggtaatagattttagaaaaattgtatgtaaaaaaacaaaaacaaaacaaaaccttccgtattgatgttaggggaaggcgtcagcacttgtctattcttctggttctatttatttttcaagtaggtaaaaagttactggagataagtccaggacttttaaagaagaatgtgtgagaaggtgggctcaccaaaggccaccgagatggggaacaacatggcacagcctacacagaggagcctggcctgagaacaggctgaggaagacacttgtagtaccctgaagtatccgaaggtaactggccttgattaagttctattatcttaaagttgctggtgtgctacggtggctctggtgagctggggttgcacgtgatgctctcaaactcaagtctttctggagggaaagcttggtgattgatgctattccaattctgacttggctgggagcagtctacccatgcaggtcagcccagcatggagtagagtgcatgctatctatagtacccttgatggctcgagcgccacatgtatggactcttatctcagtgaaaagtacaaaggtttctctgttatggtagatggtaagtgagtcataaacatttctaaggtagattaaagaaaatggagctagagagatggctcagtagttaagagcactgactgctcttccagaggtcctgagttcaagtcccagcaaccacatggtggctcacaaccatctgtaatgggatctgatgccctcttctggtgtgtctgaagacagcaacagtgtactcatatacataaataagtaaatcttaaaaaaaaaaaaaaaaagagccgggtagtagtggcacatgcctttaatcccagcacttgggaggcagaggcaggtggatttctgagtttgatgccagcctgggctacagagtgagttccaggacagccagggctacacagagaaaccctgtttcaaaaaaccaaaaaaccaaaaaaaaaaaaaaaaaaaaaaaagaaagaaagaaagaaaaaaaaaaaagaaaatgtgcatttgtgggggagggggaaaacttgctatgtgttggtgtcagagttattgacagctattaactcaactcatagggttttatctaaggaatgcactttcttggagaagacattaaaaaacaagagcaattcttaaagaattcttcaggaaacaataaatgtgaatgaagcaagatgattggaggtcagtcagcataagaaaaactggaggggccacagcccacagagaggccacaatgcagaaggaactggcggagaacatttgcctagcatgtgcaaagctctgagatcaattcccagtacaacacaacacacacaatgcacacacaccccacttatgacatgtacatgcaagttttacatggctgggtttattctttcagtggtgccaaatatttgcatgttttctgggatatttagaacttataaaataataccttgtccaattaaagtaggcctgaagtctggtttgtagctacctgttttcagcatgtgacctggagagggtatctctctcaaactgaattgaattggct

SEQ ID NO: 330 - DNA, 1841 bp, Mus musculus
ggacccgctgtcatctttcatccagctggttgtcgctgccgccgcctccagattccgaaggcgaagctcgcgaagcagaggaacatggacgtgaacctcgccccgctccgtgcctgggacgatttcttcccgggctctgatcgtttcgcccggccggacttcagggacatttccaaatggaacaaccgtgtagtgagcaatctgctctattaccagaccaactacctggtggtggctgccatgatgatttcggttgttgggtttctgagccccttcaacatgatcctcggaggagtcattgtggtgctggtgttcatggggttcgtgtgggcagcgcacaataaagacatcctccgccggatgaagaagcagtacccaacggccttcgtgatggtggtcatgctagccagctacttcctcatatccatgttcgggggtgtcatggtctttgtgttcggcatcactcttcctttgctgttgatgttcatccacgcatccctgagacttcgcaacctcaagaacaagctggaaaataaaatggagggaatcggcctgaagaaaactccgatgggcattatcctggatgccttggaacagcaggaagataacatcaacaaatttgctgactacatcagcaaagcgagggagtaagcacagcccgcccagtgacggggccccgcagcaggaatccggttgcactttcccccttgttcagacccattttcagtctgtggtttttaaacagaaggtgcacgtcttaccacccacctctccaaggcatcatgcatgcacaggcccactgctaagatctccgatatgacccatagaaggcctcagaaactgcaaaaatacagacccactctcccgttgtgtctgaagtgtccggtgtgcttttgaaaaagagtgtggattagacggccacagtgccatcttatcgtagggaagaagtccctgtagagcctggaggcaatgtggaggacatgaagatcagttaaagtcgaggatgttgtgtgtcagcctgtttctaatgctgtctgacatcccctccaaaatcccctaagactctgatgtgtcgggtatgttagtttagcggtattatttttgttgttttaaaaccagaggctatcacttgggcacctgtttgatgtgcagtggaaactgggtcagccagttgtttatattttgtttacgaatatgaaggtagctgtttaggacaatgttttgttaaattttgtaaaatttttaaaagggttagtaatatgctttcaccagcaggtgtttcttgcaaactaaatgtcaacctcctggggtaggggtggggggtggggggatggttacaactctgtaacttctgttattcttgttaagaataaatacaatagaaccaaacttgagttctgtctatatggcacatttttcgttactacaacaataaaagggtgtccaagataatgatatttgaatggtttagattttttaaaagattttttattgcttttatttgtgtgtgtgtgagagagagagagagagagagagagagcgcgcatttagaaagaaagaaatgagcatgtattttattaattccttaggagatcagggagagcaaccacagttgagcttttgagcctgcaaagcttccctagagaaccaagccaaaggagtttaaacagctcctgtacctcaaagctgttgacagtacgcatggtggccatacacttacataaatagcactggagttaggatggcgtgagcctttgcattgcactacagttacccctttatggctcatatattaagaaatagatgacatgtgggtgtttgccagttgggtgatttcacag

SEQ ID NO: 331 - protein, 188 aa, Mus musculus
MDVNLAPLRAWDDFFPGSDRFARPDFRDISKWNNRVVSNLLYYQTNYLVVAAMMISVVGFLSPFNMILGGVIVVLVFMGFVWAAHNKDILRRMKKQYPTAFVMVVMLASYFLISMFGGVMVFVFGITLPLLLMFIHASLRLRNLKNKLENKMEGIGLKKTPMGIILDALEQQEDNINKFADYISKARE

SEQ ID NO: 332 - DNA, 41338 bp, Homo sapiens
tataatccacaaaaacttcagcaactcagtcaacatctctaaacctcaatgtctccctctatataaaatggggtaatgccttacccacctagctgggttatttggggaagcaaaagaaataataaattatttgaaactatacattaaaatatgaattgccagttttgttatttacttcattgaagttaggagcgttttgccagaggaagcaccaaaagttgtttgttaaagatcagagaagaaaactgaagtatgaaattttatcaataactttatagctgagagctttagaatttaaaaagttccaaagttctaccattttaattactgtttggaatttggcatgctaaacttatctaacaaaggctcaagagaaaaggttaagaatcacgagaaattccctagtatgacagataagtaaggtttacttatcacaaagaagaaaaaaatatttatatatatatgtatatatattaccagatttttcaggagctcacatcctaagccgccagctccaatgactagaactttacatgtatctaacaagaactggagagactgtaaagaatggaaaggcatattaaaagctgggtgataaccgcaaagactataaataaagcaacaaactttaaaatagtttctgatgtttccaggaaaaaatgccactaggataaagaggagactttgtatttgctcaattatttgaaatttgtgaattctattgaaccaggaattctaaaactctaatgatttcaggaagtttcaatgttaatttttcttttttttttcttttttttgagacggagtctcgctcttgtcacacaggctggagtgactgatgggatctcggctcactgcaacctccgcctcccagattcaggtgattctcctgcctcagcttctcgagtagctgggattataggtgtgcactaccacacctggctaattttttatttttagtagatacagggtttcaccatgtgggccagactggccttgaactcctgacctcaagtgatccgcccgcctcagcctcccaaagtttcttggattacaggcatgaggtgccgcgtccggccattaatgtttttaaattgccttttattgtatgaaagttaaagggtatttttaacaaggaaaactatctctaatttgttttttaatttttgcaaagggatagagaacatcaaattcagttaactgacttcctaaaaatataaaagtttaaaaatttaaaaaacagaggatcaagcactgcccaaagtgtttaaaggagtaaaacaataaggtaaaaagagtaacagggctgggcactgtggctcacacctgtaatcccagcactttgggaggctgaggtgggtggatcacctgaggtcaggaaagaccagcctgaccaacatggtgaaaccctgtctctactaaaaatataaaaaattagccaggtgtggtggtgggcgcctgtcatcccagctacttgggaggctgaggcaggagaatcacttgatcctgggaggcagaggttaccatgagccaagatcacaccattgcattccagcctgggcaacaaaagcaaaactccatctgcggcagatggaaggggaaagagtaacagctgcttttttttttcctttttgagacagggtctcactgtgtcacccaggctggagtgcagtggcatgatcagagctccctgcagcctccacctccaggtgcagtcaagcaatcctcccacctcaacctcctgagtagctgaaaccaaagacatgtatcatcatgcacagctaatttttttttcttttctttttttctttctttttttttttagagatgggttctctctatgttgcccagggtggtctggaactcttgggctcaagtgatcctcccgccttgacctcccaaagtgctgggattacaggcgtgagccaccttacctggccaacatctccttttgaataaagtgagcgaaactcacaaaacatgagataacacgaaaacatataaaactcttagaaaattccttatcagcagaaatacaatcatttaacagaagtaacaatcttaaattatcaggcaaaaaaaaaaatttagaagcacaagaaaatatggtgtgttatctaaagaaagacagaattaatactttcaattctttttcttttttttttttttatttttaatgctttcagttctgcccagcattaaaggagaaagttattcacatgagacactgggccaaaccaagagtttgcacgttaatttatgggagtaacacaatatttctatttcaaaatactatctttttataaatacaaaagcacataaagatgtgctatacttttccctaccctgtaataaaaaaaagtgacatataagtgaacacttgccttaagatagacactatcagtccaaaattctacgcctctattatttagtacttacataattcttaacatgcaattaattatactcaaagctaagatgttcattccaactaaatttcaaaatttaagtaagcacacctatactcctatcaaaattaatttctcacagtagcactacaaaaggggagtatgtttcagaaagcattttaaatttttacatgaggtcatgaagttagatttttctcacaaaaattttcaacttatattacatgagaaatgttaagactcaaatattcaaacaaaatcagttgtgaatattcaatctcatattttaagaaaaatttagtttcacaaaacaattttattagtattttcattgtaagagcaaattaaaaaagaagcattctattagttttgaaacataaaactattagagcagttatttaaaaataaacgtttctcacttcagtgctcggttcgaaatcagggtgtgtgaagggtccagatcgctcgaggaacttctttacatggttccagcgaccttcccagtctccagtgtccccacacccaccatcaacagccattctgcacagaacacagtaaattcagctgcaaagatcagtatgaaaaaaaccacacctacaactattatggtatccccaaatgaaaaggtaaccacaccagacctgctcaaataaaaaggaaaatattcaatgtgattatgtttatgctttgaaattttttcttgcctattatacaattcatttaaagttaagaactgcacgtttctatttttatttcacccaatggatgaaataaatcagtctacatgtttttggtttcctaaagcaatccaaggttcaacttaggatattggtctattatgtgagaaattgacttctctacatttggtatttacaaaaaaaacactgcaagcttcctcaatctgttgtttcatcacacttgcattaggaaatatgagatacaacagagaaaaaaagtcacactttcagaattctgatgcttatatgtctgatgcaaatttaatatttatgtgtcctttccaaaggtgtaatctaaaaatcactttgatgagaggaattttcacacacttttctcagaaataaggttattttttctttttctttttctttttttgtgacagagtctcactgtgttgcccaggctggagtgcagtggtgtgactgcagctcactgcagccttgccctcctgggctcaagtgattctcctgcctcagcctcccaagtagctgtgcctacaggtacatgccaccatacccagccaatttttgtatttttagtagagacgggtttcgccatgttgcacaggctggtctgaaactcctgagctcaagtaatccgtccacctcggcctcccaaagtgctgggattacaggcatgagccaccgaacctggcagaggtcttaattttttaaagaatctcttaatgctgtgggacggcttttcttgccactaaacacaaagtttcagattacaattacgccacagatagacatctacaaaccttttagaacatacaacagaataaggtgggactcctctacaaaattcatctattttatacttagttaagattcacgtttggttgtgattatttttaattttctaatttcctataactccacagtttctaccgtcaaatatattagtaatatccaatttttacaaaagggaccaagaagtattgcctagcaataaaaaccatacgttttgatgtcagagttgtgttgggttccacaattaacagcactgtgaccttgagcagattacttaatagacataaacctcatctgcaggccgttcatagctacttctttcagccatgaggatatagataatcacacagaagactcagtacagtacgtgggatatggtaagcaatgtttaattgtgatttcatgtaaaagtgggagggaaataaaaggcaggaaagaatgtgaaattaagtttgtcatcccggtcctcttgcagctgaaattcaactgagggacacacataaagatcaaagcactgctactgggaatcggcacggaaatttacaaactcaccataaccaatgcaagagtattttttccctgcccaggcagggaggggagtaaattatgtggcgctggccaggttagaaaacacttcgattaaatctgtctcaccagcatagaattaagcatctgataagaaatagggtgtgtagtaaaagggataaataggctgtttgaagtcaacaacctctttccagatcttttaagagccaattattctgccaaaatgactggagtgcttagtacaatacctgacatgtagagttatcattaaaagtttgcaattagtactactgtctcagtgtttgcaaaaggccacaaaacggtcttgtgtccttttcctgtgtgtttaaggtagattgccttttcacagggtcactgctctgacaatttgggatggaggaagaggagtgcacaagggtccttcctcaagacctttacgtcaagcaccccggagggcccctgcaggagctggggcagtacagcctggccccgacgcccgcaccgggcagataccgggagcggcccgccaggcccccggggctgcggggcggggatcaggggatgaggcagcgcggcctgcgctccgggtgtccccctcccagccccccgggcccgctgcggctggtcccctaggcctggggtggggggaggcgggggtccccggagagggccccggcctcccggcagcactaacttctcagccagcagctcctctattctccttcttttcttctccctaaaagagagaataaaagaagggtcagcatcgcgctacacactgggcgccgcgaggggaggggggcgaggggacggggcggggggtgtggggaccccgggtggcggcggcaaccgcccaccgccgcgctctctcacaacccagcccagcccggcgcgtctgcagagccccggtacttacggctcctcgccatccgccatattgttctccgcctcttcccaggtgcccacgcgcggcagggcggggaggagcgggactggcaaagcggggaggggcggggctggcgaagcggggaggggcgaggccagaaacacaaccggcagggaggtgcgaggttgactgcggctgggctcccatgggctttaaagtcttgccctgtaattataatcttaattacctacgcttaattaggtgaatcttataccgtgcataatgttgctctgcagcgtgaaaatgtagacaatacattatgcgtttacacaaactatatgttaatacgtaattatacaaaatattggtatattctatgaaaaattcgtgaagaaccctcccagtatgccagagctttcctctgggggcaaagatcaaggaaattttcactttctgcttttcaggatggttccaaagtctttgcctttataagtactcacttgaataataaatttatctaaatccgtttacattggtggggtgggagattattattttctttgaacaaatcagcattaatattttcatgtcacattctgttagataagttcagcggaaacaaaatgattaaaacttttcctgagataaatgtgtatatttagatacaaagaaaaaagtataaaggaaaacaatcacaaaaatcaaagaataactgagaacacccataatcctatcacctaaagataaattgtgataaaagtttcaattattttcttctagagtcagaaatacaaatatacactgtgaatctggatggctggatagagggaaatgatcatgttcaaaaatgtatgtatatacacgtacacacacatctccttctatggagtgggacaagaatgatatttggaatcaaaagtaactgattttaaattcttctcagttgtgagctacgaaacccttagacacttctatttcttcatttataaagtgggcataacactattcaccttgtaagactgataattaagtaaaatccagagtggctctcaaaatacagttcctgatcaacatcacttgggaagttttttttaacacaaattttcacccctcaccgcccccaccacgctccccaccgcccccccgccaccccacccttcagccttctgcaaagcctggggtgattctccactggtaaagtttgagggccactgaaatggagtacataaagcctgatgggtactcagtaaatgtagctgctgttactacactgtgatatttaacctcctcttgtcctagttttcagtgaaccttaaggaaagcttgtcctttatggtcccccaattaggttcagttcaatagcattcactgagctgaaagtcaatgccaggcagtgagcgtgggaatagagttcacagtccctatcaagagataccagcctccttctgcatcacatgtctcagcgtcaactatgaaactactttttcttgcccagacaactccacagatggtttcactgaggatttaacctcagtgcttatcaaaatgggctcctgtagcctgaacccccaacaatactggataccctttgattagtggtagtgagcattgcaaccctctcagatagtgaaaagcagcagtcaccttaaaggccacctagtccagtctcacccatttcacaggggaggaaactgaggcctagggatagagtacagctagccgatgaagaagtctgcaaaggtatctggccctgcatctgcttgctttgagactaacagcctgactcaccatggtggtattttgataaacgacaccaggcactctcactggcttagattgattgacggattagaaatagccatctgcccttgccaggaatgaaagcaacagagacatgcaagcaaaaccttcaacagatttattttacttcaaatggaacatatcataaacaattagactatctgctatggtttttaaacagacagatagtctgaatggtcctatctagacacaccagtcccattataaaagccccatcaagcagggctcggcttcccacacctgtagtcccggctacttgggaggctgaggtgggaggactgtttgagcccaggagtttaaaaccagcctgggcaacatagtgagaccctgtctctaaaaataataataaattaaagctccagaaagacctctacagtgaatctgacccctccctccccggaatgaacactaacaaagagctgctactaatagcatttcaaacagttactggaaaaaagtaatgactcattacatgttcatttttatttaaaataatttaacaaaggtagaaatatttagagaaaaaaaaaatctcccataccccaaagagagagacagggttaacattttgggagggagacagaagggaatcatgctataaacagctttctctgtcttttcagaatttatttatttatgtttaaacctctaaagaggtttaattctttcttgggtatcaattgcctgtgatcaaggagtaatcatattgttactaatacactcttgacagcttttggtcatgcagttctgagcagttggaagataaagttcttagttacagcttctaatactcataaatctcaccaacagtgtggggccccactggagttcccactctcatcttgaccaagatgatttactcagcttgcccacagtgctgcctcttgacattctgaagccctggggaattcctccacaccctctgacttcctgtaactgagcactgaggctcagtgcatctctatttagcactcctcttactgtctcatatttaactagtgtttccactggattgcagaagttttgaaggcagagcaggattacatttttctcctctttaaaaaaaaaaagaaaagaaaagaaaaaaaacccacagtgctttcacagagcctcaaaagaactcgaaatacttgctggcattgtactgaatattctcaaccttttccccctacccagatacatccacaacaataaagttggagcaaggtagagaaaagttagtagatgtttataatgaaagcatagaaaacaaatcagattaaagcactattaatagcaaacaagaatcgtgggctatcctattgctaataacaataatagtaacatataactgtgaacctttattatacactaagcatttcctatacattccttcacttagcctcgtctatatggcagatgttccattatccccactttacacatgaagacaccgaggctgggagagattaagtagtttctccaaagtcacctgccagagaggaaggagctgcgactctaattttgctttctctgacttcacaccatcccatttttccagaatcaagaaaacatgagcactcaggaatattttcacattttaaactttattcaaaaagcagcacataagatatatcttagcactaattccatgcaatcaccaaattttcctaaacaacagtagtagtagtaatttcttagagtcgctgtaagctccttaactgtcttctgaattaataaggaaaattaaattatgttttctagactttgcattagtatatttcattactttccaagttttcaaaaattggtgatctgagtagagtgaattcaccttgtctaagccacttaggggcttagagactctgttatcttagaaatcttcaccttagaattctacctattacattatacaattaaacaaactactttttttctcatgcattgtaccaatcagccccttaactgaaaaaagatgacccttggaagcttagaagagaattgacaacgaatacttcttttgccaggtctttgggctgggatacaaaacatcacgttatctatgaatatattgtggtccctcagtgaaagctgtcaccaaatattgcaataaaactaagaaaacttttgaagtggaatgcatatttctgcccagaaaatgctggatgcagaacaactagttcactgcagacaactgtttgctttaaaatgtaagcaacatgcccagctcaggactgaagtggccagagtgcctactttatcagaatggcatagcagtccaacaatttagcctagagagaacagaggtggagaacaaagaagagaagtgaaaaaaacagaccagcccttctgttctacatgaccttctttcccgttttgccaatctgatttcacacatagtgactcatggtgaaacagagaaaacatgggaattgcattcagatgtgtagaggttagtaagacttagttttcaaaagcagctcattctccattaacactgtagtcgccttccatttcatttcacttagattggcatctgcacagctgccaaaatttttctctaagtcagagaacacactcctaggtaaaccttcaaaaaaggtatttcgaaggaggcagcttctctgctgctagagaaggcattgccacctcccttcagacaggggatttccgctagttgctttctgtcatttcgtctctattctgcactcagtcccttgttctgtctggaggttcctgttttcctgtacccaaccaagagccaatgaagaagtaaagaggagcaaacacgcccgcccactcccaatttcctttgctctgctgtctgccaaccgcaaagccgaccgagacggagccgctgtcaactctccaactcagctcagctgatcggttgccgccgccgccgccgccagattctggaggcgaagaacgcaaagctgagaacatggacgttaatatcgccccactccgcgcctgggacgatttcttcccgggttccgatcgctttgcccggccggacttcagggacatttccaaatggaacaaccgcgtagtgagcaacctgctctattaccagaccaactacctggtggtggctgccatgatgatttccattgtggggtaagtggggtccccctacccgggacaccgatccggggcgagcacggaggggcctcggggtgcaagatcccgggatgtagagacgctctctgaccacgctcagcgcctgccctggcaattctgcaagcggccaagccagtggaaacttgtttgcagggcgaggccgcagtaacctggggccccattttctgcaccaagggctgagacttgaggggggccctaggggaaagaggacggggaaaatttgccagccgcagggaagaaaaatgagagttcccccacccccctgcccccgcccgcgtgccaggatcgggctcttgctggaaagatatttgtagcgccctcgtcttttaaaaataagaagaaaaaggaaagtggtgtaaccctaccctggagctggctggggcggcagggtgtggacccgggctagtgtaaaaagggcaaccaagtggcgacgcactttgctgctttctctgcctaatgcctgccacactgtacagtaaagctgagcttgggatcaaaagggggggtgtctcctggtggcgcatctcccattgtggggtaaaggctgccatgactgtgggaagatggccttctggcattttcttccagcagtggccaggcgtggtcactttctctgtcttcgcttcctagcctgaggtttcaatgtatcagaaggccttttcaatacctgatacttaacaaagtatcctgtgttgagactgcatgtacacctgctttcctagaaaccacctttccttctagttcaccctttaagaaatgcttctctcgcttatgcaggatgggtggtgatattctcaatcttgctgattatctcctacacatctttaaagaaaaagccaccctcagactttataaaggactcacttgcacttaaatgtctgacatttctatttcagggcagacgtagagggaagaagcagcaagctggcttgggagaaaagggagaaatttgcacttgaagggtgtgggaaagggtgaacagggtggcttcttcagttggctcgcagttaattggcttatacattgagccacctctctgtgcctggccccatgccaagctccaagcacaccaagatgaatcagacttgaattctggcccaggggctcctggcagttgttgagaagctaaaggagcaaacacacagcacagaggagagggggagacttcacagtttccgagtatggttcacagcaatcacccccatgcagaggtggaagcccacatgtgggactctatacacaatcgcacagatccttcttctgcattgcttaaggaattcttaaggaattgcattctgggaatggcttggtgtatagagggcacaggctctgagtggactcggaactagtgtggcagccaaggtacaagttagtcagggcagggtggggcaggcccaaggcctgaggcagctgccttctgaaccttccctcagctctgtgcttcaggctgctttcctggaacactaaaaaatttcttttttttttttttttttgagactgagcctcgttctgtcgcccaggctggagtgcagtggcgtgatctcgtctcactacaacctttgcctcccggattcaagtaattctcgtgcctcagcctccagagtagctgggattacaggcacgtaccaccatgcctagctaatttttgtatttttagtagagacaaggtttcaccatgttggccaggtgatctgcccgcctcagcctcccaaagtgctgggattacaggcgtgagcctctgtgcctggccaaaaatttctttttaaaaatttttattatttatttacttttgagacaaggtcttgttctgttgcccaggctggagtgcagtattgtgatcacagctcactacagcctcaacctcctgggctcaagcaatccacctacctcagtctcccaagtgactgggaccccaggtgcgtgccacaaagcctggctaattttttttagagatggggtctcactatgttgcccaggctggtcttgacttctgggctcaagccatccttccaccttggctcccaaagcactgagattgcaggcgggggctactgtgcctggccaaaaaagtctttaaaacaaaataagtagtaaataggtttgcatcaatttttgtttttttctttctctttgcaaagaagcaggagggcatcttatctggtgatctagttatggaggtattttcttgaggtaacttagatgtggggcaaagtttgacacagaccaataattaaaaaaaaaaaaaagtctattttcttcagacatgtgtgctgcccagaccaggcacaagctcagacagccttgctgcttttgatagaatccatttttcactgtgaaggccaggggccagccctttgactaaatatagctccgtcagtattgtgccttaggccactaactcaggtagtttaggggtgttggccctcctcattttcctttcaaataagagttgttggttgtcaatgaaaattttgaagtgaaaaagtgaaaagtagccatgaagtttttaaaacttatccttatttttaaaaacttacaaaagatacaggctagtagtaaaggttgatttgaaaattatgtggataaaatgtgaaatttccttcatacttcagtaaaagtttggtatataacccctaactgttttctatgcaactataagcacagtcagtagttttttccaccagttgttctcttttctttctttatcatttaataatataaatatttattgagtgctctgtgtgtcaggtaccttgcaaagtattttacctgcattatgtcatagaacccaattttaaaaaactgttactttttttttatcattaaacctgaggctcagagaggttaaatgatttactcaaagtcacaaacttaggcttgtgctcttaactactgttctgtcttactatgagtcacaaggaagaaaccaaacatcttcagagttagggagcgtccttgattccagaacacttctcattctaaagagaactatcctctttcggtgatgctagtagatgggtaggtcagagcagtgctggcagctgttcatctggatcctccacagacttctctctagtttctcagaatatcttggtagagtatatgtgaaaatgtgacctggataaaagagtgttcaacaatggttccatcccctgctggtgaggagagcctcaagggcattgtaggagtgctctagcctcagctctccaatgttggaaactggcttagatgaggatagagagggcctcctcttcaagatttcaggaagggtgagggaagaacatagcaaatactatctagatccagaaacactggaaaaaactgcccataccaagacggagattaagagggattaggatagagataaatctgtgtttaaacttctgatcagaagagattgaattatttaaaaggaatagcatgaataacaggctaggaaacttgcgttttgctggaaatgcctttggatcctttacatcaagaaggaaaagtgtctaagatcgaagttgccatagcttaccttctgcatccttgatgtgagacgttttgggattaagatattcttttcacatcacacacaacaatagaagtctctaccttgatcttcaaagtgaaaaacaaaggcaacacctaatgacacttgcaatttaagtactaagcgtgtgatacattctagttgtggatgaaaacttctttgtgcttaatggaatgccaaatgatttgagctggagaactctgttcagtgtgtgagccatggaacagcagcatctttcgcctgagagcttgtcagaagtgaagcatctcaggccccatttcagacctactgggttagaatctacattttaacaaaagtctcagatgattcataggtacattaaaatctgagaggcactggattggtctggctcaaaagaaaatttaaataaatatacctatatgcccaggtgtcaccttccgtgattcaaaatgtatagttcttggcagggtccaggcatctgttgtttttttctttttctctaacttcctaagtgattgtgattatacacccctaggagaaatactgatcctcttgaaccccgtaacttctgaaatgtaaaagctcgaggtcacaggctaattggaactaaagctgctaataataggaagtgaaatattttttccattaagccatattgcaaattttctaaagctcttgattaaccaaattcaactgcatccctgactcttacaatatttgcaatgctattgctgtcttattctgaaaagttctttcctggatgggtatagtggctcacacctgtaatcccaacacttcgggaggcagagatgggaggattgctcaaggccaggagtttaagactagcctgggcaacatagtgaaaccctgtctaaaaaaaaaaaaaaaaaaaattattttctgccattagaactcatattttctggtatggcctcagaatcaccaaccacacacagaatttgcaacatataaaaatgcctctgctgcttctccagcaagagagctgcatgtattcttatgtatatacatttgtgcctccccctttagatagaaccatgtagctgctgaaggaatgagcccatgatttctcagctgaagtaactcctcaccatgtggcctgatcatttggcctatggagatgttgcaggagggtggaattgacagctgccactttatgctttcagttactcaagatggtaaggagtttctagaaggctggtaattataagtttgaaaacagcattaatgtaatcttttcaaaatgaacgtggcttggtggctctgtaatatgttctaggcctgtggctcccagcatctggtattatgaaatgttcgtattgtttgtacctttaaatgctgtaaagatgaagaaccaagtttccagctggtagaggaaaaaaagcgtaaggcaaccctgggaggctctggatcagaatctattgaaatgattgcagatagaatgagttgcagtctgtttatactaaagcaagtggaaatgtttttgagattagtcagcttcaacaccagttctacaacattactcttatttgtgttgcttcattcattcaattaacaaagagtatgaagcacttaccaacttctcagacactgctaggagatagtgaagaataggacagctgtgattcctgccttcacggaaaggcagcaagaccacactgaacacatgataactaatttgtatacaagtatagcaagtgtacagaaatacacacctacataaacacatccttctcaacctgacttacctgatctcccctgtacattattactccaaattccaaatctctcaggtgttgggaataggggaggcattgagtatgtagacaggaaaaaggtttttttaaattttactatcctaacccacagctcagatccttctattccattgaacaaatactgagcacctaccatgtggtagacactgtctaggccctgaggatacagtcaggagtacaactccaccagccttcccaaatcctcccagaattctcctgcccttcgatgcccatttatttgcatttgaggctggcacctgtcttcctctgatggcttatgtgtttcttctgaatacagaactttaagaggtctgtcaacacacagtaacattttaatctcaaaatctttatctaggctggacatgatggctcacgcctgtgatcccagccctttgggaggccgaggcgggtagatcacctaagctcaggagtttaagaccagcccgggcaacatggcgaaaccccatctctaccaaaaatagaaaaaattagcctggcgtggtggcatgcatctgtggtcccagctacttgggaggctgaggtgggaggatcttttgagcgtgggaggcggaggttgcaatgagccaagaacgcacgccactgcactacagcctgggtaacagagtgagacgccgtgtaaaaaataaataagtaaatataaatctttaataaggattgcttttcattaaataacctctgacagtgtatgtgtgtatatgtgtgtgtatatacatacatatatatatattttgagacagggtttcactctattgcccaggctggagtatggtggcgcagtcatggctcactacagcctctacctccctgggctcaggtgatcctcctgcctcagcatcttaagtagctgggactataggcatgtgccaccagcctggctaattgttgtatttttttttgtagagaagggtttttgccatgttgcccaggctggtttcgaactcctgggctcaagcaatcctcctgccttggtctccgaaagtgctgggatgacaggcgagaggtatggctggcacacctttgatactatttatgtaactttgtttatctgaacttctctcccctctccgtccagcttttttttttttttttttttcaatgttgcctgctacttttggcctttggttggtagtttctgtttcctttccctaggtaaggatttacaatgattctaggtaagtgtgcaaataaatgagtgtattttggattcctggccccctgtcttagaaaggagaagctctccatcagcttagggacagagagctctgtacaggaaatccagttcaaaaaggtcaagacccattcttgacctacccacttaatatctaattaagcatcaatattggaaattttgtattttttattttttggacaaatgaattctatccttatcactcagcttcagaaaacttaacccttaataccatcctctgtctcttgaaatgagcgtggcttcctgtttctgagaatgccttcacccttaataccatcctctgtctcttgaaatgagcgtggcttcctgtttctgagaatgccttcaagccctgtaattttaggcaaaaccttcaggctaacaacttcaggtttgcaagcattcatcattgatatatgataggatttcctggccttccttctcgttatgcaatttgctaaaggagacacctggaaggcagaaagccctgcttcttctaatctgcttcatatctcattggtgcagcttctccttgtctcagaggaaaaagaatgcagaaattgggggttagtgaggggtaaatagacaggaaacttgtgagaaggaagtctgtgttaccaagctcgttagcatttgtccagcccctgtcttctctccacagctctgtaagaatttgccatgtgacagttctcagtagcttttgtttgttttgttttgttaagacagagtctctctgcatcgcccaagctggatgccatggcaggatcttggctcactacaacctctgcctcccaggttcaagcgattctcctgccttagcctccaagtagctgggattacaggcacgcacaactatgcctggctaatttttgtatttttaagtgattacaggcacacacaattatgcctggctaatttttgtatttttaagtagagacggggtttcaccatgttggccaggctggtgtcgaactcctagcctcaagttatccccccacctcagcctcccaaagtgctgggattacaggtgtgagccactgtacccagccttttttttttttttttaattttctaaaatcattcaagaagaacagtttgtaaacaaatatctttccacttctgttccccaaaaagtattggttgttaagagtaaccatgggttgctaattgtgaaagcagtgatgagcatacatgaagattcattatacattattctctctacctatgtatatgttagttttccataatgaaaagttaaaaagggttttatgaagtctaatcagagctttgtacacaactattatttgaagctccgtcactgtgggaagcgtcagatttatggtttctaatccgagtccaacctgttgtttattaaaaacaaaagaaaatctggaggttcctaaggcatgtcttagtatgaacacttttaacatgccaactgttaaaaagacaatggttggtttggatgcgagtgtttaatttgtgccaaattacacaggatacagtaaatatttagggaatggcaagaatacaataaatcctctaggccttcctaattcagttggttaggaaaatctcactatgacctttctgtaacaaaagagacaggctcctgttcagttttacctactgtacagtctcctttattccatgatccttaggccaaggagacactgttctcatttactcaagacgaatttgtgtccaaagcccacatttatgcctatagtcaaaaatagctctccactttgggaggctgaggcaggcagatcacttgaggtcaggagttcgagaccagcctggccaacatggtgaaacatcgtctctactaaaaatgtaaaaattagctgggtgtggtggcgcatgctttaatcccagctactggagaggctgaggcaggagaattgtttgaaccagggagtcagaggttgcagcgagccaagattgtgtcactgcactttagcctgccgacagagcgagattctgtctcaaaaaaaaaaaacaaaagaaaagaaaagaaaaaaattaaaaattagccaggcaagctggcactcacctgtagtctgtagtttcagctactcagaaggctgaggaaggtcacttgagtgtgggagaaagaggctgcagtgagctatgaccatgccatcatactccagcttgagtgacagaggaagaacctttcttgaggaaagaaaagaaaaggcatatggagctgtgctctggtcagagagactgaggaaaggctggctgagctgagacttgaaggagggtggagtgaggcctgtgtgcaaagtatcctctctgcctgattcacctcaccctgagatggcaaaaggcaaggtgagttctggggtagatagaaaccctgagtggatgggggtgcaatcaggagatggtgtgacaaacctggcaggtaggccagctgctagccctgagagttccctcatgctaattactaaggcacttcttcctctcctagcagttacagccaaagccaaattttggccttggcttgtggagtgtgtgacctggattccaggccccacttaccccctcagccaggcaccaactccacacgtatatacagtggccctggctgcagaggcaggcaggggccagaccctgcgaagccttgtagaatgtttaaagaattctgtttttagtttaagaacaatgagaagaaaatggttgggtgggttcatatttgcagtgatccctctggctgattaaggaccacagagaaacatcgccaatttagagaagtccaccgtgagtatattgttccccactttttcggtgagtcagccttcctcagaaaccacacttcaaaaatagctttttcggctagaaaattggaactcagtgcaaagctgcctgtactcctcaggaaatattttgctgcctctttggtggttctttttggccttgcagcctgacaggagtcaccaaatgtggccttgagttgatccgaggatttctgttatggcaaacttttattgccaactttgcaattggtggccttggacaaatttattaacttgtatattctttagcttgcttacgtgtaaaatgaggtgggttagcaagatccttcctagctctaaaattttgtgagatttttttttcccctttcagtaacttgtggtaaaactatagacatagctactgaatcacgttgggaagtttaggacctgtatccacacccactaatagccaccttgtttcagagagaaatgagagtgcagagggattttccaggatgatccttggttatagtaggttacttagagtgtgggggaaatccttaaagccggttaacatgacagaatgggttctactgtgagttgctgccacaactggcacccttgttttcttgtttctctcctggatccctttggatatgtttcttctctgggcctcagtttagttatctgtataattggactagactgattcatctttgaagactgctacaaaatttctgtgatgggattctaaacctttttataaccataaatgactgctctagaatgtgtaactattatagggaaagatttattaattatttattggaattgggtaatacatgttcatattttaaatatatataattaaaatatatacaaacatatgtattaatatatttttaatttcacaatagaaaaacataacggtttttgagttgcaaaactaggtcctgctgtttctcccttctttctcaccatccctcgttcttttttttttttttgagacggagtctggctctgtcacccacgctggagtggcacaatctcagctcacttcaacctccacctcccaggttcaagtgattctcgtgtctcagcctcctgaacagctgggattacaggcatgcgccaccacgcccagctaatttttatgtttttagtagagatggggtttcgccatgttggccaggctggtctcaaactcctagcttcagctgatccacccacctcagcctcccaaagttctgggattacagttatgatccaccgcacccagccctctttcttactctaggactatcagtaagtgaaactccacccagcagaccacagaggcagctgtctacatgaaagatgggtggcatgtttatggaaagttttgtcctaaaagtctttggggtttgtcgtgattgctgtgataaacagcccaactgttgactaaaaagcatctcaggcaagaactggttcccagatttctgagaatttctgttaatctgtagagggtgtgtgtgtgtgtgtctgtctgtctgtctgtctgtcttttgttccaaatacaggtaagtgccagggcattggagtggtatacattttatcagatacagaagaaaataatttctgctcagagtaacttcgttagtttttttccagcttggaaacttgcttgctttctaattatagactgttgttgggcaggttatgaactaaaaccagttctatagaacttcaggctctgttcttttctcttggacatgagcaaccagaacaggtgaaacaaatttggaattgcttgagttaggcctggatttttcattgttccttgtcctggactttaggcactcaacctaaatatgtattttacttgtctagaggaaaataaaaacagcttgacatgaattttgttatatgcttcacttcatgaattattattttaataagtattccagaatgaactgagtaggagccctttgatgctttgctgccagccaacccactcctacttgcagggtatgcaaaggaatttccttgaatttcaatcctccatttgagttctttgtgttgatttgatctttgttttgctttgcttttttttttttttttttttttttgagacggaatctcgctctgtcacccaggctggagtgcagtggcacaatctcggctcactgcagcctccgcctcccgggttcaagcaattctcctgcctcagcctcccaagtagttgggattacaggcacatgccaccaagccaggcttagttttgtacttttagtagagacggggtttcaccatgttgaccaggatggtcttgatctcctgaccttgtgatccacctgcctcagcctcccaaagtgctgggattacaggtgtgagccactgtacctggcgatctttgtttttctttacggctcagaagaaacatttgggtaggttataggtcaaagtcaaggctttgtaaagggttttttacattcaggagcctttccccaatttcatttgttcatttttaaataccaattttttttattcatcaaggaatacatggccattgaaaaaaatatgaaaataaaaataagcaaatggaaataaactccccttatcctactatactgtagtctttggtataatttttcagtttctctaagtatctttttattttttaattgagacaggatctcactctgttacccaggctagagtatagtggcaccatcacagctccctgcagccttgacctctgagctcagatgatcctcctacctcagctttccaagtagtggggactataggtgtgtgctgccacacctggctaatttttgtggggtgtttttttttttttttggagagatggggtttcgccatgttgcctaggatggcctcaaactcctgggctcaagcgatgcatccgccacctcggcttcccagagtgctgggattacagacatgagctaccacactggcttagaatcttttgtgatgctgggaattagataatattaatctataagagtttcaaggcctcttcattcactctccactctctacaacctgctgaaggggattgtggttttgattcatcagattctttccttcctcaggcgtataagggaattttttctttcccagaccaattccggggttgtctcagaagacagggcataatccagataaaataaaacagaaagaaagtgcagagaggccaagtagacccaggtaacacagaaccaagagggaggggaagagggcagagagaatagcacatgtgctgggtattggggaaggttggggcactggggtgctatagactggcacaagaggatctggaggatgagcagaaaaccaggatttggattggagaaggaacagcttcgctgtggttcatgaactgaaattccattaatgttgttggcgagatgggacaagtagagatggacttttgtggttggtctgtgccaagcggcggttgtgggttggagagcagctgcttttatgtttttgtatttccttttttatatattcattttatttctgattatgaaataatatactaattatagaaatttctatttcttttttttttggaaacagagtctcactctgtcacccaggctggagtgcagtggcgcaatctcggctcactgcaccctctgcctcccgggttcaagtgattctcctgcctcagcctaccaagtaactgggactacaggtgcctgccaccatacctggctttttttttttttttttttttgagacatagttttgctcttgttgcccaggctggagtgcaatggcaccatctcggctcactacaacctccgcctcccaggttcaagcaattctcctgcctcagcctccgagtagctgagattacaggctcccgccaccgagcccaactaattttttgtatttttagtagagacagggttttaccatgtaggccaggctggtcttgaactcctgacctcaggtgatctgcccgcctcagcctcccaaagtgctgggattacagacatgagccaccatgcccagcccaggcccagctaatttttgtatttttagtagaggtggggtttcaccacgttggccaggctggtctcaaactcctgacttcaaaagatccacccaccttggcccccacaaagtgctgggattacaggcttgagccactgtactcagcctagaaacttctacttctgagctatctaacttatatgataaatctacctaacagacaatgcattatgtattacaattgcttttacccactcaatatataatgtcttcccatattattaaatgcacttcaatgttttaaaaatagctgtgtatacaataccacagctattggtattgttggccatataggtcgtttctgaaagtttttaatcataaataccactaatatcaatactgttacaactcaatctttgcgtttttgtttaattccttagactatattctgaggaggggatttattggcttgaaggatacaagtatttgcaaggattttgaatgaaattagcaacttattattgtagagtttagttttaaattatgtacaactggctgggtgcggtggctcatgcctgtaatagcactttgggaggctgaggggcggggggggtggggggtggatcacatgaggtcaggagttcgagaccagcctggccaacatggtgaaaccccgtctttactaaaaatacaaaaattagctgggcatgttggcgggtgcctgtaatcccagctagtagggaggctgaggcaggagaattgcttgaacccgggaggcagaggttgcagtgagccgagatcgcgccattgtactccagcctggggcaatgagtgaaactccatctcaaaaaaacaaacaaaaaaaaattatatgcaactactcttaccactgtttagctttgtgcatcttaatagaaatttttagctttttcaaagcagtttgacattgattttatcccttaatttcacccattcaggtgtgaaaagcttttactcttaattttaaaatgttcaaaattccttttatgtttcagtaggcagaaacagagctaaaatttaaagggatttttgaaaaagaattgtatttatcctgaatacgaatcccaatatgagcatgagttcttcatctcttccatttcagagaaagtaagctcttggcatcaccctcccttatcctgtcttcccccttccctcatttcaaatcagcaatgttactattcagggcatgaggagaacacactatcgtctgtgtccttcccaagtaaagtcctcattagcctctagggtaaaaagttaagtaactcattgtaccagcccaccacagacgtcttgttaagggttttgtatacacagtggattggggtgggcgactataatgcccaaaactttgtctaaatttcttcttcttattatcattattgagacagagttttgctcttgttgcccaggctggagtgcaatggcgtgatctcagctcactgcaacctccaccttctgagttcaagtgattctcctgcctcagcctcccaagtagctgggattacaggcatgtaccaccacgcccagctaatttttgtatttttagtagagatgaggtgccaccatgttggccaggctggccttgaactcttgacctcaggtgatccacccacctaggcctcccaaagtgctaggattacaggtgtgtgccaccatgcctggcataaatttcttctacataatgtgtttcctccattatcaatagtagtgtaattgctattacatactaaacatttggcttatataagaatgaatctggaactgtgtgcttgaaaatctgcattggtaactcatctcctaatgatactttgggcattttaaaacacttataatgaactctctatgtgaggagtcataaactcaaatgcctccatggggcaggcaggttatgtaagagagcgattcaggccagctattagaaaaacaatgattagactgggcatggtgtggctcatgcctgtaatcctagcactttgggaggccgagctgggcagatcacttgacgccaggagttcaagaccagcctggccaacatggcaaaatcccacctgtactgaaaatacaaaaaattagctgggcgtggtggcatgtacctgtaatcccagttactcgggaggctgaggcacaagaattgcttgaacccaggaggcagaggttgcagtgagccaagattgcgccactgcactccagcctgggtgacagagcaagactctgtctcaaataaaaaaaaaaaaaaaagaaaaacagtgattaatagcacctcactttgggcctatgtgtccatgatgcagtagagagcagtgtggactggagctcaatggagactgtttattctgtctgaatgagaaggcactcaagccagctgttgacatgtgggaaagtgggcctagcactgttattttcttgttccaggagaacaagaaatcccaagttttctggatttttttttaacacatgggtttcaagtaaaagttttttaaaacactgtacaggccaaacaaaaatgtgactgtatactggatctagcccatggaggccattatgtggcctgtattctacattcgtccatcatgagcttctctgaggatttaaataaacctttagagctaagaaaacacaacctactgtgtactagagcccaggatgtaaggaagctaaacatagtaccttcaaaagaagttttagtcttcaaaattgtggacctctaacgagatactttgatgggaactgcctgggtgtgatctcagctccacctttttttttttttttttttttaatgagataaggtctcactctgtcacccagccaggagtgcagtgggggaatcttggctcactggagactcaacctcccaggttcaagtgatcctcccacctcagcctcctgagtagctgggaacacaggtgtgtgccaccacacctggctaattttcatatttttgtagagatgggttttgccatgttgcctgggttggtcttgaacccctgggctcaagtgatcctcccaccttggcctctgaaagtgctgggattataggtgtgaactaccattcctggccttccccaccattttctaacctctgtgccttagcttcttcatttgagaaatgaactaatagtatctcctttataaggttatgagaaatcaaatgagacaatttagataaagtattaaagtattagtaagttctcaataattgtttttactcctctttctccttttgctacttctattgctgaactagtcacccctcattttttcttcctcatatttcaggtttctgagtcccttcaacatgatcctgggaggaatcgtggtggtgctggtgttcacagggtttgtgtgggcagcccacaataaagacgtccttcgccggatgaagaagcgctaccccacgacgttcgttatggtggtcatgttggcgagctatttccttatctccatgtttggaggagtcatggtctttgtgtttggcattacttttcctttgctgtgtaagtgaacttgagttttttcttccatcatcaaaaaaatgtagaagcaattatccaacgggaattccataacccatttcttatatgtgttggcatgtcagcaaaagtgtcagaattttctaaaacagctttctacttgttatccaactagacccagataacacagaactgaggtcaagaactatgaggtcaaggccttatagttcattaattccacaaatatttgttggggcatctgctatgtgtcatacattcttttgttgttgttgagatggggtctactctgtcacccacgctgtggtgttatctcggcttactgcaacctctgcctcctgaatagctgggaccacaggtgcacacccagctaattttttgtgttttgggtagagaccggggttttactatgttgcccaggctgatctcggactcccaagcttgagtgatctagcttccttggactccccaagtgctgggattacaggcgtgagccacttcgcccagctgtgtgccatacattcttatggggacacaacagtaaacagaacaaagacaaatcccaggtcatacagcaggaatgtggcataacctgcactagactccagatttgtctaataagagagtctattctcaatttttaagtgccattcctattgtcctgacacaggaatgaatgtatttattatttggaagtagactatttattctccacttgctcaggagatcataactagtgttaaaagtttggtaagtctataggaataattggctcagaatataggtactaaatactcagattctggtgaagagatctagatattctctaagttttacatgaattatttactaagactccaaacacttgaagcctgaaatagacaagaaataaaatcccagcctaatcagcagaaatctgattaaaattctagtatattaagtgacaggcacatccctttaactttcaataacatttgacatgtgcacttattccactaaatgaaattatttgcttgtttagggctttgttagattaagtccagaatatttatggatacatcccataccctattggataaaatatctgagccaacaaattcacacatttttggaattttcttcaggttttctgtaggtgcttaacgcttagtatttcaatgatactgtttaatcaaacagcttgctaattttaatacctttccacatcagaacctgagacaggccagtgtaacgaaatgtatcagaggtagacagttaagagtcctgatttctattcttagacctgctggaaaccagcatgtgatttggaccagtcatcctatatgggctgtagttcactcatctctaaagtaaggagattagataagtgattcccaaacggataattgtgacaagcattcaggatactttttaaaaatatacatttcccagccacatctttattttgtgggtcaacagtggtacccaaggatgttaggtttttagaaagctcgtcaactatttctaacgggtggtctaggttgagatcctccagatgaatccacatcagggtttttcaaaataagggtccaagatccacctacatcagaatcatctggagtgattattaaaataatgaattctggagccttccctcagttgtaacagtctgaatttggggtgatggagaccaggaatttgcctatttaacaggctctccaggtgatttgaatgtacatggaagttgtaaaaccactggtatagatcatatggagagagggttacctgtttaaaatacagattcccaggcctgtctctttaaggctcaggtggaggaggtccaggaaaggggatagggaatctgtggtaaaataatcaagcaagtttggggaacggtaggctatagaaactctgtaaagcccttagatttttacatctagaattctatacccaacactttgggtaaagcctccgggaggcactttaaaagtggactttactcacgtgctcctgcagggaacaagatacagataatcccgaatcgagcaagagttcttttctggaaagcctcgggtaagttgatttttaagtaggatggaatcccgttgattcactctgaatttcaggacatttaagtagcatctgcaaggtgatgatatcagtgtgtgaaggaaagggtgtggcttccagataatggtccttcctgttgaatacagcattttcctttaatgcagaaaaaaaactatgtatgacttgatggagagctttacataaagtccaaggagccatttgaaagcttgcatcaattcgagaagcagactggactgtggctaactaaggcagtttactaatagtgtgaagagagggagtgtaatattgatatggcaaaagagaattgttgctttggtgttaaccaggtgtcccttctctgcagtgatgtttatccatgcatcgttgagacttcggaacctcaagaacaaactggagaataaaatggaaggaataggtttgaagaggacaccgatgggcattgtcctggatgccctagaacagcaggaagaaggcatcaacagactcactgactatatcagcaaagtgaaggaataaacataacttacctgagctagggttgcagcagaaattgagttgcagcttgcccttgtccagacctatgttctgcttgcgtttttgaaacaggaggtgcacgtaccacccaattatctatggcagcatgcatgtataggccgaactattatcagctctgatgtttcagagagaagacctcagaaaccgaaagaaaaccaccaccctcctattgtgtctgaagtttcacgtgtgtttatgaaatctaatgggaaatggatcacacgatttctttaagggaattaaaaaaaataaaagaattacggcttttacagcaacaatacgattatcttataggaaaaaaaaaatcattgtaaagtatcaagacaatacgagtaaatgaaaaggctgttaaagtagatgacatcatgtgttagcctgttcctaatcccctagaattgtaatgtgtgggatataaattagtttttattattctcttaaaaatcaaagatgatctctatcactttgccacctgtttgatgtgcagtggaaactggttaagccagttgttcatacttcctttacaaatataaagatagctgtttaggatattttgttacatttttgtaaatttttgaaatgctagtaatgtgttttcaccagcaagtatttgttgcaaacttaatgtcattttccttaagatggttacagctatgtaacctgtattattctggacggacttattaaaatacaaacagacaaaaaataaaacaaaacttgagttctatttaccttgcacattttttgttgttacagtgaaaaaaatggtccaagaaaatgtttgccatttttgcattgtttcgtttttaactggaacatttagaaagaaggaaatgaatgtgcattttattaattccttaggggcacaaggaggacaataatagctgatcttttgaaatttgaaaaacgtctttagatgaccaagcaaaaagactttaaaaaatggtaatgaaaatggaatgcagctactgcagctaataaaaaattttagatagcaattgttacaaccatatgcctttatagctagacattagaattatgatagcatgagtttatacattctattatttttcctccctttctcatgtttttataaataggtaataaaaaatgttttgcctgccaattgaatgatttcgtagctgaagtagaaacatttaggtttctgtagcattaaattgtgaagacaactggagtggtacttactgaagaaactctctgtatgtcctagaataagaagcaatgatgtgctgcttctgatttttcttgcattttaaattctcagccaacctacagccatgatctttagcacagtgatatcaccatgacttcacagacatggtctagaatctgtacccttacccacatatgaagaataaaattgattaaaggtttttttggtgagactttatttaatgcacatctgtcttaaatacctgagaaacttggcgacgaccctataaacagtgaagcaaacacttcagctgtttcaaatactgtttagtaaagcttgaatactttattaacttgcagccagaataaaacaattccagtgggatcctatttttaaacctggcacgagttttatatacatgttagcccagttttatatacatgttagcccattccattttctacaaggtgaattctgccgataaaatccaataaatttggagaaactaataaaaaaaaagatacctgtaattactaatggccagtagtcaattctggaagggtaataacagaaaaatgtaacatataaatgttgtaaattatgattacatttaaaaacaagctaaaatctgcaactaagatctttagggttgggtggtagaaaaagcataatgtgaactgcttcacctcttttggcaaaacctgtgtattgaggccataagctatgaaattggatcatcttttcttcttgtatatctaagataaaaaccctcttactgtgcattttgaaattcctgactttaataatactgtggctatacaaacaaatgcataggggctttctagaattttttttttttttttgagatgaggtttcgctcttgttgcccaggctggagtgcaatggtgcaatctcagctcactgcaacctccacctcccatgttcaggtgattctcctgcctcccaagtagctgggattacaggcatgagctaccatgcctggctaattttgtatttttttttttttttttttttttttttagtagaaatggggtttcaccatgttggtcaggctggtcttgaactcctgacctcatgtgattcacccacctcggccgcctacagtgctgggattacaggcatgagccaccgcaccggcctagaatttcaactactaatttacattaagcttttaattatgtttaaagtgcttttcctatcagagtttagcctcttagatgtagtatgtgctagacacttgaagttttgtttgttacagccctttcttagctatcctgctttgtatgcaaggatgttttctagaaatattgaagggtgagaaaacaaaactatcagccattgaaaactatatttaaatttggatacttttgtacatactaaattatcttaaaaaaatagaaacgccatatttctttcccatggcttgtctttccaaataatgtgttgtttttaagtctgtcacaattagacctattctcccctagcctgtttggtttgatacatgccacttatgataacataaaaggagaaagaaggcaggtgccaattatttactcaggtaaagaagagagaaaaggcaccaaagggtttttttttttttttttttttttttttttttttttttttgagatggagtatcactctgtcacccaggctggagtacagtgacgtgatcttgtctcactgcaacctctgcctccccagttcaagcaattctcctgcctcagcctcccgagtagctgggattacaggtgcctgccatcatgcccagctaatttttgtatttttaatagagacggggtttcaccatgttggccaggctggtctcgaactcctgacctctggagatcctccctccctggcctcccatagtgctgggattacaggcatgagccaccgcacctggcccaaagcttgattttctaatttctagggttcacactacttctattattacaaaaatctcaaattctatgcacctagtggctagaatgaataattaaggcctctaggaacttggaagaaggacagattggagttgtctggaaaattttttatggaggacacaggatctgacccgggagttgaagactgggtaggacgttcattaatggagaacaggagggaagtctcttggaaggattaatgcgagcaaaggcacaagggtgtgcacaaggatgtttcatcgagtagagtataaaggatttgtgggaaataagacaggattagtaaattggggccaggcaatggagtgccttaaagaataggataagtagttcaagtttaatccttcctgtaagcaagtttcctttaaaatatgtttgagagtgataaaatcaaattagacttacagagtaaacacatatgagcgtgtgtgtgtgtgtgtgtatttagccaaaaccaaaagcttgtcaataactatattatgtaaaacttcttttctataaaaacagcatgctgtctcccattgtccctctatatatgaaaacttgctgccaggaagttttcatatatgcagggtttactttcccattacttttcctagtgacacttagttttcaccatgttctgtggcttacgtgttctgcccctcacaggtacccctatagaaagaatactccaaaacaccaagggagtcaccaagagagaaagccaggcagggtgggaaactgaaaatctccactgattctgcagagaagctctaaggaacaatccttccatttcaaagcatcagaagggccaggagctcaattcatccttcacatttccataggatgaaacattatttgttccctttaagatactatgtgatgaattaccgcagaagagatggaaggagaaaaaaatgggaatacaatagttaacacttctgttatatttattatttaccagaagaaaacaataataaagcaaatgtttaaaaaattttctttaacttctgcttcgggaaatatgactctaaatttcacctgagtcactcaaattgattgcaagtagaaaatattgcctctaaatattatattttatctccttccaccttcctcttcagcccctacttcttcatggcccaaacattctgccttttacaaatacccttatcagatggtagcattgtttccagttctgccacgtggatcctaaagtattgctgctgacatagtctccatgctgtaatccaagagtcactatttccatttcttgttcttctagatggctctgttgcctcttacgccagttcttttggcagttgcacctgcgatttaagcatttgaggaaacgggggaaattaatcctggaaatttaagagctttgcagcaaaatttacaaaatttacatgccttaaaagatacagaataggtttgaaattctggccaaagcacctccaaaatcaagataaaacaacaatcataaccacagccaccatttattagacatttactaatgccagggactgttccaagagctttgagcacatggcaaagtaacatcatggaaataagagggcgggtgcctaagttggcctgggttcaaagactggcactagcatgtagtagttatgtggtgttgggcatcagttttctcagctgtaaaatgataataacagtatctaattcacaaggctattatacaagtgagtaatccatgttaacactttttttttttttttttttttttttgagatggagtctcagtctatcttccaggctggagtgcagtgacaccatcttggctcactgcaacctccaactcccgggttcaagcgattctcctgcctcagcctcccaagtagcttggattacaggcatgtgccaccaatgcccagctaatttttgtatttttagtagagacagggtttcaccatgttggcctggctggtctcaaactcctggcctcaagtgattcacttgcttcggactctcaaagtgctgagattacaggcatgagcacccggcctaacacttatttttaaaacagtatctcattacatcctacaaaagccttgtagggagagaaatggctcagagaagacaataacttgcctaagatcatacagctaggaagtggcagagcaggatttgaaccaggtctgcctgatttcagtgctcattattatacactgcctgtaaaaatatcactataagaatataaaatatatgttctttttaaaacatgtctttcctctttgaagcacactcctaatctgatggtcagaaatatttaaacatgaaatataagccaggcaagggggcatgcacctgtaatcctggctactcaggagattgagatgggagaatcacttgtggccaggagttcgagaccagcttgaacaacaaagtgagacccatctcaccttgttaggatttttattttattttttttagacaaagtcttactctgtcacccaggctggagtggagtggcatgatcccggctcaagacaacctctgcctcccaggttcaagcgattctcctgcctcagactcccaagtagctgggactacaggtgcatgccaccacgcccagctaatttttgtatttttagtagagacggggtttcaccatgtcggccaggcttgtcgtgaactcctgacctcaggtgctccacccaccttggcctcccagagtgctgggattacaggtgtgagccaccgcacccagccacctgattttcttaaaagagttttataacaaggctgggcagcggctggctgacgcctgtaattccagcactttgggaggccgaggtgggcggttctcctgaggtcaggagttcaagacaagcctggccaacagggtgaaaccctgtctttactaaaaatacaaaaattagctgggcgtggtggcacgtgcctgtaatcccagctactcagggagctgaggcaggagaattgcttgaacccgggaggcagaggttgccttgagctgggatcccaccactgcactccagcctgggcaacagagacaccatctcaaaaaaaaaaaaaaaatatatatatatatatatatatatttaaagcatcccccaagacaaaaaaaaattataaaacaacaacagaagtccaacactgcaaacccacttcatacttctgcctcataggaaaaccttaaggacaaagcaagtttttaaagggtttcaagtgtcattgtatcttaggaaagtaactcatcaactcatccatcatgtatgtaccttccagaggacactgaagatgcccagtgtccccagggcatttgtataacaatgactaggaatgtttctccctgtattgctaatgtccacctgccagtgtgatgaaccattttggtcatctgctctggctcctcttgcagccagttctcagcccacgatctttggctaggaatgtttttccaatattctgcccaccagagaggacctttgatgtgctgctgcctgccagccttcaagccaaggggacttccatggcttctgaccctctacctcccttgtgccaaactttgagaagagaggggtatgactgcaccctgcagggctctcccatggagaacaccagtagttaagagaaaccatgagccaggtatttaaaataactgtaaagctgcaataaatagttaaaacactgtgttctttgtattatggaatggaaaaagaagcattttatataagttattccctgtatttgtttatatatgcatggaagagttccaaaataatattttaaatttaaaaattttttaattatttagagagatgaggatctcactgtcacccaggctggagcgcagtggtgcaatgataactcaaagcagccaggccctcctggactcaagtgatcctcttgccttggcctcccaaagtactggtattacaggtgtgagccaccatgcccagcccagaataatattttaaaaagaaaatgtggcactgacccagaatagtaaacccagacacatatttactttaaagtatgaccaagctggtagttcagatcactggggaaaagaggaatcagtcactaaatgatcactggttaactatttggaaaagaaataatgaaatagccttcttgctttctactgactttaaaaattaaccctttaatctatccataatatcaaatattttttaaaaaccaaaaactataaaagttgcaagaaaaggcaggcacacattttaatcattttcaaagaggccatttctaagcagaatacaaaaggtagaaatcataaaaatagctagatatgatgtcataaaaatgtaaaacttacaaacagaagaaaatcaacttgtgttattggtagggagcctttttcccctttgcttgttagttttcaaagaaagtatgtctagtgtgcttgtgtgtgtgtgtgtgtctagcatcacacagtgcacacatacgcatacactcagaggcttggaggcagagcgggtgggaaagttggtttcagcacaggctatttaatttggtctacctgtattaagttcctgctctggaccaacacctcagtggatgtccaggacagagatgagcaagacctgctttgaagaactcagaatcctgtaaggctcaaagtctttccaccactgtggccagaagggctgtcaacctgaagcagaatgtgggaggtgctataaaagaggtgtggacaaaaaaggtaatggaaatacacaggcagagtacccctgacgtttttttgtaagaagtagcatttgagtcaagccttggaaattggatagattctaacagagatagaagaaaaggtaatttgaggcaaagggtggtacagaggcaagaaagcaaggcccttcagggaagacagcagcagacatggtttaccatagatgtcaccgagtcgtgattgtcaaatgtggtcccagaataagcagcagcagcattaccagggaatttgtcagaaatgcaaatatttaggccccatccaagacctactgaatcagagactctgtcagtggactcagtaatctgtatttagccctttaggtgattttgatccacaataacatttgagaatcactatatggactttagaaaagtgtataaaaaaccttttttcccactacacatcaaaggcaagcaattctggtttatataattcctggattatacgtgctcttgatgagcttgaaatgttacattgcttttttcctatggaggctcccttcattagaattgtaacatttccaaagctatgatctatgtttggctttggcttttatagatcatcctggtttctttattggaggtcctaaaaatgggggaggaggggtcgaaggaagaaaaagaagtagaaggtaaccctggagtttcagacctgaatgcgtgacagaatggagataagacagaaaactgggaaccagaagcaaccactaggcctaaaaatgagcagcttggtttggggacagattgaacgtgctaagaaaaccctgagtgatctaaagggaaagggagatttgggaattgttctagattatgtgacaagagaaagaggagaaaatttcccattatgtgatgagaaagaggagaaaagtacaaaaggagagaatctagagaatctggctaaagagaaagaagacctcataaatgaggcaaagaagaaatggccagtgatgaagatgaatgctgaagggtttgtaaacttcagttctgtaatcataacaacccctaatgtgtcatggagtcttttgatgtactaaggcggcccatgatattattatactgaagtctttctggaggaaaatttagcaatggctttagccaactggatgggagcagtccagatatacatgagtaagcctgaagtgaaattgagtgaatgttaaaatagttatcttgcgtgattggcacagaagcttggatatgatacaaaatgcagctggcctcagggaattagacagttgctgcaaatgggattttatctcagtgaaaagtacaaacactcatttgagatggtaggagtgagcagaccacaagatttttgaagatgaaagaatatcacacatttgtcagggagggataggcctataccagcctaatgtctttgtgttatcatacgactcagctttattaactcatagggaaatgatttagtcattatccaataaattcagtttgttagataagacaaagatttttaaaaacatagctaaaaacaacaagagcataataaaaaaattctacagaagccagataagtcatgtaaatgagtgaagcatgccaggtacaaagcagtaagggcaaaagagaaaaactagagggtccatgagcattctcaaggatgaaaccaatgcatagaaacagctaattttttccatgcaagtgcagtgtggccagatctgatgttccaagtggtgctagatatctggatttttttgcatgtgacattcaaaaacttacacaatgatacccaagctaaataaagtgggcctgctttacctcatgctttaccagatctgacctcatgctttaccagttttcaatacctggcccacggagtaaacttcttttaaactgaattgaatgggtaatttctcagaggaggaagcatttgagcaaagcaagtatatggattttcctttatttttttgccagcaacttcatttcaggtatcccaggccagaagcgtggggtagggagagaataagcattaatttaaaatttttgagacagaatctcgctctgtcgcccaggctggagtgcagtggcaccatcttggctcactgcaaactccacctcccaggttctagtgattctcatacctcagcctcccaagtagctgggattacaggcgagcaccaccacacccgaatatttttgtatttttagtagagatgggttttcaccacgttggccaggttggtctcaaactcctggcctcaagtgatcgacctcccaaagtgctgggatcacaggtgtgagccaccgcacccagcctaaaaaagaattttaaaatacatgtgctctatcaaatacaaaagtaatatttccaaatctataaggaaaataactacttttatttttcacacagggtctcactctgttgcccaggctgtagtgcagtggcacaaacatggctcactgcagccttgacttcctgagctcaagtgatcctcctgcctcagcctcttgtgtagctggtaccacaggtgcatgccatcacaccaggctaacttttaaaaatgttttgtagaaacaggatctcactttgttttgttgctcatgttggtcttgaattcctgggctcaagcaatccttctgccttggcctcccaaactgttgagattacaggtatgaaccaccgctcccagccagtaactacaatttaaaaaaatttttctgtcgagcatggtggctgatgcctgtaatcccgccactttgggaggctgaagcggaaggatcacttgagctcaagaatttgagaccagccagggcaacatagtgagatctcatccctacaaattaaaaaacaaaaaaaaattagccgtgtgtggtgagtgcggtcccagctactcaggagtctgaggtgggaggatcacttgagccctggaggttgaggctgcagtgagccataattgagctactgcactccagcctgggtgatagagtgagatcctgcctcaaacacacacacacacacacacacacacacacacacaaaacttttctaagaaaaaaatttgtttctgaataatgttctctttagtaacatcatacacacacagagaaccccacaaggtttcaaaactgtgttttaattttaacctcgttcttgaaaatccagggatttggagggtatctgtcccaaatccccaaaacccttcatttcacctctatcaagtgaacattgtcttgtctcacttgattggctaaaactatccctttctgctgagattttgtgacattaccatttatagtgtttactgtactttgagtctaagatgtatattttgggacatttcaacagctctgaaatcagaatccatcttaaaatcgatggtgttttacaatagttggctggagacccaagtgtgaacacatcatagctactcatactattattacctccattgagtcatgtgccctgttgatactacacacacagatgtattgcctcttaaaatagcttttaaagaaagataagtaagcaaatgtggtaaagtgagacgggtatgcaagaattctttgtactacttttgaccttctgtaagtctaaaatgacctcaaaacaaaacaaaaaaattaaaatatcttttaaaagattatactatgttttggctttaaagcagaaatttatagtacatgcagaaaggcacagaaacagagtgctgggaagcaatctgatattagtgaagcaaattttcattagtgcaaggaggcattttcatatttttcttgccgagtgttttccaggaccgaatagatgaa

SEQ ID NO: 333 - DNA, 1606 bp, Homo sapiens
cggagccgctgtcaactctccaactcagctcagctgatcggttgccgccgccgccgccgccagattctggaggcgaagaacgcaaagctgagaacatggacgttaatatcgccccactccgcgcctgggacgatttcttcccgggttccgatcgctttgcccggccggacttcagggacatttccaaatggaacaaccgcgtagtgagcaacctgctctattaccagaccaactacctggtggtggctgccatgatgatttccattgtggggtttctgagtcccttcaacatgatcctgggaggaatcgtggtggtgctggtgttcacagggtttgtgtgggcagcccacaataaagacgtccttcgccggatgaagaagcgctaccccacgacgttcgttatggtggtcatgttggcgagctatttccttatctccatgtttggaggagtcatggtctttgtgtttggcattacttttcctttgctgttgatgtttatccatgcatcgttgagacttcggaacctcaagaacaaactggagaataaaatggaaggaataggtttgaagaggacaccgatgggcattgtcctggatgccctagaacagcaggaagaaggcatcaacagactcactgactatatcagcaaagtgaaggaataaacataatttttattattctcttaaaaatcaaagatgatctctatcactttgccacctgtttgatgtgcagtggaaactggttaagccagttgttcatacttcctttacaaatataaagatagctgtttaggatattttgttacatttttgtaaatttttgaaatgctagtaatgtgttttcaccagcaagtatttgttgcaaacttaatgtcattttccttaagatggttacagctatgtaacctgtattattctggacggacttattaaaatacaaacagacaaaaaataaaacaaaacttgagttctatttaccttgcacattttttgttgttacagtgaaaaaaatggtccaagaaaatgtttgccatttttgcattgtttcgtttttaactggaacatttagaaagaaggaaatgaatgtgcattttattaattccttaggggcacaaggaggacaataatagctgatcttttgaaatttgaaaaacgtctttagatgaccaagcaaaaagactttaaaaaatggtaatgaaaatggaatgcagctactgcagctaataaaaaattttagatagcaattgttacaaccatatgcctttatagctagacattagaattatgatagcatgagtttatacattctattatttttcctccctttctcatgtttttataaataggtaataaaaaatgtttctgtagcattaaattgtgaagacaactggagtggtacttactgaagaaactctctgtatgtcctagaataagaagcaatgatgtgctgcttctgatttttcttgcattttaaattctcagccaacctacagccatgatctttagcacagtgatatcaccatgacttcacagacatggtctagaatctgtacccttacccacatatgaagaataaaattgattaaaggtttttttggtgagacttt

SEQ ID NO: 334 - protein, 188 aa, Homo sapiens
MDVNIAPLRAWDDFFPGSDRFARPDFRDISKWNNRVVSNLLYYQTNYLVVAAMMISIVGFLSPFNMILGGIVVVLVFTGFVWAAHNKDVLRRMKKRYPTTFVMVVMLASYFLISMFGGVMVFVFGITFPLLLMFIHASLRLRNLKNKLENKMEGIGLKRTPMGIVLDALEQQEEGINRLTDYISKVKE

SEQ ID NO: 335 - DNA, 2314 bp, Homo sapiens
cggagccgctgtcaactctccaactcagctcagctgatcggttgccgccgccgccgccgccagattctggaggcgaagaacgcaaagctgagaacatggacgttaatatcgccccactccgcgcctgggacgatttcttcccgggttccgatcgctttgcccggccggacttcagggacatttccaaatggaacaaccgcgtagtgagcaacctgctctattaccagaccaactacctggtggtggctgccatgatgatttccattgtggggtttctgagtcccttcaacatgatcctgggaggaatcgtggtggtgctggtgttcacagggtttgtgtgggcagcccacaataaagacgtccttcgccggatgaagaagcgctaccccacgacgttcgttatggtggtcatgttggcgagctatttccttatctccatgtttggaggagtcatggtctttgtgtttggcattacttttcctttgctgttgatgtttatccatgcatcgttgagacttcggaacctcaagaacaaactggagaataaaatggaaggaataggtttgaagaggacaccgatgggcattgtcctggatgccctagaacagcaggaagaaggcatcaacagactcactgactatatcagcaaagtgaaggaataaacataacttacctgagctagggttgcagcagaaattgagttgcagcttgcccttgtccagacctatgttctgcttgcgtttttgaaacaggaggtgcacgtaccacccaattatctatggcagcatgcatgtataggccgaactattatcagctctgatgtttcagagagaagacctcagaaaccgaaagaaaaccaccaccctcctattgtgtctgaagtttcacgtgtgtttatgaaatctaatgggaaatggatcacacgatttctttaagggaattaaaaaaaataaaagaattacggcttttacagcaacaatacgattatcttataggaaaaaaaaaatcattgtaaagtatcaagacaatacgagtaaatgaaaaggctgttaaagtagatgacatcatgtgttagcctgttcctaatcccctagaattgtaatgtgtgggatataaattagtttttattattctcttaaaaatcaaagatgatctctatcactttgccacctgtttgatgtgcagtggaaactggttaagccagttgttcatacttcctttacaaatataaagatagctgtttaggatattttgttacatttttgtaaatttttgaaatgctagtaatgtgttttcaccagcaagtatttgttgcaaacttaatgtcattttccttaagatggttacagctatgtaacctgtattattctggacggacttattaaaatacaaacagacaaaaaataaaacaaaacttgagttctatttaccttgcacattttttgttgttacagtgaaaaaaatggtccaagaaaatgtttgccatttttgcattgtttcgtttttaactggaacatttagaaagaaggaaatgaatgtgcattttattaattccttaggggcacaaggaggacaataatagctgatcttttgaaatttgaaaaacgtctttagatgaccaagcaaaaagactttaaaaaatggtaatgaaaatggaatgcagctactgcagctaataaaaaattttagatagcaattgttacaaccatatgcctttatagctagacattagaattatgatagcatgagtttatacattctattatttttcctccctttctcatgtttttataaataggtaataaaaaatgttttgcctgccaattgaatgatttcgtagctgaagtagaaacatttaggtttctgtagcattaaattgtgaagacaactggagtggtacttactgaagaaactctctgtatgtcctagaataagaagcaatgatgtgctgcttctgatttttcttgcattttaaattctcagccaacctacagccatgatctttagcacagtgatatcaccatgacttcacagacatggtctagaatctgtacccttacccacatatgaagaataaaattgattaaaggtttttttggtgagactttatttaatgcacatctgtcttaaatacctgagaaacttggcgacgaccctataaacagtgaagcaaacacttcagctgtttcaaatactgtttagtaaagcttgaatactttattaacttgcagccagaataaaacaattccagtgggatcctatttttaaacctggcacgagttttatatacatgttagcccagttttatatacat

SEQ ID NO: 336 - protein, 188 aa, Homo sapiens; identical to SEQ ID NO: 334

SEQ ID NO: 337 - DNA, 71122 bp, Mus musculus
  misc_feature (1)...(71122): n = A, C, G or T/U
ttggagctttgggaaactcatgcgcggttcattgcgcatgtgcgttgctaagggtagcgcaggtagctgaagtggtttgtggagagaagcctgttgctgccgaggctgggaggaggggcccgaagcgtgagggaaacggcgatgagggccgtgttgacgtggagagacaaagcggagcagtggtgaggagcgggaacttcggggatggcggggaggcggcaggaaccggcgcattgccatggcaacgggcctgcggcctggaccgaggactctgattccgtgccttcaacttcccaatggaagagaagctgagattcctggaggggcatagggatcatctgagggaggctggagcagtttatacgtcatcatcatccaatttcacttctctcttctcaaaattcctcacccaccagtgttttctcagcttcctaaccatcctcaaagtgcccacacttttgtttatctgacattctttaaatttctcctgtttttgttggtttgtttttgagatagagcctcactttaaagctctggttggtctggaatgcactatgttgaccaagctggcgttgaactcacaaagatacatatgcttctagctccccagtgccgggattaaaaattttcgagcaggaacaaacaaaacggtgtgagtaacttgcatctcggttctgagcatttccacctgagctgagatctactgtgtctgaaacaggacatttccatgtacggtcagagaaacatgtaagatgcgatcaagtcaagacatctcttgattgggaagtttgaggagtattttcaaaattagtacttaagagtgagcttaatttaaagcttaattttaaatactgaggattaaggcttagtatttaagagcactttggataagttccaggacagtcaagtctacacatagaaaccctgtctttaaaaacaaaaacaaacgaacaaaaaagaaaaagaaaaaaatatatagtaaaaaaaaatattgggctggagagatggctcagaggttgagagaactgtctgctcttcaagcggttctgagttcaagtctcagcaaccacatgatggctcacaaccatctataatgacatctggtgccctcttctggccagcaggtgtatatgcaggaagaatgctgtatacatgataaataaatctttaaaaaaaaatcaaaaagtgttttaaaaagagagaatgacaatagaatgactctgtcatcttaattaatttggtatgatttgatatcctattctattttgtcattaaaatccaccagccaggaacacatttcaggaaattctggcttgactaattctcagcttgactcagagtcttcttagatggtctggtctgttccccaccactgtctgtcctgagacttttccttgtgagacctttcctgagatcctgaacgtccctcaaggctggctttggaggaacttgcacaaagagcagctagtgctgacatgattccaacactagctaagaccttgtgccctttacctcagtgtctcttcacagcagctctaggtaggtactgtcattatctccactttacagatgagaaaactgacttatagagagggcagataggtacacatatctgggtgtgatggagccagcttgcaagctcaggccaccctgtttcaaagccagttctcccaggctctgatttcagttaggtgagtcacgtgaatgggtggcccttacttgtattaaatagaagggatttctgttacttgcgggacatttttgtacaccctgctacttggaacgcatcaccttgccagcgcctttcattttcataaacacctttgaggaggttagcagtagggtgctcagcagttgaaggaatctgctgccaaggataatgatctgagttcgatccctagggctcacatggtgaaaggagaggaccaagttgccctttgacctccaaaagtgctccatggtacacatgcctcaataaatagctcagcacttaaagaaggctttgataatacttttttgagacagggtcccatgtagcccagctggccttaggcttctagttctcctgcctcatcttcagcagtgctgaggtaataacagagtttattacttgtctcttcactctagtataagattacccacagccaggggtggtggtccatgcatgtctttaatcccagcactcaggaggcagaggaagttggagctctttaagtttgaggccagcctggtctacatagtgagttccagcatagccagggctacacagtgagacaatcaaacaaacaaaaaggagcaccggtgcacaaggtggcagtcactggcaaccaagcattggcttccatgtcagagcaatagggagtaacaagggctgtggcaaactggaaggctcccactctgcatgaaaggggcagctgctgctctgctcctgccaattatcatgggtagaaatttggcctagtgtgtgcagatcttcctatttttaccagaagctaggaatctgcgtttgaagtgtgaaatgtcctgattttttaaatgttggcacctaattagaaaaaaaaaaaaaaaaaacaaagtaaaacaccatgtgagccaagcaaaacatttgctggtcaaatgcagcctgctctgctctgttctcaacccctggcacagaattttgttcgttctgctcttgtgcttaagagtctgttgggtgtaagagttattttttaatctgtttatcccagaagtcttttaaccttgtaaaagcaatggctgtattttgtttccaaatgtttctggagccttttagtatttagtgagtagatgtgtgtgtgttcatggaggaataagtgaatgaaagaccagtaaggactggctacctgcttttagggctgttacagatttgaagcagtctattagagcaggaggtgcagagattctgtaggccagcagcctgatgatggctacatatgccagctgacgtaatggaaggaaacagaacaaaactcacacctagatagaatccagccatcccagatgccctgactagccccgccccgactcagtcacaggctcctgctctgtgcttgtgcttctggtctgttcttcatccagcaaaagaactcactcaggtcctgatactgtgcttctgttgctctgctcctcataaacccagagtgaccccttccatgtcttttgctgggtggtcccctggcgttcttgcctctaggcttgctaacatttagattatgccttggagcttagccaaaaactccattttcctacccaaagatccttcttaacttattctttccatctcctctctccctcttacttcccctccccctcttttgttctttctttgtgtgtgtggaatgtgcatgcatgtatgtatgcagatgaacttgactgtgcatgggcatgggtaggtcagaggttggcattggtatcttcctctatttctgtccaccttattttattacttattttttatgttatgtaggtaggtgttctgcctgcatgtatgctgggcaccacctgagtgcctggtatcagcagatgccaaaagaggcaatcagatcccctgaaactggagttacagacagttgtgagccaccatgtaggagctgggagcccataccctctacgagagtaaagagtactcttaaatcttatttttttgagataagggttcaacggtgaatttgaattcaccatttaagctaaactggttagccatcaagcccctgggacctgcctgtttgcccatcttagtctctggggttacaggtttgacttgttggctcaggctttacttggaatactggggatctaaactcaggtcttcatgcttgcttgcagagcaagcactttacccagtgagctatctcctgacctctaaatgctttctctcttaattttttctttctgaacttttatctttcttccttccttcaatatgctgctctaggttcatctcaaccacagtgccttagtaggctagcccaccttattccaggcaggctagcccaccttattccaggcaggctagctagaattgagagatattgtgattgattgaggaagctaggggtgtggctcagtggcagagagcttgcccagcatgtgtgaggcccagaattcttagcaccacattaaaaatttaatgaagtgatataatttgtctgagattgcaaatccctgctactcaggaggctaagactaggagaacttcagcctaggagagagctcgtctcaaaaaaagtagagggaagtcttgggtctcaatatgggattgtcgggggaagacaagaaagagtaagcagggtagcatgtatgccttgtagtggctttcaagggcaccttgggatttcagtatgcagaggatttcagttggcagggctcacctctcatctctcagcagtgaaatctgagcatgcagtttttctttttcataaaagaggacaagttgggaaagagcctgccatggtagcacagactgacggagggcagtaagtctccagccctagagtatgctggctgaggctagatggtcatgtggagagagcatttgccctgggtggaatgtgcgagtccatgataaagtctgcatccttactaatttgggggggtctgtgatgttgtaatattattaaaacccaggagtggggtttaaacataaaatcctggcaagttgccagttatgatcagtgtgtcaggcccctggtctaacatataacataaaacttggttattgccttcaggttgaagacaagtgtattaaggaggcatgttatgaaacagtcgaatacagaaggctaggtgcttgagagtgagactgagttgtttagattctaagtacagcaagaggtgacttgggcatcagactgtttgctgctcttctttttggagctccaagtttggttcccagcacccatgttggacattgcataatcacaagttagatatgtatgttgtaagtacttcaggacatccagaatgtgaactttaacatctgggaagattgttcaggcttagcccaaataaagtaacaaacatggagatgacttagtaggtaaaggtccttcctaccaagacagacaacctgagtttgatccctgggaccaacagtactccggaaagaaccaacccctgctagttgttctctatcacacatgcacccagcatgcctttgcctcctaaagtaactcctgcctatcatcccagcagttgagtggtggaggcagggggttcaaggtcatcctcagctacatcaacggagaggctgggaccagaccagactgttacacatgcatgagactgtgtaaaaaacaacaacagcaaaatgccaggtgaagtggtttacatctgtaatttcagcatttgggaggagtaccataagttcaaggccaacctagtttacaaaagagtcctagattagcctgggccagagtaagagctggccccaacagatataagtagaactaactcagtaactgtcaactcttggagaagaggtccaagaatcattatgactgatccagatgtgtacaggcaagaagcttccataccaaggactagatgaagggtgcaaagccattccgagctaatgcctcagcatgaagattcacagatgccaggcactttacacaaggctagcccatgacccctggctttaggaggcagctctctaccttgttttatagtaagggtgaaattcagataggtcagctttcctggccccagctcccctctaccttttagcctatcacttgctgttttgaatgtgaaacatgtcaaggaagcccaggtctattaccacaaaacagtgaagaaggacagtgcagaacttgggcaggatttgatacagaaagtggtatgctgagctggaaagccagagaggcgacctttgttcagcttctgtcagccaggctgtgtaccctttcctttcctcagtgggcccgccccctctactccattatgccgagggaggtatgtgcacgtgggttagcatacactttccctgtcacagctctcaactgtttgcaagtgtgaagagtttttattcaaggaaccttctaggagtctttgctgcctctccacatgaccaacatacaaagacacaggaagtaaataacatagtactaaaactacagaaaggaggatgggggaagggaggtggcgaccagagggcactgggcttcagttaaagtggaggaatatatttcagcagcctcatgagggccacagttatatatttcaaaatggctaatggatagatttttaatatttcattgcagtaaatgatgtctatgaggtgataaacaagttaattagcttcctgcaatatatatttatatattatataagcatcatgttgtaccccagaaatatacacaattattatttttcagttactttccaaattctacatggaatgccttgagtattcatgtagataatgatagaaatgataaaaaatgataatactttttttttggtggtggtggttctgagaaggcaagaaagccattatgaattacttcatcaaccgtgacatataccagtagcaataaggagggctacacagcctgagggttgacacgtgggctttggggccaggctgctgggacctggcatcacctcttttctgcagcagtttacttccaggcaagttgtttaactttgcagttttcttatctgcaagataggcttagagttgtgaggttgagagaatttagacaatagagcatttacactgtatcctgtacgcagtaacaaatgtactcaataaatgtcagccactggaaaagcattcgagaaaaacattcgacatacctggcaataatccaagcgagtagaggcagtgcagtagggtggttaggatcccaggcttctgaggtccttctgtttgctgggtgtgtgaggcttcgtcccagcctgaaccatgctactgtctataaagcagagcccactttgtcctttcatgaccatggtggagttgtttcagaaaccccaaagacaccaaactgacagatgttgaagtcctctgttttagacagcatacgacagtatagagacttgcagagagcctagacttgctgctgtgctataaatcacctcaggatagcattgcagagctgcagaaatcactttcatactctgcggttacagaattatgataagaggaaagtgcgtgtgctcactacagacatggctttcccttgagtgtgcatgagtgcatgcttgtgtacatgcatatatgtatgtgtacatacatatgtgagtgtgtgtatatatatacacccacagggtctgattgtgtagctctggctggcctggagctcactatgtagaccaggttgtccttgaaatcacagagatctgcctttgcctcctgagtgctagaattttttttaagatttatttatttattttatgtatatgagtacactgtagctgtatagttgtgagccttcatgtgattgttgagaattgaatttaggacctctgctcattccagttggccctgctcgctctagtcaattccacttgctcagtccctgatcactctggcccaaagatttatttattattatacgtaagtacactgtagctgacttcagatgcatcagaagagggtgtcagatctcattatgggtggttgtgagcgatcatgtggttgctgggatttgaactcaggacattcggaagagcagtcagtgctcttacccactcagccatcttgcaagccctagtgctgggatttttaaaaaaaatatttaaaatttaaaagatatttttgatcaacagttatttgaattcatagatgtagagtccactgaacagagggttgactttaattgtccttgcctgttaggtttattgtgaagatgaaataaaattgtgtttgaagaactaagggctattatagtatgaaaagtgtgtgttttcagagtattgacaagtccatgtggtttattccagccatattttcacagtggacacgtactgccttgtcactattctctttaatagtgactcttctggctgggacatccaagaatcccagtgatgttggtttgagagcccccacaccaccaccttggacatagtctgagggttcagtctagtttcagtatttacattctttgctgtctccaccaccaccaccactactactacttcttcttcttctccttttttaaaagattttatttattatatatgtaagtacactgtagttgtcttcagacactccagaagagggagtcagatctcattacggatggttgtgagccaccatgtggttgctaggaattgaactcaggaccttcagaagagcagtcagtgctcttaacctctgagccatctgtctctccttcttgattccttttcctaagagctgtgcctgccactcttctgcacgcctgggagttgcccctcattcctatactgtgttgttcttcatggagcctctccccttccccaggtcggaatgcaggccttccttgaactgagcaaagcagccccgttcccgtgcagctccctcagcagtctcacagcattcctcctcatgtcacccacactcagagggccttggtcataaagactgttacacgcacatcagtgtgagagcaagcaggcaagcaagcaagcaaacaaaacacagccgtccttcactgacatgtagaagaacatcaaaaactcaagagagattaaaaggggaaaaggatattccttaaacttggtgccatgggagtccttggccaatgtgtctgctttatagtttcccactcaagtggaaattcctagaggcagagactctgccagcccacgcccctaccgtatctgttggtgcctcacacctaacaggtacttggtaaatatctgtgcagcggtcctgcctttctatggcatgagtggaagagcccgtgccctcagctgctgaccctttgaatcatttctggcttctggaggaaaggaaaccagggctgagctgactgctgagcagatcatgattgaatggcctgccaaggtgtggtggttgagtggaatttgcaaccagagacaatttttagccattattttttccccagcacacacatagcatttcataatggaaataaagtttgctttcttggccattagcagacctcatcatttcggttcctaattgtctttttgtcttgtctcctgttagtatctacgacctcgcatttaagcctgatggaacacaactgattctggctgcaggaaacagattgctggtaggattttgtctgcgtttccattctgagtgcttttttcctccctccctccctcttgtaagtactctgagatttgacccctttttttgagataaaaaaggcaagggcggaaaaaccagccattactttttaataaggaaggaaatggtctatttaaaataggtaagtaaactgtctatcagataggaacccatgagcaatgcctcctttggagtcatttgtctttcccctttgagacactcatgaaatggttgcagacaattaatcaaaatgcctctgaaactgagtgggtgtcagttcatattttgttggaccaatgtgaattaacaaggctagaaaccatgagaagtcaaaagggctgacctccacttctgggctctgttgcccctaaacaattccatatgaatgctgtcctattcatagtttcaaaggccacaggcgccctctggatcttgtcttagtacataagagtaatcttcagagacacctttctgattgacccaaaacctctgtgatagctcttcctcctctaagacatggtcctcccctctgctgtgtctagatacgcagactgactgatgtccatgttctctgtactaactgcttagtcttacagctgtagttgggctgttctgcagacttctccccagggtaaacaacttcgatcctttcactccctgtcctggtttccttctccaggcttctgcctgtgtgggagagctctgtcctcatttctcaaatgctgtgttttttacatctccacatatttggccatgttgcacaactataaactattctaaatgcacattgcagctgggttttataacactccctcccacttgcaaaccccacgtttgttagatctgtgactttcaggccgtggtagcaagtatgacgcatttgtgtgtgctgacactggtggcagtgttgtccctgacagttgtccgccagctctttgtagttgctgactttgttaaagagggcctgccttgatgggtcattcattcaagcccatgtaagaatgagtgaaatgtaccagggcctggtcgtgcaggctgataatctcagctacttgagaggtggaggcaggaagatcaaaggttcaaggccagcctgggctgcagaaggacttcagagccagcctgagcaacttagtcaaacactgtttcaaaataaaaactaaaagagaaggctgggaacatagctcagaagtcgagggcttgtctggcattgtacagtgccccagattcagtttccagtcctgggtggggaggcaaggaggtgggaaaaatgggtgacgcttgcagaacttcccctagagtgagactcagtgtagctgctgcttctccagtattgatggtatgctcctggccacacacaacataagctggacctccacttcctgcttgccctgcattaagtcatagtcattcttgttatgcagtgctgtctctacttgatactaatttagcaaatcaacaactgctgtgttataaaaacaaaaatagcagcagtggcaccctgcaggaattctgaataatggatgtcacagagataatcgatatttttaccccttttgacaggtttatgacacctctgatggcaccttacttcagcccctgaagggacacaaagacaccgtgtactgtgtggcgtatgcaaaggatggtaagaggctgctctgggttctgatctctgatggccttgtagctgctcagctttccttaggaactctgtgatcatctttaaaatagaacctgcatgttcagaggatacgaaatagcttagactttagctagtcacgggaacaaatctctttgtttcttgtggttctagggactaagcccagggccttgggcacagcagataaatgtactgtcactgagttacaactctagtcctcaggtgtctgtgtgtcaggcactgccttaagtgcttggttatctcagagaacaaaatgagagaaggccttgttgggaagctcgatgagggagggagggagggagcaggcaataggtaagatgaagacagtcactcagataaccaagcactgggctgataggcaggcagatgaacagaattgggagtgctgggcaggacaggtctggtgcattatccagtctgattgtgagatgggcccgttcagatggggcagctgaacaaagacttgctggcctgagagagaggtttttggcatcagacatttgggaaaagagagcttctcaaagatggaggagccgttgtagaaaccctggggtgggagccagagcagaaagaactggggagcagagggagaggagacagaaagacaggtctggggcgaccgatggtgttaacatcgtcagaacagtggttctgacccgcagtgaaaagagtgcactgctggtgggtgtgagcagagcggggctcatctgggtcctatttttatttgccttgggaacagcttaccaaagatgaaggggttcaggaagctaagtgacaagcatctttcatgacatggatgacagtggccaaaagaaatggcaagaagcagtcatgttctgggtgtgctttgagtatggagcagacgggatttcctggtagtttggatgtgggcgtaaacattgcaggcagccccaacttttgacctgaaggactgaatgatggcgttaccctccactgatgtgggtggtgttgccagtggggcagttgcagtggaagatccaaagttcaggtgtgcacatttctgctttggaaggttaatataggaaagagggcagaaaattgctgcagtgcattgagtggcaaggctgtgggacctaggacacagtagggctctgcttcagaaaggagcagtggcaggcggggcctgtgaaggcagatctaaaggaccttctcgatgcttcttttttttttttgtttttttttttttgtttttttgttttttctttgtttttttcgagacagggtttctctgtatagccctggctgtccttgagctcactttgtagaccaggctggcctcgaactcagaaatccgcctgcctctgcctcccgagtgctgggattaaaggcgtgcgccaccacgcccggttctcgatgcttcttacttggctttagtgtaatgagaagctgccggcactgagagtgacgactgagaaggaagtgcttgagagttggagagaaagggaaaaaatggcagcctcagagagcaggagaatgaatggacttgggggtgcagtgagacctccagggaccagacgatgcacttaaagccggtggtcgggaattataggagacatcattttatggcttgttttctccagccactctgagctgcatggtgggaggagaagaggtgggctcagtccgaggagcagttttacaggcaaggtaaagtgagagcagagcagagaggatgcacagccataagctgtgccataagcgacctcagaatgagtggagatgggctgtaagggaagagggccagtagagaggaggtggtccgagaactgctgtgtgaaattgagattgtgacataaattcatgtgcactgggaacgtagctgagtgataagaatacttgcctagcattctcatgctcaaggccctgagttccttccacagcgctgcaataattgaaacaaaatgaagaaaaacagatggtaggtaggtaggttggtatatagacagacagacagacagatggaagttctaaccttagcccaacccaaaagctgtctttcttttgttagtttattggaacagtctccagtttattggagatgactcaccagagtgagaagtgtgccatgattctgattgatccctgctaaccacagggtggaagagaacctactcttgcaagttgtcctttaacctccaaatannnnnnnnnnnnnnnnnnnnnnnnnnnnnnnnnnnnnnnnnnnnnnnnnnnnnnnnnnnnnnnnnnnnnnnnnnnnnnnnnnnnnnnnnnnnnnnnnnnnnnnnnnnnnnnnnnnnnnnnnnnnnnnnnnnnnnnnnnnnnnnnnnnnnnnnnnnnnnnnnnnnnnnnnnnnnnnnnnnnnnnnnnnnnnnnnnnnnnnnnnnnnnnnnnnnnnnnnnnnnnnnnnnnnnnnnnnnnnnnnnnnnnnnnnnnnnnnnnnnnnnnnnnnnnnnnnnnnnnnnnnnnnnnnnnnnnnnnnnnnnnnnnnnnnnnnnnnnnnnnnnnnnnnnnnnnnnnnnnnnnnnnnnnnnnnnnnnnnnnnnnnnnnnnnnnnnnnnnnnnnnnnnnnnnnnnnnnnnnnnnnnnnnnnnnnnnnnnnnnnnnnnnnnnnnnnnnnnnnnnnnnnnnnnnnnnnnnnnnnnnnnnnnnnnnnnnnnnnnnnnnnnnnnnnnnnnnnnnnnnnnnnnnnnnnnnnnnnnnnnnnnnnnnnnnnnnnnnnnnnnnnnnnnnnnnnnnnnnnnnnnnnnnnnnnnnnnnnnnnnnnnnnnnnnnnnnnnnnnnnnnnnnnnnnnnnnnnnnnnnnnnnnnnnnnnnnnnnnnnnnnnnnnnnnnnnnnnnnnnnnnnnnnnnnnnnnnnnnnnnnnnnnnnnnnnnnnnnnnnnnnnnnnnnnnnnnnnnnnnnnnnnnnnnnnnnnnnnnnnnnnnnnnnnnnnnnnnnnnnnnnnnnnnnnnnnnnnnnnnnnnnnnnnnnnnnnnnnnnnnnnnnnnnnnnnnnnnnnnnnnnnnnnnnnnnnnnnnnnnnnnnnnnnnnnnnnnnnnnnnnnnnnnnnnnnnnnnnnnnnnnnnnnnnnnnnnnnnnnnnnnnnnnnnnnnnnnnnnnnnnnnnnnnnnnnnnnnnnnnnnnnnnnnnnnnnnnnnnnnnnnnnnnnnnnnnnnnnnnnnnnnnnnnnnnnnnnnnnnnnnnnnnnnnnnnnnnnnnnnnnnnnnnnnnnnnnnnnnnnnnnnnnnnnnnnnnnnnnnnnnnnnnnnnnnnnnnnnnnnnnnnnnnnnnnnnnnnnnnnnnnnnnnnnnnnnnnnnnnnnnnnnnnnnnnnnnnnnnnnnnnnnnnnnnnnnnnnnnnnnnnnnnnnnnnnnnnnnnnnnnnnnnnnnnnnnnnnnnnnnnnnnnnnnnnnnnnnnnnnnnnnnnnnnnnnnnnnnnnnnnnnnnnnnnnnnnnnnnnnnnnnnnnnnnnnnnnnnnnnnnnnnnnnnnnnnnnnnnnnnnnnnnnnnnnnnnnnnnnnnnnnnnnnnnnnnnnnnnnnnnnnnnnnnnnnnnnnnnnnnnnnnnnnnnnnnnnnnnnnnnnnnnnnnnnnnnnnnnnnnnnnnnnnnnnnnnnnnnnnnnnnnnnnnnnnnnnnnnnnnnnnnnnnnnnnnnnnnnnnnnnnnnnnnnnnnnnnnnnnnnnnnnnnnnnnnnnnnnnnnnnnnnnnnnnnnnnnnnnnnnnnnnnnnnnnnnnnnnnnnnnnnnnnnnnnnnnnnnnnnnnnnnnnnnnnnnnnnnnnnnnnnnnnnnnnnnnnnnnnnnnnnnnnnnnnnnnnnnnnnnnnnnnnnnnnnnnnnnnnnnnnnnnnnnnnnnnnnnnnnnnnnnnnnnnnnnnnnnnnnnnnnnnnnnnnnnnnnnnnnnnnnnnnnnnnnnnnnnnnnnnnnnnnnnnnnnnnnnnnnnnnnnnnnnnnnnnnnnnnnnnnnnnnnnnnnnnnnnnnnnnnnnnnnnnnnnnnnnnnnnnnnnnnnnnnnnnnnnnnnnnnnnnnnnnnnnnnnnnnnnnnnnnnnnnnnnnnnnnnnnnnnnnnnnnnnnnnnnnnnnnnnnnnnnnnnnnnnnnnnnnnnnnnnnnnnnnnnnnnnnnnnnnnnnnnnnnnnnnnnnnnnnnnnnnnnnnnnnnnnnnnnnnnnnnnnnnnnnnnnnnnnnnnnnnnnnnnnnnnnnnnnnnnnnnnnnnnnnnnnnnnnnnnnnnnnnnnnnnnnnnnnnnnnnnnnnnnnnnnnnnnnnnnnnnnnnnnnnnnnnnnnnnnnnnnnnnnnnnnnnnnnnnnnnnnnnnnnnnnnnnnnnnnnnnnnnnnnnnnnnnnnnnnnnnnnnnnnnnnnnnnnnnnnnnnnnnnnnnnnnnnnnnnnnnnnnnnnnnnnnnnnnnnnnnnnnnnnnnnnnnnnnnnnnnnnnnnnnnnnnnnnnnnnnnnnnnnnnnnnnnnnnnnnnnnnnnnnnnnnnnnnnnnnnnnnnnnnnnnnnnnnnnnnnnnnnnnnnnnnnnnnnnnnnnnnnnnnnnnnnnnnnnnnnnnnnnnnnnnnnnnnnnnnnnnnnnnnnnnnnnnnnnnnnnnnnnnnnnnnnnnnnnnnnnnnnnnnnnnnnnnnnnnnnnnnnnnnnnnnnnnnnnnnnnnnnnnnnnnnnnnnnnnnnnnnnnnnnnnnnnnnnnnnnnnnnnnnnnnnnnnnnnnnnnnnnnnnnnnnnnnnnnnnnnnnnnnnnnnnnnnnnnnnnnnnnnnnnnnnnnnnnnnnnnnnnnnnnnnnnnnnnnnnnnnnnnnnnnnnnnnnnnnnnnnnnnnnnnnnnnnnnnnnnnnnnnnnnnnnnnnnnnnnnnnnnnnnnnnnnnnnnnnnnnnnnnnnnnnnnnnnnnnnnnnnnnnnnnnnnnnnnnnnnnnnnnnnnnnnnnnnnnnnnnnnnnnnnnnnnnnnnnnnnnnnnnnnnnnnnnnnnnnnnnnnnnnnnnnnnnnnnnnnnnnnnnnnnnnnnnnnnnnnnnnnnnnnnnnnnnnnnnnnnnnnnnnnnnnnnnnnnnnnnnnnnnnnnnnnnnnnnnnnnnnnnnnnnnnnnnnnnnnnnnnnnnnnnnnnnnnnnnnnnnnnnnnnnnnnnnnnnnnnnnnnnnnnnnnnnnnnnnnnnnnnnnnnnnnnnnnnnnnnnnnnnnnnnnnnnnnnnnnnnnnnnnnnnnnnnnnnnnnnnnnnnnnnnnnnnnnnnnnnnnnnnnnnnnnnnnnnnnnnnnnnnnnnnnnnnnnnnnnnnnnnnnnnnnnnnnnnnnnnnnnnnnnnnnnnnnnnnnnnnnnnnnnnnnnnnacacacaccacacaaacacaggggtagataaataatacaactgtaaagttaaaaaataacgaggagctggagaagtgccacagcagtcaaaagcactgcctgtccttctggaggtcaggttcaagtcccagcacccacatgctggttcacagccacctacaactctagtttcagggaatccgctttatctagcctgttcaggcaccaggtatgtacatgctacacagacgtgtaagcaaacacccatatacataaaataaaaatgagtaaaatcttttaaaaaataaaaattttaatgttagttcccccagttactctctttcacaggactcaccccctcccatattgcatctatgttggataaacttaatgtctgcttcttggactagacaccatgaaatgaagcttaaatgtctgaatcactgcccagcccttaaaagagcatggcacacagacgtagctgacccgcagtgtgtctgggcgtacttagtgccagggagagcaggttggaaactcagagtccaaactgcagattcctcgttgccagtgttgatgagaagcagtggaagggctggggtgcagcttctttgtggggtgtgtacttagcatgtgtcagtccataagctgtgccataagcgacctcagaatgagtggagatgggctgtaagggaagagggccagtagagaggaggtggtccgagaactgctgtgtgaaattgagattgtgacataaattcatgtgcactgggaacgtagctgagtgataagaatacttgcctagcattctcatgctcaaggccctgagttccttccacagcgctgcaataattgaaacaaaatgaagaaaaacagatggtaggtaggtaggttggtatatagacagacagacagacagatggaagttctaaccttagcccaacccaaaagctgtctttcttttgttagtttattggaacagtctccagtttattggagatgactcaccagagtgagaagtgtgccatgattctgattgatccctgctaaccacagggtggaagagaacctactcttgcaagttgtcctttaacctccaaatatatactgtggcgtgcataaannnnnnnnnnnnnnnnnnnnnnnnnnnnnnnnnnnnnnnnnnnnnnnnnnnnnnnnnnnnnnnnnnnnnnnnnnnnnnnnnnnnnnnnnnnnnnnnnnnnnnnnnnnnnnnnnnnnnnnnnnnnnnnnnnnnnnnnnnnnnnnnnnnnnnnnnnnnnnnnnnnnnnnnnnnnnnnnnnnnnnnnnnnnnnnnnnnnnnnnnnnnnnnnnnnnnnnnnnnnnnnnnnnnnnnnnnnnnnnnnnnnnnnnnnnnnnnnnnnnnnnnnnnnnnnnnnnnnnnnnnnnnnnnnnnnnnnnnnnnnnnnnnnnnnnnnnnnnnnnnnnnnnnnnnnnnnnnnnnnnnnnnnnnnnnnnnnnnnnnnnnnnnnnnnnnnnnnnnnnnnnnnnnnnnnnnnnnnnnnnnnnnnnnnnnnnnnnnnnnnnnnnnnnnnnnnnnnnnnnnnnnnnnnnnnnnnnnnnnnnnnnnnnnnnnnnnnnnnnnnnnnnnnnnnnnnnnnnnnnnnnnnnnnnnnnnnnnnnnnnnnnnnnnnnnnnnnnnnnnnnnnnnnnnnnnnnnnnnnnnnnnnnnnnnnnnnnnnnnnnnnnnnnnnnnnnnnnnnnnnnnnnnnnnnnnnnnnnnnnnnnnnnnnnnnnnnnnnnnnnnnnnnnnnnnnnnnnnnnnnnnnnnnnnnnnnnnnnnnnnnnnnnnnnnnnnnnnnnnnnnnnnnnnnnnnnnnnnnnnnnnnnnnnnnnnnnnnnnnnnnnnnnnnnnnnnnnnnnnnnnnnnnnnnnnnnnnnnnnnnnnnnnnnnnnnnnnnnnnnnnnnnnnnnnnnnnnnnnnnnnnnnnnnnnnnnnnnnnnnnnnnnnnnnnnnnnnnnnnnnnnnnnnnnnnnnnnnnnnnnnnnnnnnnnnnnnnnnnnnnnnnnnnnnnnnnnnnnnnnnnnnnnnnnnnnnnnnnnnnnnnnnnnnnnnnnnnnnnnnnnnnnnnnnnnnnnnnnnnnnnnnnnnnnnnnnnnnnnnnnnnnnnnnnnnnnnnnnnnnnnnnnnnnnnnnnnnnnnnnnnnnnnnnnnnnnnnnnnnnnnnnnnnnnnnnnnnnnnnnnnnnnnnnnnnnnnnnnnnnnnnnnnnnnnnnnnnnnnnnnnnnnnnnnnnnnnnnnnnnnnnnnnnnnnnnnnnnnnnnnnnnnnnnnnnnnnnnnnnnnnnnnnnnnnnnnnnnnnnnnnnnnnnnnnnnnnnnnnnnnnnnnnnnnnnnnnnnnnnnnnnnnnnnnnnnnnnnnnnnnnnnnnnnnnnnnnnnnnnnnnnnnnnnnnnnnnnnnnnnnnnnnnnnnnnnnnnnnnnnnnnnnnnnnnnnnnnnnnnnnnnnnnnnnnnnnnnnnnnnnnnnnnnnnnnnnnnnnnnnnnnnnnnnnnnnnnnnnnnnnnnnnnnnnnnnnnnnnnnnnnnnnnnnnnnnnnnnnnnnnnnnnnnnnnnnnnnnnnnnnnnnnnnnnnnnnnnnnnnnnnnnnnnnnnnnnnnnnnnnnnnnnnnnnnnnnnnnnnnnnnnnnnnnnnnnnnnnnnnnnnnnnnnnnnnnnnnnnnnnnnnnnnnnnnnnnnnnnnnnnnnnnnnnnnnnnnnnnnnnnnnnnnnnnnnnnnnnnnnnnnnnnnnnnnnnnnnnnnnnnnnnnnnnnnnnnnnnnnnnnnnnnnnnnnnnnnnnnnnnnnnnnnnnnnnnnnnnnnnnnnnnnnnnnnnnnnnnnnnnnnnnnnnnnnnnnnnnnnnnnnnnnnnnnnnnnnnnnnnnnnnnnnnnnnnnnnnnnnnnnnnnnnnnnnnnnnnnnnnnnnnnnnnnnnnnnnnnnnnnnnnnnnnnnnnnnnnnnnnnnnnnnnnnnnnnnnnnnnnnnnnnnnnnnnnnnnnnnnnnnnnnnnnnnnnnnnnnnnnnnnnnnnnnnnnnnnnnnnnnnnnnnnnnnnnnnnnnnnnnnnnnnnnnnnnnnnnnnnnnnnnnnnnnnnnnnnnnnnnnnnnnnnnnnnnnnnnnnnnnnnnnnnnnnnnnnnnnnnnnnnnnnnnnnnnnnnnnnnnnnnnnnnnnnnnnnnnnnnnnnnnnnnnnnnnnnnnnnnnnnnnnnnnnnnnnnnnnnnnnnnnnnnnnnnnnnnnnnnnnnnnnnnnnnnnnnnnnnnnnnnnnnnnnnnnnnnnnnnnnnnnnnnnnnnnnnnnnnnnnnnnnnnnnnnnnnnnnnnnnnnnnnnnnnnnnnnnnnnnnnnnnnnnnnnnnnnnnnnnnnnnnnnnnnnnnnnnnnnnnnnnnnnnnnnnnnnnnnnnnnnnnnnnnnnnnnnnnnnnnnnnnnnnnnnnnnnnnnnnnnnnnnnnnnnnnnnnnnnnnnnnnnnnnnnnngcagcagagtaaggtacctgacgtcagccttaccccacattcctgtgaacacacgtgtgcgctcacacacaccacacaaacacaggggtagataaataatacaactgtaaagttaaaaaataacgaggagctggagaagtgccacagcagtcaaaagcactgcctgtccttctggaggtcaggttcaagtcccagcacccacatgctggttcacagccacctacaactctagtttcagggaatccgctttatctagcctgttcaggcaccaggtatgtacatgctacacagacgtgtaagcaaacacccatatacataaaataaaaatgagtaaaatcttttaaaaaataaaaattttaatgttagttcccccagttactctctttcacaggactcaccccctcccatattgcatctatgttggataaacttaatgtctgcttcttggactagacaccatgaaatgaagcttaaatgtctgaatcactgcccagcccttaaaagagcatgacacacagacatagctgacccgcagtgtgtctgggcgtacttagtgccagggagagcaggttggaaactcagagtccaaactgcagattcctcgttgccagtgttgatgagaagcagtggaagggctggggtgcagcttctttgtggggtgtgtacttagcatgtgtcagtccaacttccgttcctaacaccacatccaaaaacagtgctggagaataaagggacactcattcctcttaattttatttcatgtatgtgagtacactatcactgtcttcaggcacaccagaagagggcgtcagatctcattatggatggttgtgagccaccatatggttgctgggagttgaactcaggacctctggaagagcagtcagcactcttaaccactgagccatttctccagcccacttactcccctttaaaagtatttttcagacagggtctcttgtagttcaggctggcctccaactcattctgtagccaaggatgactctaagtctctgctcttcttgccaccacatgtgatgggtgatgggagtacactactactctgtacagtgctgggatttgaatctgggcctcatacatactagacagctactctgtaaactgaactacatttcttttctttctttctttctttttttttttttttttttttgtttgtttttttttcgaaacagggtttctctgtgtagccctggctgtcctgtcctggaactcactttgtagaccaggctggcctcgaactcagaaatctgcctgcctctgcctcccaagtgctgagattaaaggtgtgcaccaccacgcccagctctgacctacatttctagctgagtatgaagaatgagttttcttgaacattctacctggaaaattctggtttaaaatacacatgaggattttcttttaaaaaaccctttaggcaagcgctttgcatctggatctgctgacaagagcatcattatctggacctcaaaacttgaaggcattctgaagtacacgtaagtgcccccacggatgacagcggtttggtttgcttgggacagatttccctctataaggcaggccttaagcttataaccttcctgcttcggcctcaggtagctggtttacaagggctgcccattgaccacacccaactctgcttcactgtagccacacccttgtagaaagaatgcatggaagagctttcctctccagaatgagcttgaatagagcatggacatgggtcaggaggagatgatgagcaaccagctcggccagcattgagctgtgtttcatgtcatgtctctcagctaatcagacaccccagattcctgtcattcccctcacccagcctgtccccttcagtgtctctgcctcttcgaatagctttgcatctacccagtgtcaaaagctagacagggcagtgtgctttaagcttcctgctccttagggggccatgctcacatctctccctctatagccaggccctccccatctataggtctctgctgtagctgccttcgctgccagcccactcccaccatccagacccaggaatgcctctcctgaacatttcttacagctgtggccttatgtattctgattgattaatgtcgcacactggcctgtgggctctggaaggtggacactatccctgtttttacatgcttatatttctggcacctaccagcatacttggtccataggaagtacttgttattttcagttatagagaaataccttgaatgtaaactgccatcgccaccaggtgttaggtatattaacatggtggtgcagccaaattttggcaaataaagtctttagaccctttcatcttcctgaaatttaaactcagtgcttaacatcttccgttctgcctcgtctcagccctggcaactgtcattgtcctttctgaggagtttggctcctctaggtgtctcatataagtgggatcataatagtatttggcattttgtgattgagttctgtcttagggtttccattgctgtgaagaagcacatgaccaaagcagctgttaaaaagaatgacatttaattgaagctggcttacaggtttagaggttcagtccattatcatcatggcaggaagcatggcagtgtccaggcagtgtcatggtgctagaggagctgagagtctactacatcttgatcagaaggcagccaggagaagactggctcccacgtggctaggaggagggtctctaagcccgcccccacagtgatacacttcctccaacaagttcacacctattaatagtgccagtctttgggccacacatattcaaaccaccaccattatttcgtgtaatgtcctcacggctgagtaatactccactgtgtatatattccatttggatgctcatcagctaatgaacactggattgttcccacctgttgcctactgtgaacgatgctgctctgaacataagcaaagtttagatgaacagtgagtgagaccatgcatacagtgttaccaagaagtgaagggctagacctgggctgagatgccaggcagtgcacctcagcatttaccatgcttccagaccctggcctgcactgtggtgttcatcatacgccactggatgtttctggacaccagaaattgtcaattggagccacaagtgaagcacactgtctgcacctcgcactaggctgcattctctgtctttgtctctgacacacactggaggtctctctggggagagccctggagaaagagtttgagctgggtgggatgctgggtgggtggacactgttgttgagggcagtcctataagtgaggccctgtgctgttggtcccccagagaagagcgtgcagtgtgccaccagaggcttcagtcttaggtttgttctttgtttgtttgttttgtttttatttttaaatttattttttaaagcttattttatgtgtataggtattttgcctatagaggttagaagagggcatcagatcgttggaactggagttacagacagctgtgagctgtcttttgggtgctgggattgagttctggtcctctggaagagtagtaagtgcttttatctggtgagccatctctccagccccttcaagcctgcaatctccaattgtagctactgagacatttgtggtttgttgtggactaatcttcagttcctcaacttccaggcacaacgactctatacagtgtgtctcctacaatcctgttacccaccagctggcatcttgttcctccagtgactttggtaagtttaaatttccagcccctctagtggagaatgctgagagacacacacacacacaagctgctagtctgtccttagaaagtgaggcctcagctgggcgtggtggcgcacgcctttaatcccagcactcgggaggcagaggcaggtagatttctgaggtgaggccagcctggtctacagagtgagttccaggacagccagggctacacagagaaaccctgtctcgaaaaacaacaacaacaaaaaagcaacccccccccaaaaaaaagaaagaaagtgaggcctcttctccacctccagcagccaagggaggctaatcctctaagttggcagaaagagctgggcagtggtggcacatgcttttaatcctagaggttgggaggcagagacaggcagatctttgtgaatttgaggccagcctggactccatagttccagaacaactgaagctacacagagaacccttgtcttaaaaagaaattgcagagagacagtgagaggtgatgatctggagggtggtaagccatttgagacaaatgagcagtagggtcctagggaagaaatgatgtgttggatgggagagcacagaggactggctcaccctagcagggactatttttctctagaaacaccgccatttgcctaaaaaccctagcacatcttcttgtgctgatctgtgtgcctgtttgtggggaataaaatattcctgctctcaagcttataacagaggaaggtgggatttgtaaaagcatcttattaagtgaaagtagttgagctggggagatggctcagtgggtaagtgcttgagttcagatctcaagtacctctgtccaagcctactgtgatgctttgtctgagctccagtgccaggtcccaggtcccagagcttgctggacagacagccaagccaagatgaagagcgctaggttcaatgagagaccctgtctaaaaaatagagagggatagaggaagacatctcaccatcagcttctacttcccagagcaagcatccccacacacaccaccatgcatacacatgcagccagacccacagtgtcttaatggcactgtgctgatagtttacaattaatttttcaaaaaagagaattcctatggcttgagagccactaaaaaaataaacaaacatgagctctgcgccaactcctgaagcagtgtttctctcattcctactctcccggggaaggagaaaacacgggctcaatatggttccgatgtcactggcagtcacttagccagcacccacccaaggagtagggttgaggcccaggctgggccactatgtgcagagcttgagtgtaaatattcccgagggaggctggcaggaagggctcctgtgctgaaggcttcctgctcttgcagtggagcacagacagaatgcatgggtggggtggaaatgtttgaaaaaagggaggggaagactggcatttcacagacatttcccttttcaaccttgcttagctacagggactctggggactcatgtgactgggacagctgggaatgaaggaaagataagacgcagttgggaaaactgggattgtgtggaccacaactctccggaagcccagtgtgtttattgtatgaagttgaatatagaggcagtattcttacttacagctgagtgaagaagctggatcaaggagacaggtttagctaatctctgtcagagcagtctcagcagggcacagtcttcaggccataaacatctgggaggaaagttgtcttggacattttctgcatgtattgccaatatccacccatggagcagaaagggaaggctctaccatctcccccagtcttactcgaagctgtggcatccttgcttgacacgaagccatgcgagattacacattcacccaggactccatccactcacggcttcctctgctctctgtggatgcacttggctgtgtaaatttggatgtgctctgtatttcacgtagccgtacttcacggcccaggcagggtagaattggctttgttgtctgttttgagggcactggaccacctctggggattggagggagcaagcctgaactgatccagtgtgccatgcgcagtgcacagctcacatacagtcatgtgcagtgacagaggcctagaaaggggactctccaaaagcgcactcattactcattttacttttattagcttaacaacgagttaggttgttcgatggtggcactgtcaaacaagcctcttgacctcatccccgctcccttcctggtgtcctcccacttcgtgtctgttgccctctcctccccaagcctcttgttccctctcacagtttcctactaacttcattgtctgtacccgttgtcacaccctttatttacaaacactaaaggttaggcatgagggcacatggtgtctgtctgtctgtctgagattgggtcatcagtgggaagctttacagcttccctcctgcactttccacttccttaacttatattttaatgctgagttggtctctggcggccatgccctagctatgagcagctaagttgtccttttctttgggatttaagccctgaagaacttggctagagaacttcaccatctaccttttttcttttttctttaaaaaaaaacaaaaacaaaaacaaaaacaaaaaaacaaaaaacagttgtagattctcagtacattgcagagcagtgctgtgcattcttcacccagttctcctactgggcgcccagtgggtacctaatgggcagtccaggaaccagggaggtggggggcacagtgtgttttaattctgtccttcagtcacatgtgcagtgtaccactactgcagtacaggatcccattcccataccagtgcctgccccttgatacccacaatcccaggagccacagatgtgttctgcaggtgtgtggttgccatccagtatgttgtattcatggatttctatggtgtcaagcctttggaagttggctttttctttttcttaactcagcataagaccctggagatttgagttttgtatgaatggatagtttagttttctctattgctgaatagtcttgctctcttttctattgtctaacactgaagggttatggtctcctgagcagaagtctgtgtccaagcacaaatccagcagcaagatcacgtgctgcaggtaagttagggaggctctgacaataggcattgtgctcctttctctccccagcagactcccacagcctctgatttcacccacagagaaactgtggtgttggccagctgggataggcttcccgtgtttccctttttccttctctggtctccttgatgggaaaggctggtgcctttgataaccttcatgggagacggcatgggcgtatgcggtgggaaagtcagacaggaacctctgacgttggtgctagactcagaccagaatctgcatcctgccactgataggccggtgaccttgggtgcttactaaatcatggagcaatggtgataacaataccatttcccgaaacactcaaagcaccagcaggcctaggcgctctataactgagcagcctttgaaggcactctgagattcaacatttattgaatgacatgtcaagccctgtttgaaggctaaaaaggcataagacagtctgtttactgagagcccatggattgggagggagttgaactgtaaagcagaaaatagggcctagtcatgagtgcagactgccgtggagatgtgtgcacagtcaggggatagatgccatctggattagacattcctgccttaagttctccctgattccagatgtaagtggcagtctgagctgagtctatgtcaggaatacgcgggagcaatgaaaccacagcctggctgctgcctcacagtttctaccctctgtgtgctccttcccacctcccatgccctccgttggttgtgtgtgcagctggacaaacgatggtcagtacctggctctgggcatggccaatggcatcatcagtatacggaacaagaatggtgaagagaaagtgaagatcgagcgccctgggggctccctctccccaatatggtccatctgctggaacccttcaaggtacccatggctgggtttctcctggctggcactattagaagaagccttctgagttccttttcttttcctgacatctgtagtttaaagtcctctctcccacttccctggtctgtttggaacctggtttttataaatgaagttttaaaagagcctatattgaaatttggaatgaatcccagagatttagccaagcagatgaactatctaggccaggagagagagagagagagagagagagagagagagagagagaagagagaagagagaagagagaagagagacttcttcatgaactaattgtgctgatctccctgtgcttctcttcttgcttcatcggtccttccctcatgtccaggagcatgcacccacccacccgcctgttacactgttaacagaatggcactctcttgagtaattttttttttttaatttcccttgccaaaaagttaaaattaagcctacaaatgcccctaaaacctaaaggtctgcagacagttggcactacttgctcaaacctcaaacttacttttcttttatgccatgtgactttgatggtggactaaaagctctcgcggctctttgcgtaattctataatattattaagcctatccccacggagttctctgagggtaaattaaagggctcaattgtttactgtcctagtgttattttacaggtgggtgcccacttgattgaggaggctgtttaattccgttgcctttcttactacaggttattataattcttcctgaataattctgtccagcggaggccctccttatgtatagaaggccttccaaggccattagcctaccccagagttcctgctgtttgattttgtggctgcagatgactttgtggcttcaagctaccatttttaattcatgagcagcaggatgcccagtgtacctggtggctgttctcttccgggcagggtccaggggctccttggcaggttttgaaattatagcttcagtgtagtcctaggtgatgtgattgtgaacatccccttactgtctacagccgatgggagactatctggatgagcagagagaacgaggatgctgaggatgtcattgtcaacaaatatgttcaggaaatcccttccattctgaagtcaacagtgtacaatagtcagggtagtgaggcagaggaggaagagcaagaggaagaggacgacagtcccagggacggcaactcgtgagtgtgtcccacagagtgaggaccctcgggagggcccaggcccccacagacctgccgaagcaaatgctgctgagaaactctttggccaggggcagcagagcaggggctgggggattgttggtgtgcccccacacaagcaaagggacgcacccctgagaggcgtgtgtgggtggcagatagagcaatcctctgagaagggaggagaaactgggtagcacagaggaggacacacctctgtaaactgccgtctctggataggcccctggcacctctgtccctctgatttccatgcctgcttctcaggttagcgtctgagcgagccccttccagcaaccttagactttctccggaggcttgatttacaatgccctgtaggcctaccattcacctgatgccttttgttgctacatgtgttttctcggcctattcccgttctactctgccttgcactggctaggacatatacaaaggggaagcccgcaacttcacccccttacacacccaaggtcctgactgctgggcagtctctctcctctcagttgatgcggtctgtagggaaatcctttcggtggcgtgggaaaagctaaagcagagtgttgggattgggcaatcatgttctagcttgggacccctcctcactgtacccctgacacctaagactgattagaggaattcaggtttgtggggtgggaagtggggtcaaagaaaggaagaagggtggccctcaggttcccatctgagcttcagccctattttatcatcaacatggtattttgataaagcccannnnnnnnnnnnnnnnnnnnnnnnnnnnnnnnnnnnnnnnnnnnnnnnnnnnnnnnnnnnnnnnnnnnnnnnnnnnnnnnnnnnnnnnnnnnnnnnnnnnnnnnnnnnnnnnnnnnnnnnnnnnnnnnnnnnnnnnnnnnnnnnnnnnnnnnnnnnnnnnnnnnnnnnnnnnnnnnnnnnnnnnnnnnnnnnnnnnnnnnnnnnnnnnnnnnnnnnnnnnnnnnnnnnnnnnnnnnnnnnnnnnnnnnnnnnnnnnnnnnnnnnnnnnnnnnnnnnnnnnnnnnnnnnnnnnnnnnnnnnnnnnnnnnnnnnnnnnnnnnnnnnnnnnnnnnnnnnnnnnnnnnnnnnnnnnnnnnnnnnnnnnnnnnnnnnnnnnnnnnnnnnnnnnnnnnnnnnnnnnnnnnnnnnnnnnnnnnnnnnnnnnnnnnnnnnnnnnnnnnnnnnnnnnnnnnnnnnnnnnnnnnnnnnnnnnnnnnnnnnnnnngtgctgccaggtgactgtcagaccctgggcttagggaagcaggcattagtagaggctcagccacttggggagaattttgttccagccttaaggctgggaaacctctccctgtctgcattttgaattgttggcttcccacctgaggcctttctcctaggttctggtcctgaagttccatttcatgggacagatgtataggccatgtcctaacccagaccattctcagctaggagtcagtgcaatagcagatcccaggagggccaaacctgtctttgggctgattgatggttggtttgattgtaacactggccccagtatggctgtgtagtacttggctccctgacagcctggtcagagctttctttttcctgttgtttgttgagcccctagccacagtcatcagcaggctgtgccccttataacctcttttgtcttctgttgattagagaggaacataatgacatcctggctgtagctgactggggacagaaactttccttctaccagctgagtggaaaacaggtatgtagcaccatgccaacccagccacacacgtcagctgtggtacactctgatgtgtgcttctgagagtgtcaccagtgactacacataatcattgttagtggctgcatagtgagcttgactttaggtcctgggcccagtactttgtctttttcttcctcagctgttcagcactgtgagaagagactttagggactttcagaagtgggagagcaagacccgagcagtaagaaccacagttggaaaatggtggagcatgggattgaagcccagattggagcactagttctttgagaatttccaatatgcctttttttgtttgtttgtttgtttgtttgtttgcttgttttttaagatttatttactttatgtatgtgaggacacaccagaagagggcatcagatcccattacagatggttgtgagccaacatgtggttgctgggaattgaactcaggacctctggaagagcagtcagtgctcttaacaggtctctccagtccctgcaatatgcttttaagaggacatgtccagggacatgtttctttcaactaggcctcactccttaaactttatccttctttccataatgccattagctggggactaagcctttgacagagtttctgagagttatttaaagtccaaaccatggtacagatgataactccaatttgtttgggacagtgaagttatttcttggttttgaagtattttttccacaaggattgctaaaacaaagccaaagtttttgtcaggcttaggtaacatttgtgtaactttggctttttagacatttgtagtttgacgaggccgtggcgttccttggtgcagatactgttttgctgtgtacaggacaggctcttttagtccccaattactccagaggaactgctaccaccattgctgaacgtgtaagaaaacggaggtcttgagaggccactggtcttaagaacaggtttagaatgtgaccacagctagtttgggacctgaccagacagatactagaagtctgtcaagttagtcagtaagctaccatgtaggtcctgagaaccaaacccaggtcttctgcaagagcagctagtgctcttaacctctgagccatccctccaactccatattgccctgctttttaaaaaaaattatattccgggaattgtaaattgtataccatagaaactaatttctctcaggttcccctaaaggcaagtgtggagggtggggaagggagagaagaagagagagagagcgagggcgagaggtcaggtggttagctttgctgtgctctgctatgtattttcaatgagcagcagctgagatcctagaacaggtctttggcttcacctgtgagtcatgtgggtcatagctaaaggtttccagtggtgagcagagcttgggtgtgaatgcttccttctagccttcctttctacaacagcccacctcacctacaacagcccatctcacctacaacagcccacctcacctacaacagcccacctcacctacaacagcccacctcacctacaacaacccacctcacttacaacagcccacctcacctacaacagcctatctcagactctatgcccatccaaaaaggagctgtgttgagagcctcttgcctgaggctgttcccctcgctcagtttctgcctgctttggtcacttgtcccttcagctggtccttgtagttggtctagagttgatggttgttacttggaagaggagtccgaggcctcagccagtagcttcagcctcaatgccatgacaggtgccagggttttcgtattagactttgtagcgttgggaggtaggagggaagctttcggttgttaggcattggannnnnnnnnnnnnnnnnnnnnnnnnnnnnnnnnnnnnnnnnnnnnnnnnnnnnnnnnnnnnnnnnnnnnnnnnnnnnnnnnnaatttgcagttggagctgactccttcagtggttttatgtgttcaaattgccttcattaaactgtcagcatcaattgactgctcacttttactagatttataaataggaaaacatttgtaaattgaccctaaaccttaaagcaaaaactaggtttttagggtcatttttcttaaattgaataaagaataaagggcagtcttttcaagtgaataagctcagaacataaacagagaagaggctggggtaggctgacggccatgtgtgctgggtgagcgagggaaagactccccggcctccaggatggctgaggagggctggctaacttcccagtacttaggtcaggcatggcagactttaggggccaagggttcggcagggttgaggggaagagtgggctccagaggtggagaggcctgcgtaggagatggaatagctcaggagaggcagcccccacccccttgccttcctaccggtctccctacccggctaagcccttcctggttgtggttgtagactggtctcacttgctgtatgttctctttcctcagattgggaaggatcggccactgaactttgacccctgttgcatcagctacttcactaaaggagagtacattttggtgggaggttcagacaagcaggtatctcttttcaccaaggatggagtgcgactggggaccgttggggagcagaactcctgggtgtggacctgtagagtgaaacctgactccaattatgtggtgagtaagaggaagttcaccctgcagagcattgctagaggaggccccaggcagccagtgctcctaataggtggaagggagatggctcctcccctcagcctagattgacagctctcctgtacacaggtggtcggctgccaggatggcaccatctccttctaccagctcatcttcagcacagtccatgggctctacaaagatcggtatgcctacagggacagcatgacagacgtcatcgtgcagcacctcatcacagagcagaaaggtaagaggcaagcttgcccttgcttatagacactagcaaaaggggtgaggactgggctagggacagcacattcgaaataataggaaatatctcccctggccttgctttagcttctagcagtagaaggaggatgaagatctctttgaggatctagcaaaagcagtaaaacctgttttgttttttaaaagcaccaactctttacattttacaaataattccatggtgtaaaatggactccatgagacatggaggctgacaagtcagagttgtaatggctgatgtgcatgaggctttgtggacatttacccatatctgtcagagccactttggcatactttcccctcagcctctactcacttcttggtggtccttctactagacttgtaggggcagtagataggctcaggctttgtcaggggatctgggatccaacctcgcccagtctaaatgtgacagttcccttctgttcacataaatagctctgcagctgaaagaggtcaagttccactcagcggtgtccatccctggatgtgctgagcacatatgctatttgtatgctgctgaccagatatagccaggtggctttgcataggggttccagttggggaccaccctgtagattcaggatggcttcttttgtccctgccagggtagatctattttggaaattccatctaggtggcaggaatgtagccactgggacagctcagcacatcctccatggtgtttaccccacttggtctgtagagaggcagagcttgccacatagaagtccctgtggtcgggaaggttgcaggggtgtggctggctatgagatgtgtcattttggtgggctcccgatcactaggggccttcttcgctgtgcagaatgagtctagatgtcctcagccatgcaggacaagtgtcggtagcattgactgcttgaccgctctgtttctccctgaaatggtagcatatgtagctctgcaccccactcagcacagaggcctccatgtggcaggtgctctggggagagttgttagcagactgacctagttttactcttaagtgtatgtctgagtgcctgcatgtctgtgtgccatgtgtgtgcagtacttgaggaggccagaagagggcaacagatcctcaggaactggagttaagatggatactgggaatgaaacccaggtcttcagagagcagcagtgctcttgaacactgagctgtctctccggctcccgttaaagatttttgtaacgagagtgtgtcactttaattgtcaggagcattaaataaataaatgatggcttttaatttctctgcctttcaccttacttaacaaccttttgctagagtctcttttcctccgttgacagttaggattaagtgcagagagcttgtcaagaaaattgccatctacaaaaatcgattagctatccagctgccagagaagatcctcatctacgagctgtactctgaagactcgacagacatgcactaccgggtaaaggagaaaattgtcaagaagtttgagtgcaacctgctggtggtgtgtgctgaccacatcatcctgtgccaggtgggcagctcatccctcctcccccagggcagggctctacctcagggaaagaagatggtcacaactcagtggccggtccttggcatctagctgaatcttgtctttagagagatgaggtctgcggatgggatgactgtggactctggagcatgtggctgcactggcattaggtgtgttgtaaagagtctcacgctgcagctttgcttggagatagtgctttactaagttgctcaggctggcctcaagctcacgacccccagttcacctcctgagctgaggtgaaggcgtgtgtcatacctgtcactcatctagggtacattttcataagtgcaagttttacctcctaagagaattctcttctttctttctctctttctctctttctctctttctttctttctttctttctttctttctttctttctttctctctctctctctctctctctctctttctcttctctttctttctttctttctttctttctctctttctttctctctttctctcttccttccttccttccttccttccttccttccttccttccttccttctcttgaggcactaggaatgaacccaggcccttgcctacagtaggacagccctctgcagtggaaccatatctccaagcttctctccccaccaccttttttaagactaggttttacgaagtttaccaggttgtccttgaactcattctgtagcccaggcaagtcttgaacttgcaatgctcctgccccagcctccagaggacttggaactatagatctgtaccaccaaaaaaaaaaaaaaaaagtctctaaggcagtggttctcaaccttcctaatgctgtgaccctctgagaccatttctcatgttgtggtaacctccaaccataaaattatttctatgctacttcataactgtagttttactactgtgagtatctggtatatgcaggatatgcataccaaaggggtcatgacccacacattgagaaccactactctaagaggggtttggtttggtttggtttttcaaaaggaaagttttcccccagtcatagatctctaaaagtccctaggtcagtgccacgaggagttttggaaagactactgtgggtgcacctgatctttccaggcctgttagaaaagataaaaaggaagaccttgtttaggagccattctagtgtaaaactagtatcaaaacctgtgtgagggtcccaagcctcttgccacttagggctgccacaatagagaagagttgtgggggattggtggcctgctgctggctctggaggcccatgttgaagatggcccctgaggcggcttgtggtggattggtggtggcagggtcggggaagagccagcgttagatcaccactgctggtgtaggacggtttccccaggagggctgcaagcactctttctctgaccctccacgctgagcttgggatgtctcctaggagaaacggctacagtgcctgtccttcagtggagtgaaggaaagggaatggcagatggaatctctcatccgctacatcaaggtgatcggtggccctgctggaagagaaggtctgttggtaggcctgaaaaacggccaggtgagtcttcctgcactaccatcgagcttgctgtccgggcaggcacgggtttcctgtctgggatgatgtgctatgggttgtagacagcctggcgtttgctttcataaagacagctccaggccaaatggctgtggccctcagactcacagcatgctcacccctggcagagtgggtgccatggctttcaagctgcacgtagcagggatcagtgtgcttaaggtcaccccgaaggtgggatttgttggagacacagctttagtggattgctggagaggcaggcggagattgtgcacgaggtcagagccttattaggcagtgcctggattaatcagtattcctgtctggggcctagatgctgctagtccttagggtgttactagaaccaaaaaggaaactggactgtttggacaaatcgattaggaaatctaggctacaagaagttgaacagattctctgtgtgttcatctacattctttgcttaaaataagaaacttctatgtgggctacatagaaatttgaaagtgaaaatataactgcattagcctgagagccaagctgtgtggcagatggctgtggctgaagcttgtcaggtctttgctggggacggaagttgcggagcatgagctcagtaggagctgacaagcagcggcaccccagtgcgggatagtctgcagcttcctcagtcagctgtcaggtctcatgggaggctgagagcatggctttggggtcaggttaacctgggaccacattccttctcacgcgctgtatggccctgggcagatagatgagtttgcctctctgaagctcaagttgtccaaataaggacaatactgtttcttcccagggctgtcagaaacagggatgtcagtgaatggcagctgtcaccatcagcaccgtcattattactttataccagatgtctcccctgtgtttacagtagcccttcctgtgttagtgtatgactcctctaccctgcagtttaagcagtatcattaaaaatgtctctagttcacacagacattagtcagtttggcatgtctcaggcctgttgttgcttcagtgacctcctatgaaccatgcttttggactcttaaggatggttacccccccccccctttatttaatgagtcttttctctgcacacagcttctggaggagttagtgggtgttgttcttgtagaacacatgggatgccaagagtctggcagtggtccagggtctggttgccgtggtaactcacacttatttctctgaaatttcgccagatcctgaagatctttgtggacaatctttttgctattgtcctgctgaagcaggccacagccgtgcgctgcctggacatgagtgcctcccggaacaagctggctgtggtggatgagaatgacacgtgcctggtgtacgacatccacacgaaggaactgcttttccaggtggagtcctggatggagacacagtcctcagaacagggagcagtcttgagtctcccagttgtgcaagccctgtctgggaggaagaacaagggcctgggacccagcacaggaatagattctgaaaagccccagggacagggtagctgggccagcctcttgcactggtttccttctcaggaagatgggcaagtaacctcagtttcacatagccatagcagtacttgagtggacagtgacaagtctgatggctatgttaatgtgtggtggtgacttttttgataaagtctgtgagtcccttacccaggactgctagttgctaccagtggcctaaggcacacacatgtagaagctcacctaagcttactccacagaacactatagcacaatagctgcatggatcactgggagtgggcattgtttccacagtctttggtcctgtggctgaaagaagtgtgtcactgagcagtccaaagactgtgcccatcacctggctggctttctgccacactagggctgttcttggcttctttggggcattgtgagaggtcagagctaattaatgtgaagtgaggaccccctgagattggagcctttgttctctggcttctcctgcacggtttcccgacatcatagatagacatgggtcctcttccaaggccctccttgtccttggcaacagaaccagcagggtagaagtgtctggctttcctcagtcagttggacggggctacatgtctaccagtagcccaaaacgacttcagttattatcacatcatggcacagaggaagcagagggtttagggaaaagaacctgcattcacagacccctgtgagtctcaatctggctaacatgaaactaccttttccttccttccttccttccttccttccttccttccttccttccttcctcctcttcctcctcttcctcttcttcctcctccttttttttttttttttcttttgagacaggatctttccgtagctcaggctagcctccaggtgaggatgaactttaggatgctcccttatctccacttcctaagtactggggctagagatgttatattatgctgagatcaaacccaggacctgttgcatgctaactaaaccacattccttccccatgctaacatgaagctagaagttacattctcatagacttgccacaggaacaacccaggagcaaacaagatgctactgcgtgctcagtgctaggcataactagccctaaatggtgcccttctccccagcctcaacactacactgcctggacctggaggtgattagaagcccctcagtgtgtcctgtgtagagagaggttgaaaggtgcatggcccttactgcaacttctctggagaggtagccaaggtggctctcaggacttaccgggaggcacaaccttcctagtctgtcatccactgtgtttgccccttcacatgggaattaccaatattcctcattaaaacatagtctctgctgagggtagaagactcagggcagggaggactgagtcgctgttggtcccaggcctctagagttgagcagaatcctggtggagaggatacctcctggtgtcactgtggttttagtgtaagagttatacatgcagagacaatgtgttattttctaattttgaaaagaactccccattcttttgcttattataaaaaacaatggaagttcatgaccaaagaaaccagactagcaaccagaagaaaaaaaaaaaaaaaaagaaaatagaaattcttctcagttctgctcaccccaaagcagtcactggtgatcttcagggtgagccctttgcgcctccttcgcaggtaggtaggaacgtatggaagtgtgtgcacatacacatacactcctgctgggaaaggaacccagcctcttaccacagagcagcacctcgcctgcttcctttaacagaaatgggatcctaccatgctccatttccacttactgtggagtgattataatatggaggggataatttattttgaaaatatcacatatccaaaaattctatcactctaccagtacatagaggagtttggctcgtcccttcttttctgacccccttccctctttctcttcatcctgctgtctgtacttgagggccacctaggctttaagaacaggttggggtgaaaagtgcgagtgttgtcagagcctcacaggcctttatccctcaggaaccgaatgctaacagcgtggcctggaacacgcagtgtgaggacatgctctgcttctctggaggaggctacctcaacatcaaggccagcaccttcccagtgcaccagcagaagctgcagggctttgtggttggctacaacggctccaagatcttctgccttcatgtcttctctatgtctgccgtggaggtgccacaggtaagcctgtgcctgccgctcctctgcagctctagggcacacaaaacagaatggtcagaccctgagactggcactaggagcagcaaggaggaggaggagggaggtgtggagtccgtggtgtggacttgggtgtttgtgtgtatccatgtgtttctggagaagaagatcggccccattgtcttagttagggtttctgttgctgggatgaaaagccatgaccaaaaaagcaagctggggaggagaggcttattcagtttatagttccacattgtagtccatcactgaaggaagtcaggacaggagctcaaaccaggcaggagcctggaggcagaggctgatgccaaggctgtggaaggctgcttcttatagcctagctccccagggcttgctcagcccgaattcttacagaacccaggataccagcctagcactggccccacccacaatgggctatgccctcccccatcaattatcaagtaagaaaatgttctccaggttggcctcagcctcattttatagaggcatctttttcaatggaggttcctcctctcaggtaactatagttttgtgccaagttgacataagcctaggcagcacacctgttcattggccctcttttctttctgatccccttgcattgtgttagtggcaagcccacagagcatcagtgcgtaagtgggaacgctgtgtggacaggagaacaggtacagtgggcactgactgagggatgggacccagagatggcacatggggtccagcatagtctcctgaagagaggggagaccagctagaaaccacaggagacagatgggaaaaacagacaggagaactcagacagcacccctgctagttatagctgcctgtctgcttgtccgtaaagtgagagacattctcaccaaggcaaacactaaggagaaacttgaaccacagcatcctatcttcaagagaatattttattgttttaaatgtgtgtgtatgtgtgcatatatgcatatgtgtggtgcacatgaggacagaagagagctggagtcacagggggttgtgatccacctcacatgggtgctgagaatgtgatatgggtcctctcttagccacagaaccgtccctccagaccccaggcatgttactgtactgactgtactgactatggaccaaaagcaagagaatggagcctttaatcagtttgtgccatcatctgttttaaaatgtgttaaagtttgtgtgtgtgagcacctatgatcgaaggtcccagaataacttttggcattgtttctcccgttgttggttctgaaggttggacttaggttgtcacacttgtgcagcaaagtacttttacctttcagccatcttgccagctcctgtgccatcttcttttaacatgacatttagctattccaggctcatccccttgacgaattattgactagcaatctgacctagcagtgtggttgacacctatctataatctcagcactttgaggatggggcaagaggatttcaagtttaaaggcagcctaggatacatcacagtactttttcttaaaacaaaaaacaaaacaaaccccactaacaacaaagacaattgcccaaaccaagcaccccacttactaatctgccattttgctcagcagtcagtctactggaaacgctgtgccatgtcagtgaatacacttaccaggattttcaaacaggaagacaattgtaggctcacatctgtgtgtgagaagggacaagagattccttgtatatgttgctcaattccccttaggtagtaatgtgcaagactgtaatgcagttgttcctttgctccaccgtgcagtctggagtaccttcctgctgcaagcccccatgccctccctgctgtgtacccagctttgtttgtaatgaatgcagctcttctatcaatgacagtccatagcttactccaccggcacctacatttatattacttacagcctttttgtttttctttgtgtgttttggaaacagggtctcagtattggtccaggctgccctggaactctgtgtgaaccaggctggtctcaatcccacagcagtctcctctgtctttgcctcagagtgctgggattaaaagtgtgagtcaccaggcctggctgcccatagctttttactcttgcaaatagtggatatcttccttgtgtatgtcctgacatagtacaaattccaagaactgaaattgctgggccagaggccttgtccatagaaagatgttcatatgttctagactgcctttcctctagaatgctgttggtctgcctgcctacatacacctggcctgcagactctgtcttcttcttccttggagccatggaagcccttgctacttgttgctgcagggcttttctgcagtagtgtccacatcagctcctgctccttactgagtattcaagcaatggcagtgaagtctgatgggaatgaacagtgggaaaaaagagtgtgagagatgggacgtgtggtggcagctgaggacagcctgcctgtgtgactctccgtgctgtccttatctgctccgcagtagcatcctaaacccaagcaccacatctgctaggagcccactcttcctcatcttgccaaacaggctttgcttattaaaaggttttctccctagactgccatcctaacctcaaaaataaatgcagttgctgctccttgattctagccaaccaagaggagccagagggtctgctggggctccttctgccagagccccaagagtcagtagccaaagtctctgttggttgcagcagccttcctgctgatgcagcaggccagagctgccaagcattgggaaaggcgatctggagacaaaggctgtttatctgtcgccttgcctctagtcttcttgtggtttgggcctccagaccaggcaaaaagccccatttttgctcttgggatttttggtttcctttcgaaatttgtatcatcttgtgcaagaactggtgtgtccgagctgccaagtagagcagtaaacctgagttgtgctccatgatgtcatgcttggaatacagcagccagataagggtgtgctcagaggggactggttcattagtatgcttttcaaatcctcattcaggttgtacctctctgctgtacgatcagctgatcttgtgcaacgttttaatgttcccttgtcatggaggaggttggttgtcacaggaagttctgtagtttggagccctggttttggattctggttctgtaacctgatccagctgcatcctgaacaccgtatcttcctctttgaggcctcatttcttttctgtgcaataggatcattgggttttgttttggttttgttttgccatgttgctcacattagtcttgaactccagggctgaaagtgatcccccccccccccccccgagcagccaagactccaggctttgccactgtgaaatggggttaattacacccgttttcaggttttgcctgcccagattcctgttattattcctccttattacagacagtcgtgaaatatcaaaagccacaaaacagagctaaagtggaccagaggagtctagagaagagagctcattgtgagggcagagtaggtgggatttgggaaggcgtaaggagatgaggacgcctgtgtccaggaagatgggtgctttgcccttttcagagtgccacttcaacccacagaagcctagcctgggcagagtctcagctgctcctagtctcgtggcccactgcctccctacagtaagagaggaagtgtatggtgtgttaccgcaggaaaacaagcccctgggaataactgtgccttgctgtcagaggtagatcagcttgaaaggaaaaaggtttcttttaattctgaaggggggcaaaagaaccggaaatgtcaaagataaaggccccaaatggagaagacagcacttccggtttcacatttgagaaccattagtacaggggtactggctgattgatctttactgcccaggaatccggcagggagacaagggtccctgaagcgtattgactggcctcaaatctagacagggcctttattgctacagatgccaggcccagctcagctctagcctgatgtgtatgcatgtgttctctctctctctctctctctctctctcacacacacacacacacacacacacacacacacacgacaagaaggaacacaggaccaagaacatcaggtcacctgttgctttaacctcaggttcttagtttgataggtctgtgtcctccgacaagtgaggtctgctccaggagtctccctctcctggggtgttctcaaaggtaatcacacttccttacacaggactctttggacaactgcaacagtctttatactcttaaaaaagaagtcactagggaatgcttgtagatattctcagccaggcatcttgatctttagcactagagactggtcctcagagttttctgggctgtctggagcaaactccatatccgtgctcctttcagacatagcctttgagaagaggccatcccagatctctcccttctggtcagtgaacttgttcctctggcctggtggaggaactgctgggagtgactagagccccgctgctgccacaggctgagcagggcttcaccccagagacccacatggagtacagcacaaggtttatctacacagaggccaaggacagctgagactccttctcttggggcatgaggagagcttccaggaggggcctgttaagagagctttaaaaagccaagtaggcattttccatgaggggtgggagggtgggcagggtaaatccttcccagagaagatgatatattagggttatgtagacctaggaaagaggaaggcaaatgacagccaaaagtgtgtgcagagagctcagcaggaggggtagcagaaaagaaggtacccaggtggccagggcaaggctgcaaagatgctgattgatggcagaagcttgaggtaggtgtttctggtgatgtcactgtgaacatctggttgtaatctgactcgttgactactctgaactattctctttctccctgaaaccctgcagtccgctccaatgtaccagtacctcgataggaagatgttcaaagaagcataccagatcgcttgcttgggagtgacagacgctgattggcgtgaactggccatggaagctctagaaggactagagtttgagacggcaaggaaggtatgcacttagtagtgtgagccagaatttggtccttgaaagggtcccttgaggcagaaggtgccagtaacaccaaaggggcagaaagtgactctaatgggctctgaagtctcctcagtctcccctttcacagtggtggtaactaccctcccggggttgtttttctggagggttctggcagacaaggacctgttctcaggaagctgggaagatctaagcagataatgccagtaaaacatctggttgattctggctgccagtcttggtagtaatcatttatgtaaagaacctagataaagcctgctcatggcagccatttattaatgaggtagctcaggctggcttaagcgccagccatttatcacaccaccattgttcttagcactggcttagtgcagaggagatggtcaggctctctgattcccacagcagtgtggcagtgtccccataccctcttgacatgattcacagtgctacttttagtttagccaaaaaaagctaaggaaatggtcaaaaatatttaacctttcctagacttatgagtgcccatctgatagatcaagggagaagagtgaatggcttccagcctctcctgtcctctttccctgctttctctcccatagccaagtggagagtctcctcttgcccaggctactgatactgaagtacctgcagacatatgtggtacctgcctcttgttaacaacagagcacacttcagagctgggctttttcccagcctgttctctcagcctgacttctctatccctgcttctaaaatgcatagcactcttcctctattctgtactcaccttgaggcctccccaggcctggtaaaggagtttggaatagctgtgcaaatgccaaccatatcacacagagttggaggtgtcgctgctcagtggtagagcactggctagcatgcacaaggccctgtctcaatacacagtgcatgaagaaaagtcaagctacccaataattacctacatatttttagatcagataagcattgggaagtattagactagggctttaggaattcaggaggggggaagttccttctcctgccccacctagaaatgcaagcctgtaaagaataccaataggttttcagggtgtcttcgggctatagctagaaataaagttatattctctagtcagttacccttcacatctagagcctaagagccagctcgtattattactgccctgctatagagcatgcggccagataaagggaactggagctgggatatatccttctcttcatttcataccccacctcgcatcccagaacactcaagaatagacacgagcatatcagatcgctgggttctttgttaaaatggtatttctttagtcattttacttgacaaatgaaaattgtgtgtatatttcttgtgggtagcatgatattttgaaaagtcgtagagctttgagcatagactttgactgatgttttgttttaatcctgaatccttggcttttctctcccctgggtgtcagtcggtttttcaggactcagacttgtggaaggaggggcctggcctagaagggtgctcccactagatggcacaggagagctgcttagctgccagctcatctgttccctgctccccacttccctctgtggaagttactcacagtcttgtgactgaccactccgaatagcaccctgactctgcggtatatcaaggctgaaggatgctagtgacagacttatcaaattcagaaatccagtgctcagaaccagacaggcccttgaagaggtgtcacttgcttgcctgaccacaaagaaggctgctggatcccatccataggaaggaaatagctcaaggtcctgttgggctgagaccagagtctttttttcctactctgcccattaccagggacctgcatccatacatggtttaaaaaacacaaatcagaagggcagattttacttttgtccacactgcctgactgaccagttcctcgcggatactgggtactgtgcaatgtgctcgtcaccccagctcttcagcagaaattcaaggccagcctaggtaacatagtcagtccctgtttcagaaagaaagccacttgccaggcctctcctgggcagtgcttgcctaatcctgccgtctgccactgctcatgctcagacaggaagagtcgtccctagggaatctgcctcgtacttgtgcggttggctcagggagatttagctctctgtttaattggccaaacttcccatttccaatgtgaacccatgaactagggaaggggacagaggccaagtgaaattcctgtgtccccggcctttgaatagatcctggccctgtagagtagaaagatgaaatcaccctgtggccatctgtgaggcagccggaaacgggatgacatgatcattttcccccattcttctagcatagagggtgcctagcagtggccaagggcagttgtgcatcctaaaccatgatggctcagaagctgctgctctgggcatgtgtcagtccattccacatggacaacacagaaagcacagctgggtatagatgttgccatcagagcacacagaggttcagttcccttaagtctctcatggtacccgagagcagcaaaaagcatttcactggcaccagtctgccggaccctcacaaccttctagaaatccatacatcagaagtttgtacccctactggagtgcaagcaggggatgcgcattcaggattaacatgcaagtctactttctagagaccaggagattatcccctaccgtcctctttcagaactgctctttcccgagccttttcctcctctccctgtgtgccctgtgagtgagcagagctgtctactgcttcccatccaaatcacagggagaagcgtgcaggctcttgtctctgtgtcttgcctgctctgcagatgccattgactggaatcagcacggcttgcctttcccttatgagcagtatctggcaaggggttccactgtagactgtaggatcatagttctgttttacttaatcccaaaatgattgatgctcccaggacttctttacagttctttgtaaggactaatccttgagatgaaggcaggatgagcctctctgggtggcacacctcccaagcacacaatgatgactcgagcttccctcctctgcttgctggctctctttctagagcttggtgtatcccacccccatcagcctgtggagaacaagaaggcagctgactctattcttattcctttcccataggccttcaccagagtccaggaccttcgatacctagaactgatcagcagtattgaggtaactgatgaaagcattttctgtcacaggatgcaatggcctgtaatactgaggacacgaggacaaaggccctgtagtctgttctggggatagagtggcccaagaggcaacacccgattaaccacttggtagttgaataaggcggaaggtttgggtctctctaagctctggttccttgtcctaagatgggatctatacgctaggcaacagtgatactcacctttcattcaagcactcaggaggcagaggcaggtggatctctgagttcaaggccagcctggtctacagagtgagttccaggacagccaggctacacagagaaaccttgtctcaaaaatccaagatgggggtctatcctgtggtactgctgtaagacagtcagactcttagaacctggtatacccctctggaatgagtagctgttgccatcctcctgacagtgaataaagcatttcccaaatgttcccagcatggcctactaaggcatcctcctgcccagaaggcctgcggtaggctaaagaatctggtctgactgcaccatttatgggtgatggaagacactatttttaatttctgtgtatctcggtgctgtctgactgtctgtaaaaaaggcatacatatttctttctcttgaacagatttattgtgaggctaagggaatgtgagacacattggagctcccagatggaagcagtgaagaaattgcaaatgtcttgcccctctaactcagtttagcagagtaaacgcttatcgtgggcctcagccctgtgtggggtgggggaggagagggggtagcaagcggagctgagctagggcagactacaatatggtagctattgttcattgagtctgttcatgtgcaaccaaagtatgagcgacacatacaaggtccttagtgtggtgagccaggtggtggtgtcagccctgtccagtgggggagagaggagaggcaggagaggataggctgcatcttcatgttcaaaaccccaggggaactcagacgcttcccttgctctccctaagctttggcacgtttgccctgtgagccctccctgtcccttctccccacacaggtgggcaagggctgcttggctgtcattgcctcatgctgctggctctcagggacgatgctcaccagggcttggtgttagccattgaggtcttcatccagatttacagaacatcacttttccctgcacagaagtaactggccagagaggacactgacttcccatttgtatgtcttagttcaaaaggtccacttttgcttatgatctgtgagctgagaattgtgcttaaggaactgtctctgaggacaagcagagaacactcaattgatctcttatgactgtcctgaggcctcagcttctggattctggggagccagcattaaccagggagctgtgtgcctcagtgggttcctgttgcatacctgggatgatagcatcctggtggcagaataatccttccatattgacagtcctttacaaacatgcgcttctgtggcccacattccccacaactgacacctatctcactacaaaagttcagttcactcacaagttttagatgtcagcttatttggttgattagcctgcactatgtgaaggtttaaaaatgattcctgtcactgctgaggcatgttgtctccagctgcggaaacttgtaccagcttgtcgagaagtttgattccatgtctcatccccctccagtgtgatgtacttgataggaaacaagcaaacggcaactgctggggctgaggggctgagtgctggcaagtgtttacaaatactggagctttagactaacacaggcggaaggtgtggggaggctccagtgtgcatgcgcttgcatgtacacacgtatgtgcacaccaggtgtgtgttaggaactctgcgtcacacgttatgaagagcgagctttgtgtgaccttgaccgttacctgttgtgcatcttaccttccttctctacaacactgctggtgctggggtcacaaagcagtggaattctcctgtatgaagtaggcattagcgcacacagtgtcttagagtttttattgctgtgataaaataccctaaccaaaagcaacttggaaaggaaagggtttacttcagcttaaatttccacatcacaacccatcaatgaagaaagtcgggggcaggaatctggagctgggagctggaacaaggactgtgaaggagtgctactcgctggcttgctccttaggcttgcgtagcttgctttcttatagcactcaggagtaccagcctgggttagcaccacccacagtgagctggacctccccacatcagtcagagagcatgccacaggcttacccacaggccattctagtggggtcattttctcaactgtgtcaagttgacataaaaccagccagtgcacagaatatctccacaactcttagaaacaggaacatagtcagatttgtgattctgttttatggcttccatcttggttgaaaatcccagacttagtccttgcttgttatcactgtgggtcacagctctgccacccaggtgtctgggccttttggagctcttgagaatgcaggggctgtccccaactctgagagtgcacaatccagtgattgccttgggcaagcacacaggataaaattcctgtggaatttccactgagcaaacaaaggtttgcctcttgtttgatcttcagtggtctgaaaaaagaacatgtctgcttttgttgttgagcattcccaatggagacataggtgagagacatagcagtctaggagccaagtgtaggctccagtaggaagactcgaaatagcagcagctagcctttgtaaaggctgcttcctgccatgactgtagaggccatttcctgtgcttctaatttttccaggagaggaagaagaggggagagaccaacaatgacctgtttctggcagatgtgttttcctaccaggggaagtttcatgaagccgccaaactatacaagaggagcgggcatgagaacctcgctctcgacatgtatactgacctctgcatgtttgagtacgccaaggtaatgtgcccaacctgccactagccgtcaacactctgacctgcagaaaatgacacagacagaaaatagggatgagtctgggtggtggtggtgcacacctctaatcccagcctcaggaggcagagtcaggtggatactctgtgagtgtgaggcccaaccagtctacagagtgagtttccaggatagctaggaatacacaagaaaccnnnnnnnnnnnnnnnnnnnnnnnnnnnnnnnnnnnnnnnnnnnnnnnnnnnnnnnntctctgtatagccctggctgtcctggaactcactttgtagaccaggctggcctcgaactcagaaatccgcctgcctctgcctcccgagtgctgggattacaggcgtgcaccaccacgcccggcaagaaaccctgtttttaaaacccaaaagtaaataataaattagttaataaaataaaatcaaacgagggtgacctaggaaaagggtgggcagattaataaacaggccctaagctggatgttagagtgacagcacatttgcagtacctgtcagcaacagctgtgtgggctttgagcatgccagcatgatgctgtcacctggtactgagagctgagggaagtctccacagattctctcagacctgggtcagaagccaccaaggtttagtatcctgagtgacaagctgatcctacaaggcagtgctgagtcactgaagccagcactccccagagagcctgctctaagctgcttgagtgcagagtgcttactgagcctggcgggaggagtggctcacttatgatgggttattcaggaaggtccccttttgcatctggaaggtggcccctgggttctctagacttttgaaggagcttcctagacacatgagccccactaaagagccagagttctccaggtgtcaacagcttagcctccaacaatgctgaaagcctaggtgtgaaacagtgaggttcttccttccacaaaggggcttggaagccctcaaaattctgtggagtcctcaagtcctagccacagccaatcagtggctgttactgctaatcacctagctcacaagtcccaagtagaacagcttccccattcttatttgtgcctaaccacagttggttttttcctacccatctgttagatctgtgactccttcacagaaggatgaacccgtgggctgctcctggtccctccccttcatacctcagatctgggctccaggcttctgaagcctcttccgtagcctcttccacactcccacccaaacacatccagcactctatgagatgctctttccactgaaaggtgtagatcctagggggagaatttaggcaccacagcccccagccctggttgctctttgagacgaagccctcagagctgctggtgggccactgtggtgtggtgcagccgaaatgctgccggacatccagagtgaagtatgattgtggaacccacagttcaccagcgtgtgaagactaacagagcatagcagaggtatagttcagaacaatgcataaaaccccaacatgccatgctgtagggaggagtagccaggcatgatggtgcatgccttcagtctcagtatgcagaaggcagaggcaggcagatctctgtgagttcaaggaaagtcttgtctacagagtgagttccaggacagtcaggggcacatagagagaccctgtcaaataaaataaaataaaatatgaaaaaagaaagatgaggagtgtgactgaattaaatccacatccaaggatgtgccttcctttgtagtagaacaggtaccctgggctcaattccagcgcacatacacatacacacgcacacacgcacatactagggaagtggagggccaggcatgactccagggtggatgcatttagacctctctctggccacccccgccccttggctcctttcatcgttcacctgcacttcctgaacccatggccttctacccagcagtgcagcctgctcatacactccatctggtgtgggtctccatgaagttaaatactctgggcttgttttgattttaattcttgaccacaattcccagcatgttggttccaactcaagcctgcacacacacacacacacacacacacacacacacacacacacacacacacacacatcccaccttggcttggtagtctgcatttgggaaatgtgtgcacacatacacattatgttgggggtgggagatacagtgcttattaacatggcatgtttttgtttacttgaaattgcttcccaagattcaatctggtttttggaaaaattttaaattacattcccacgtacaaataaattgtatgttttccggacaagtgacatgtttatgtggtgataaggggattataatgctcttaactcttgcatagtgcgtccttatcaggagctccgagtatgagaaccttgttcagtctcattcatcactctgcacggcctccttctgtccactccaggacagagtctttgctgtggcccccagataacgtgtaaattggctttatagaaccaaaacgcctttgaaaccccacttggttgagctttgaaggaactgttcagactcagcttgagttaagtcacagcctctccgttggctgctggggtggaggaggtgtgcctcctgtcccagtgagctgtgtgcccacatggttcacatggggaggtgcctcccattgtggcccctggcctttgaccttttccctattttatctcactgagcactcacttgtccctttgaaggacagttttgtgcttttatcatgcctgtctctgttgctaaccttatgcagctagctgagcgggaaagctctgtgtgcatgaagagttgatgtcatcataactgccaagagggaagtgtgtctgtaatagcccaagctaggtgtcctccatggccgctccagcctcttctctctctgccccaaggggaggcagaggacagctgtaggtgaccctatccttatttgttctgtaacaggtaaaagatgcccttcctccccttcctgaatcatttggttgtcttagaccaacctaatatatggttttaggggctacataattaccctgaaagcgaacggaaaaagaaatgagctaattgttcaagtgggtttctgcgtgcattgactgcactttcctgacaaatgagtgttaatctcaaggaaaggaatgctttttttatacttagtgaggttgacacagagcactctctgtagggtatgttctcctaagacaaaccacttctcacaatgcagatctgctctttatctctcagttccccattttgaaaagccccaccttgaaaagtgtcagcactgaggcagcttcaacagtggcagctctgtcctgaaaggaggcaacattctgaggctgtgtctggtgcgctttggtgggaacttagagagacagctggtcgtgacctgagcaacacccccgtcactggggtaaaaggactggccctgcccagtctctgaatccccagaaaggactatttctttcatctgtggctcctgtcatcccttctgcaagatctgatgtcactcagttaagaatgaaccactgggcagcactgggaggtagaggcaggcagatctctctgagttccaggccagccagagcaacacagtaagaccctgcttcaaaaaaaaaagagggggtggggatgaatcaaggagtgttttgtcagctctgtcatagacatatcttaggggcaaagccaacagaataagccgagttcaggccacagaacatctgaggaaaagagatgagaaaagcacttcagtgtggcagcaaaggaaggcacaagggaccaagcgcagaactctgcatcactgtgtgtgcttaagtttaaaccatgtgcgcagcaccagtctggggcatctgatggcatctcagtgtgactagtgattataggattagtatttgtaatttcccagacagtcatgtttctacccaactgtgtggaggtcacaaattaaccactcccagccccctccccgcagagtcagtgaggtgtttagaacaagtgtgaagggaaggagacagggagggcacagtccttgacatgtccctgcgccccagaagcacactcccttcctggacacctgggactaacccacacacagtcatcacacagagccgggctctcctgcatcctgctcctttgcacagccaagtgaagccctccctcccctactggctggagctgacgtaatgctggcacaggaagtcctagtccggaacggttttgtttgttgtgcttcctcaggatttccttggatctggagaccctaaagaaacgaagatgctcatcaccaagcaggccgactgggccagaaacatcaatgagcccaaagctgcagtggagatgtacatctcagcaggggagcacgccaaggccatagagatcagcggcagccatggctgggtggacatgtaggttcagctctagctgtggcagccatggctgggcagacatgtaggtccagcccttgcctggcaacactcggcagtctggtaactcttgagtttttaactaacaagagaagaatgctttctctcaatatctgcaccaaacatgaaaatgactaggttctctgggagataaagaacttgaacaaggtatagcactgcctttgaggagtatcagaagggggtcgtagggacctagggaacatacataggtgcccctcaggtgctgtgttgaccttacaggcctcagattatcccttgtgcctccagatcagtatctctacattcatctggcaaatgaggaaatcaagcctcaagggattaatgtgtcctcaaggaccaagcatctggagagctgtagggctaagccttaggctggcaggggtggtttcagagcccctaacacagtgtgagggtaccaaggtagcacaagaagagccctcaggggtgccagctctctgggaggaaccatggcatcttctcttgagtccttccatgaagtggccttgctgaaccttcaggtagagacaagtagaaggggaaagcgcataggcaggagacacagtaggccagcagggatggtgatgacttgcggtcggtcccaagggagcatggaggagctggaacagagagggagctagatacaaaagaatggaggagggggcaggccacgtgatggttccatcttaggacttggcacccatcctgcaggtgagtcagagcaaggggcacctgaggagagggagcttataaaggctactagttgtttaggaggtgacagtgtggtcctcagatactagcccatgacatagttaggccctagagaagaggagaggcaggagtgtgggccccacaacaagggacctgagtggctaccctacccccaatcttcccttgtttaggaatcatatcagaaagacacaggcttagatcttagattgtgccccaagaattctcttcaaaaagggggtgatgctaagggagccaggcaggcgcatggtctctacctttcccactagtttttcatttcagtttcatttgcaagtgctatgtattaagttcccctggggacacttaacaagttgaaggaagagacattaagtctgttctgtccctctcctggcagttccaggtacctctcccctaggaatgtcagtttggtgggtagggctcttaggctctggagggctgcctgtgctaccttcccctaaaaacatgtcctttttctgctaagcagtgttatttttaggtgccattattattctaagcgcagactgacaggccttcctgagcccgcctgtctgagattcggatctgttacagcctcttctgttctcacataaagcaggctgggtagattcctcaccttgcgagggctgctttaccccaaatcctgggctggctagacccacattgaatccagccatgtactggcgagcagtaggaaggtgatcactattgggaagtgactgggccttggggacgtcccctggagtgaggacacatttgtcaggacagggctcacatttgtcacttcctccagtgtgtcagttgctgaggcagcctcatgccccagcctctactttcctgtgggaattcctgacagtgctggaacaagcaccccggcccttcctgctgtggggtcttgggccacccttacatagattcaaactcaagtcatctcattgtttgcgatggtgggagggtgagaaagatgatacggagtctcatgagtccacctcagtatctggagtggaccccagggcttcctgatagctttattcctggggtcagggatgtacggcatgggcagtgtccccagttgcagtcactcttggctctgccattgcttttggatggtgcatccattctttccatatctgcctgtgaagcccttcccaggggccatagcatattagcattggacagagcagaatgaactggcacagagcctgcccttgagggtaccggaggcctcacagccgtcctccccacctctccaggttgatagacattgctcggaagctggacaaggctgaacgggagcccctgctcatgtgtgcttgctactttaagaagctggacagtcctggctatgctgctgagacctacctgaagatcggggacctgaagtctctggtgcagctgtatgtggacaccaagcgctgggatgaggtgagagagagcacacttgctgggcaggtaggggctaagatggagagaaactgtccacatgatggaggtcattgcctcaaagtctctgagccagaatatcctagaggaccttttccactaaacttcccattttttttcactcattcattcattcattcattcattcagaaaaactgatacagggtgccagctctaggccagccccacgacaggcactagggatatgtcagcatgacagccccagcacctgctgctggtctgagctgcctctggccagcaccacagcctcaggctcacctctgaagaaggggcaaccagtctggcattaaaaacctgtgtggcattttggcagaaaataccaaccgtatttttcagatacaagctaccagagctatttctagggcagttgctccctgcccctgtcctcttcccagtcttgactgctgtgtgagaggaccagagagaagaatcagccaggcaaatcagagagacagctgtcctggggccaaggctggctaggcagctagggcagagcccctctgtgcctgggtccatgcctgtgccttggagagagtgtcacctgaagagaattagtgccatccacccgccatgacagtcttcttacagagctatagcaaggcactacctaagtataagcagcctggctcctgtctgccctcctggtggctcaacttcctgaggtgacaggtcactgacaagaaaaacaggccaggttggaagctcctcaaggcacaggttatccagctgtggcagttagcatgtcttagaccctccatgccctgtctaccgctctcctgcctaggcaggtgggctgcggctttaatgaagcagtcactgagtcccatgcaacattgtcctcagtcctctctgacagctagtgatgacgctgctgtcaatcctgtttccttaggtgtcgcctacaattaaaagaaatctgtttgccacgctacaggagcccacgcaaaccctcaaaataaaatgtttccgattttgtgctgcttctgtggtccagaaacagactgtgttgttattgaatccagtcggttgcatattgccgttaattgccttttgttttcaaagagctggtttgttttttgtgttgnnnnnnnnnnnnnnnnnnnnnnnnnnnnnnnnnnnnnnnnnnnnnnnnnnnnnnnnnnnnnnnnnnnnnnnnnnnnnnnnnnnnnnnnnnnnnnnnnnnnnnnnnnnnnnnnnnnnnnnnnnctggcaaaatatgacatccctaacagattcagccaagtgccacattgtcaggggtggcagggggcccgcttcattaagactgcctcttcctcctcctaggcctttgcgttaggtgagaagcacccggagttcaaggatgacgtctacgtgccctacgcgcagtggctggcggagaacgaccgctttgaggaagcccagaaaggtaggccacacagcacactgtgaaagggctggggaggctactgaggcatggtatagaggccgcctggccccttccttcctcagcaggtcccaggacaagtaccttcatcctggctcatgatgtgtgtgctagtgaaagactttagaataaggacaggaacattgaggccacgccccctgggcccattgcatgaccttcttccaggaccccagacaggcccttgctctttagcaggtccctgttaaccttgcaaagcacctgcacctgtgccttccctttggtcttcgggatgctctctggcatggacacctcggttatttacatttgccagtgaggaaactgatgttgaaggagataaaggagtttgcctgtagtcctctggctgggaagctgcagcgatgttacttgattgagccaaggtatacattgtcaggacaaagtgagagggcagcccttgctgtctagcagagtctcaccttcattttcctctactgagaatgaaatgggctttgtttctgactcaggcaagccaagcagcctctctgccccttggtgcttctgttggtgaaatgagccgtacacagggtgtgacggcatctgaaatagaagccaaggcaagtatggcacattaaccgacagcgttcatcatcagttagcgatgtgaccgccttcgctgtggcaggtgctggctgggcacttaacctgcataaccttgaatcttgccaacagccctgcagagttgcagaggctccatgtgctgtgtgaagctagcgagcagcagagccggaattgaatcagatctgtccaactgggagcctaattcttacgcctgtttagaaagtctcctaattgaagtgggtgggtcatattccatagcatctcatttacacttgtgtgtggtagcagttaccacctcctgacacactgcagaacaaatgtcccctgttggagctccttggttaaaagcccctgtgaaggacagcgcgttctctaccgcctcagcatttacagagcacccagttgctgaagtgtctgcatgtttgggcaaaacacatcaacctatccatctgtctttgtcgcccttccaagaatccatcgccatagtaacttggtactcagacaagagatagaagatgagaatgaaccaaggccagacctttccttctctgcaggttgaagatgtaggtcatttggatgctcacacatggtcaggtgtcagagctctgacttagtcttctggcagccccagggtccccagaaatttgccacatggtggtgaggggtgcaggaaatttctgctagccataggcttgtttttataaatgtctggttttgcaagctgagccagatctttcgaggttggtatctgaaagcactcagcttaaggtgggttcagtactgggctggcttctgttctttgaccttgggcatgatgttttatctctacctggaaaagcccatcattctcatgtaaggggggtggggctgttctccatctttagaattttgtcctgaggattcggtgtataattaatagtgaagggattttgtgaaccaccaggctccatagtgggacctgctagtgctacccaggagtgaaaaagtctcagtctggagtggagtggagtggagtggcgtccagttccctgtgtgcagtgccaggcttcggtgcttcaggttttctctctgctgtgccttgctaaagtaggttgccatttcccagccaaaaggagtgtatctccccgtgcttatttcaggatgtagccttggttatttatagcctgcggcctgagaggcacatctcggcagcgaggcatcccagatgctccgatgagtggcctgcctccctcttgagcagtctcgtgtaagccctgcagcctccctgctccatgctgactccctatgacatgcgtgtgctttcatggcccttagccttccacaaggccgggaggcagggagaagcagtccgggtgctggagcagctcacgcacaatgctgtggtggagagcaggtttaacgacgctgcctattattactggatgctgtccatgcagtgcctcgacatggctcaaggtgagtgagcaacagccggctggcctcttccctggcccctctttagcatcagataaaatcagaagagcagagctgtttcattaaagcactgggcttgtttattgagtgttttgtccccgagcctgccttgcaatggcacaatctggcctgtcatctctttcaagtttgcctgtaagtaggacttgctggcagtctgtcttctgggtaggaggtcccaccctgcattgctaattcagagcatctccctctcttgctacctgggagcctggagctgggcccaagtgagccctggcttaaaaaaaaaattttttttaattaaatgaaaagatgaagagatcactttacaataactcactccagactctccctcatcccaggcaggaggacagtttcagacttgctttcattcatgtggcttcccatgatcccctggcaagttctgaaggaggtagctgtacccaaggctgtgtgcagtagtggaagggcactggatgcagagtgtgcagggcgacagtgtgccctgaagtcacagctgccaggcccaggtgccaggtggggtttttctgtcctggccattgatgtgcatctcagataaatggctgacaagcccaggtgcagcgtgagcacagagagccagggaagatgccatctgcccatcccaccaggatcctttggtgtgtttccactgctgggcataacaggtgctgacccagtggacagggctgggagggatctatgcttaggtgtttcctggccaggagctctacccagctaaggcctactgtcatccaggatggactactcttaagcaggacacttgtccatcgctgccctcttggcccctagccaaggagcagcataggaggaaaagatatcacttgacacatttcccctccttccctcccgtgctcctcccacacagcagatcctgcccagaaggacgcgatgctggacaagtttcaccacttccaacacctggctgagctgtaccatggctatcaaaccattcaccgatacacggtagggtgacaaggagactggtgtagcaccttcggtgtcacatgctcagcaagggcctcagagagatggggtatgtgatgagctgcccagaagccctgcccttctcgggagggaagcgctgctccctcacctgccacggggctcggaattacagtacagggctgagcctttccagtttcgagttcactatttgatgcctctctagatcagcaaaggctcaagttctgtctttggccctcagtctcctctgtaaaacaagagggctagcctgatcccaaagacacacaattagttaagaccattccctgatgtttgttttgtttctgtttttttttttttttttgttgttgttgttatttgttttgagacagggtttttctgtgtaacaaccctagctgttttagaacttgctttgtagaccaggctagcctcaaactcacagagatctgtctgcctctgcctccctagtgctaagattgaaggtgtgtgccactactacccagccccattccatgattcctttgataaggccttgttggtaccatctgcctcatgctgtgtctccacagccctccagtcttaattttttttaaatatttatttattatatgtaagtacactgtagctgtcctcagacactccagaagagggagtcagatcttgttatggatggttgtgagccaccatgtggttgctgggatttgaactcctgaccttcggaagagcagtcgggtgctcttacccactgagccatctcaccagccccagccctccagtcttgattaacccactctgaacttatcctgtggcaacaagctgggccccaccagggtcccccggctcccattagcaagttcctgctctgtgttgtaggctttgtcatatggactgatatcatccttcagccacactatgagataagtacctctgcagatgaggaatgccaggtgccacacagagaagagccatagtgtcccctgacccatggggcccatcagtaagtggcagagcctgggcttgagtctctgctgattgcagtctgtgctctcagcttctaggatgtgggttcacaagctatctctggatgcctgggtgtcccactctgatgtgtgacttgggaaatcctgcatatctgtgcttagtctccatctctatggaatggagatggtagctggggtagctcagagggcccagtgcattcactttggaaatgtgactctggtcccctttctacctcaggtttcagagcagcttctataggagaccgctcacctccgtccagtgtcagaggccctgctttccccaagagtcccgctccttgtctgtgttctctctgcactgtccaagtctcagggaaacattgggtcccacttggcctattctttgcactgggaccatctctttgccagcagcatctatgggctcaagcagacccgtctttcatttaggccccttgtctcaaacagctgagaaactatgaagatgggcgctggtgttggaggcagtccagcctaggctgggtgtgctgagctgccttgggtgcctagccctggtcttctgattgccagctctcgggcttctccctgctcactgtgtctgtgcaggggtcttctcacctaacagctgagctctgttcttgatgcacatggtactgagctaggggccacccatgggccccaggctggcatccaggcctaagctttgggctattcccccaaccagtgcctgtgtgtgacagtccctgtgatgaggcctgggacacagtgataagcaagacatagtccctgccacaagaaaccccacccccaccccctatagtaagcaggacagcccctcatgggaaaagctttgaggtggcttctttgagaggaggtgatccctccaccaaagaggggcacaagtgaagaaggggaggggaaaggatttgtggcaggcagactgtggtctggcaaaggcctggtggccagcacagtggaggagttgacattggggccaagcaggagccgctcctaagaaggcagagaggaggtgcgcacgcctttaatcccagcactcgggaggcagaggcaggcggatttctgagttcgaggccagcctggtctacaaagtgagttccaggacagccagggctacacagagaaaccctgtctcagaaaaacaacaacaaaaataaataaataaataaattaaaattaaagaaaaaagaaggcagagagggacacagatttttcctgcggctcattgcttcttccctagagaagcattggtgacccagactattgcttccctaggcctggactcttccagctcacacccaggagagcacgagtttctttcagttcctggagccaacagaaactgtagaaatgcaaatgggcaaaccagcactcaggagatggaggcaggacggtcatcctagctacctaagggagattcaggccaacctaagataaagaccttttctcaaaagcaaaaaggaggaaaggggaaaaaacaaacaaacaacccctgaaagaaatgtaactaggaattcaggagaagtcactgggctctgaaccaaagtagaaagtcacttctctcagctttgggcctcatgagggcctgtcctggtggctgttacagaggtcctaaacctttacggagagcttccagtgggcgggagctggccagcctgtgaacatctgaagtttgcacttgtagctagattgcagtgtcaggctccctcaaagcaggtcttcatgcacaggccttccctgatggggtgggctgtactgcaggcagcccccgagtacaggtctgttcatggccagtggtcatggagacctgttagagcttgggccagcctgggcactgtgtgcctttggtggcacattttgcttcggtagctgttgaagaataaagaagagccttactgtgtcctgcaggaaggagttaagctccccactaggtcatgtcctcattcccagaaaggccttgagctcaggaagcagagcatccccagggacaccagagctgagagaagcacattcttcagggttgaggggtcagctctgagttcgaatctccactctgccctagtcttcgagtaacatgggctgtcctttatcaggacacattcctctctggtacagtgtgactgaaagtaatggcccacaagcctgtgttgaaagctagtggggccagctgtggtggcgggcatgcggtgatggccggcatgcggtaggtggtcagtgtgccctactcattccagtggggatcgttatacctgttcttttgctgcaggaggagccattcagctttgacctccctgaaaccctcttcaacatctccaagttcttgctgcacagcctgaccaaggccacccccttgggtatctccaaagtgtatcctcccccacctccctccctgcccgctgtctaatggccccagtgctccacagagcactttactggcagaagctcctctcttagcagccactggggagtggggaaaggctcggctgggcagctgagcagccagtgccaaggggagcttggctttcagggttgtctagctgtgcctagtctgcaatcctgatcagcacctgtcccaggcctcccagaacccacaaaggagggtgggactgagaactggaagccttctggatctggaccatgtcagtcaaggtgacaaagctgtcatctagtaggggtgacaagaggcaagactgtttctgagatttgtaccctgtgcccaaaagtaagacagaggtaaggctgggtctagtcaggggcagcaagaaagactgtagataggtcgggggctatagcagggaagactgtagatagggcgggggctatagcagggaagactgtagatagggtggggctatagcagggaagactgtagatagggtgggttctatagcagggaagactgtagatagggtgagggctatagcagggaagactgtagatagggcaggggctatagcagggaagactgtagatagggcgggggctatagcagggaagactgtagatagggcgggtgctatagcagggaagactgtaaatagggtggggcctatagcaaggccccatgagatgggtgtggacaagcccagctcctatgtgggttacttcaaatcctgtgagtctacttctctgctagtgagagccacagaggggttgtagtccagcatttcacaggcctgaaagtaacttcatgtcctgcttcacccagctggccggctgcctcctgtaggagcctgccccagaaaagcacccccagctcaccattaagaacccatttcctggatggtccattatttattcttcaggggaaacaccccagacaaggaccttcactgtgataacgcctttcactggcaggccaggctcaccaaaggagccatcatagctatccctgctaccctgggtacccgagactatcttgtcccaggagttcggttgatttacaggatggttaacttgggttctgagcctcccctggtgctgtccaatagaaacacagaagtgactactgacacaagatgctttctagcccagtagtgggtagtgctggctccaggtcacacctcttttgtccttaaccttgccaatggcaggaatacactcttcacactggctaagcagagcaaggctctgggtgcttacaagctggcccggcatgcctatgacaagctacgggggctgcagatccccgccaggatccagaagtccattgagctgggcaccctgaccatccgctccaagcccttccatgacagtgaggtaagggcctgcgtgcctttgaacctagtctggttctgttggaagatggctgctgtggccttggctcccctgccagtgcactgggatagactgggttcttcctagctgtgccttaggctttcagtgcctcagtttcctgctctgtcaggtgggtatgtataaacccttacccacaggtggtagggggtacttgtgcagcataagtgatgtatctgacacagtgcctagacctggcaagtggcaggagttgacagtggatacagttgttcctttgaagatagcgtcctgctaaggcctggcttggagcaggtgtctgggctagtgagcctcaggtgtagtcttagttggccagcctctccacagcatgccatctttgaccctgggaggagatggaggtatgcacacttctggttcagcctgggcagacgtgaccttgctctataggagctggtacccttgtgctaccgctgttctaccaacaacccgctgctgaacaaccttggcaacgtctgcatcaactgccgccagcccttcatcttctccgcctcttcctatggtgagctccccactgctttacagacacgtgacattgtgcagaaggtgatgccaccatgcctcagatgcagaattgctgtcagaatccacggaggcaaggcccagcatgtccccagccagaagtcccactctcagctggggtctgagaggctgagggagcagtccacctcttttaaaacagctatgtgggggaggggctgctggagacctggccctcccccacatgcactgtgtcccttgcctgcatagtggctgcttgggaaaggggacatgctctggctgttccacctgctcacctggtgtgagtgacagccccaaagctctcctgaagccatcccccagcccctccctgtccccccagaggtgctgcacctggtggaattctacctggaagaggggatcactgacgaagaagctgttgccctcatcgatctggaggcaccaagacacaagagggagggcaagtggcgagagacctcaagcaacagtatcctgtgctcttggctctggccaggcaggggtagggaggcagggaggggacgcagcatggactgtggcagcaggcagggacaaaaggatcagatcaagaaagactggggaggtccccacatagtgaggaccaacagcagagggggcagagcggccagggcctgcaggcacagggagagtgtccccttcatcttcatctgccctgccctgttcctcaaggcactgctcctgcttctgcccacagctaagcggagctgtaggatataaacttgggggaatccctaggtttctcctcaggtagctttttcatgcagtggtagcaatcagtactcaagctgagagaattgagtgtgaggctcccaggtgcccatcccactgtccggaggcctctgcaccccttggttctgctttccttgggtacttcatcccacctccatagcagtgacagagggggaacaccagtaatatggctgaggctctaggacaggcggtaggtatttcaacacccctggtcctcgaaggacagttggccacacccaccacattcctacgtgaggccctcctacttgtgctttagccagctccaacaccactgggcagagggaaggctcataggatggggtcccgtgatggttcttgcccttccctccatggctgtgactgctgagttcctcaagtggcagctctaggcctatggctgcacccactcaggactcctggatggacacttcctgtgagccacggtgtgactggatgataggaccccttctctctctttcccctgttccatctggaggtctcttccagccactgtaccactccccccaagtctgtgagaggcagcacctagctgagctcctgggagtcgctgtgtgggctggagggtgttgtacctgtaccttactgggcttcaggctccacccttgaccagacccctccagattcccagacgttgaagctggacgagaccatggactccataggagaagatgacccatttacagccaagctgagctttgaggtgagatggtgcagccagtgctttccccaggcacacagggacccaccctcagttagtgtggcagtgagaaagagaacgagatggctttctctaatgactgtggttctgagagcactccagtgctggcagggagcatgttactgttaggggtggctgaaggtaagaggtggtagtgtccctttggccaccaaggaccctgggatcaggccaagggcatatcgcccatgtacacctcccccatcccccccaccccccagcaaggtagctctgagtttgtgcctgtggtggtgaaccggtcagtactacgctccatgagccgaagagatgttctcatcaagcgctggcccccgccgctgcaatggcaatatttccgctcgctgttgcctgatgcctccatcaccatgtgcccctcctgctttcaggtacccggcctacagctcctccattcaggtcgcctcttctgcccctccattctccctatctcctttgggaagctgggcgtatagggggaattgtgagctgcccacagcctgccctctcacttgcatctgcccagctggctgcagtggaccttagctggttcctgctctgcactcccctgagtgagggatgctctacctgtgaacctcattcagataaagagccctccaggcctcagggcagcatgtcccagccctgccaggctcagggcttgagctggccctgcctccctgtatcacgggctgtctgcctctcctcagatgttccattcagaggactacgaactgcttgtgctccagcacgcctgctgcccttactgccgaaggcgtatcgacgacactggcccgtgagcagcgacagcctctgggaccacggctcccatggtctccttgctgtccccagactgttgggagaaggaattaaaccctcagaacacgtctcctgcccagatgaagtttgtatgttgcaaagggggggggggctgccttgtgtaaccacagatttcctatttatggcatttcattccttgtaaatagcaccaggagacggggaagagaacacacacatattttctaagaaaaaaaaaaatctgttacttttagaagggctcatgtgttcatagcagcctgctggagtccgtagatccgtcagaccattaccgtgcacacgttgccaacagattgcctcaataacgacaaataaaagggctactcgttttca

SEQ ID NO: 338 - DNA, 4234 bp, Mus musculus
ttggagctttgggaaactcatgcgcggttcattgcgcatgtgcgttgctaagggtagcgcaggtagctgaagtggtttgtggagagaagcctgttgctgccgaggctgggaggaggggcccgaagcgtgagggaaacggcgatgagggccgtgttgacgtggagagacaaagcggagcatatctacgacctcgcatttaagcctgatggaacacaactgattctggctgcaggaaacagattgctggtttatgacacctctgatggcaccttacttcagcccctgaagggacacaaagacaccgtgtactgtgtggcgtatgcaaaggatggcaagcgctttgcatctggatctgctgacaagagcatcattatctggacctcaaaacttgaaggcattctgaagtacacgcacaacgactctatacagtgtgtctcctacaatcctgttacccaccagctggcatcttgttcctccagtgactttgggttatggtctcctgagcagaagtctgtgtccaagcacaaatccagcagcaagatcacgtgctgcagctggacaaacgatggtcagtacctggctctgggcatggccaatggcatcatcagtatacggaacaagaatggtgaagagaaagtgaagatcgagcgccctgggggctccctctccccaatatggtccatctgctggaacccttcaagccgatgggagactatctggatgagcagagagaacgaggatgctgaggatgtcattgtcaacaaatatgttcaggaaatcccttccattctgaagtcaacagtgtacaatagtcagggtagtgaggcagaggaggaagagcaagaggaagaggacgacagtcccagggacggcaactcagaggaacataatgacatcctggctgtagctgactggggacagaaactttccttctaccagctgagtggaaaacagattgggaaggatcggccactgaactttgacccctgttgcatcagctacttcactaaaggagagtacattttggtgggaggttcagacaagcaggtatctcttttcaccaaggatggagtgcgactggggaccgttggggagcagaactcctgggtgtggacctgtagagtgaaacctgactccaattatgtggtggtcggctgccaggatggcaccatctccttctaccagctcatcttcagcacagtccatgggctctacaaagatcggtatgcctacagggacagcatgacagacgtcatcgtgcagcacctcatcacagagcagaaagttaggattaagtgcagagagcttgtcaagaaaattgccatctacaaaaatcgattagctatccagctgccagagaagatcctcatctacgagctgtactctgaagactcgacagacatgcactaccgggtaaaggagaaaattgtcaagaagtttgagtgcaacctgctggtggtgtgtgctgaccacatcatcctgtgccaggagaaacggctacagtgcctgtccttcagtggagtgaaggaaagggaatggcagatggaatctctcatccgctacatcaaggtgatcggtggccctgctggaagagaaggtctgttggtaggcctgaaaaacggccagatcctgaagatctttgtggacaatctttttgctattgtcctgctgaagcaggccacagccgtgcgctgcctggacatgagtgcctcccggaacaagctggctgtggtggatgagaatgacacgtgcctggtgtacgacatccacacgaaggaactgcttttccaggaaccgaatgctaacagcgtggcctggaacacgcagtgtgaggacatgctctgcttctctggaggaggctacctcaacatcaaggccagcaccttcccagtgcaccagcagaagctgcagggctttgtggttggctacaacggctccaagatcttctgccttcatgtcttctctatgtctgccgtggaggtgccacagtccgctccaatgtaccagtacctcgataggaagatgttcaaagaagcataccagatcgcttgcttgggagtgacagacgctgattggcgtgaactggccatggaagctctagaaggactagagtttgagacggcaaggaaggccttcaccagagtccaggaccttcgatacctagaactgatcagcagtattgaggagaggaagaagaggggagagaccaacaatgacctgtttctggcagatgtgttttcctaccaggggaagtttcatgaagccgccaaactatacaagaggagcgggcatgagaacctcgctctcgacatgtatactgacctctgcatgtttgagtacgccaaggatttccttggatctggagaccctaaagaaacgaagatgctcatcaccaagcaggccgactgggccagaaacatcaatgagcccaaagctgcagtggagatgtacatctcagcaggggagcacgccaaggccatagagatcagcggcagccatggctgggtggacatgttgatagacattgctcggaagctggacaaggctgaacgggagcccctgctcatgtgtgcttgctactttaagaagctggacagtcctggctatgctgctgagacctacctgaagatcggggacctgaagtctctggtgcagctgtatgtggacaccaagcgctgggatgaggcctttgcgttaggtgagaagcacccggagttcaaggatgacgtctacgtgccctacgcgcagtggctggcggagaacgaccgctttgaggaagcccagaaagccttccacaaggccgggaggcagggagaagcagtccgggtgctggagcagctcacgcacaatgctgtggtggagagcaggtttaacgacgctgcctattattactggatgctgtccatgcagtgcctcgacatggctcaagatcctgcccagaaggacgcgatgctggacaagtttcaccacttccaacacctggctgagctgtaccatggctatcaaaccattcaccgatacacggaggagccattcagctttgacctccctgaaaccctcttcaacatctccaagttcttgctgcacagcctgaccaaggccacccccttgggtatctccaaagtgaatacactcttcacactggctaagcagagcaaggctctgggtgcttacaagctggcccggcatgcctatgacaagctacgggggctgcagatccccgccaggatccagaagtccattgagctgggcaccctgaccatccgctccaagcccttccatgacagtgaggagctggtacccttgtgctaccgctgttctaccaacaacccgctgctgaacaaccttggcaacgtctgcatcaactgccgccagcccttcatcttctccgcctcttcctatgaggtgctgcacctggtggaattctacctggaagaggggatcactgacgaagaagctgttgccctcatcgatctggaggcaccaagacacaagagggagggcaagtggcgagagacctcaagcaacaattcccagacgttgaagctggacgagaccatggactccataggagaagatgacccatttacagccaagctgagctttgagcaaggtagctctgagtttgtgcctgtggtggtgaaccggtcagtactacgctccatgagccgaagagatgttctcatcaagcgctggcccccgccgctgcaatggcaatatttccgctcgctgttgcctgatgcctccatcaccatgtgcccctcctgctttcagatgttccattcagaggactacgaactgcttgtgctccagcacgcctgctgcccttactgccgaaggcgtatcgacgacactggcccgtgagcagcgacagcctctgggaccacggctcccatggtctccttgctgtccccagactgttgggagaaggaattaaaccctcagaacacgtctcctgcccagatgaagtttgtatgttgcaaagggggggggggctgccttgtgtaaccacagatttcctatttatggcatttcattccttgtaaatagcaccaggagacggggaagagaacacacacatattttctaagaaaaaaaaaaatctgttacttttagaagggctcatgtgttcatagcagcctgctggagtccgtagatccgtcagaccattaccgtgcacacgttgccaacagattgcctcaataacgacaaataaaagggctactcgttttca

SEQ ID NO: 339 - protein, 1234 aa, Mus musculus
MRAVLTWRDKAEHIYDLAFKPDGTQLILAAGNRLLVYDTSDGTLLQPLKGHKDTVYCVAYAKDGKRFASGSADKSIIIWTSKLEGILKYTHNDSIQCVSYNPVTHQLASCSSSDFGLWSPEQKSVSKHKSSSKITCCSWTNDGQYLALGMANGIISIRNKNGEEKVKIERPGGSLSPIWSICWNPSSRWETIWMSRENEDAEDVIVNKYVQEIPSILKSTVYNSQGSEAEEEEQEEEDDSPRDGNSEEHNDILAVADWGQKLSFYQLSGKQIGKDRPLNFDPCCISYFTKGEYILVGGSDKQVSLFTKDGVRLGTVGEQNSWVWTCRVKPDSNYVVVGCQDGTISFYQLIFSTVHGKDRYAYRDSMTDVIVQHLITEQKVRIKCRELVKKIAIYKNRLAIQLPEKILIYEKEDSTDMHYRVKEKIVKKFECNLLVVCADHIILCQEKRLQCLSFSGVKEREWQMESLIRYIKVIGGPAGREGLLVGLKNGQILKIFVDNLFAIVLLKQATAVRCLDMSASRNKLAVVDENDTCLVYDIHTKELLFQEPNANSVAWNTQCEDMLCFSGGGYLNIKASTFPVHQQKLQGFVVGYNGSKIFCLHVFSMSAVEVPQSAPMYQYLDRKMFKEAYQIACLGVTDADWRELAMEALEGLEFETARKAFTRVQDLRYLELISSIEERKKRGETNNDLFLADVFSYQGKFHEAAKLYKRSGHENLALDMYTDLCMFEYAKDFLGSGDPKETKMLITKQADWARNINEPKAAVEMYISAGEHAKAIEISGSHGWVDMLIDIARKLDKAEREPLLMCACYFKKLDSPGYAAETYLKIGDLKSLVQLYVDTKRWDEAFALGEKHPEFKDDVYVPYAQWLAENDRFEEAQKAFHKAGRQGEAVRVLEQLTHNAVVESRFNDAAYYYWMLSMQCLDMAQDPAQKDAMLDKFHHFQHLAELYHGYQTIHRYTEEPFSFDLPETLFNISKFLLHSLTKATPLGISKVNTLFTLAKQSKALGAYKLARHAYDKLRGLQIPARIQKSIELGTLTIRSKPFHDSEELVPLCYRCSTNNPLLNNLGNVCINCRQPFIFSASSYEVLHLVEFYLEEGITDEEAVIDLEAPRHKREGKWRETSSNNSQTLKLDETMDSIGEDDPFTAKLSFEQGSSEFVPVVVNRSVLRSMSRRDVLIKRWPPPLQWQYFRSLLPDASITMCPSCFQMFHSEDYELLVLQHACCPYCRRRIDDTGP

SEQ ID NO: 340 - DNA, 30671 bp, Mus musculus
ccccgcggcgcagccagcatgagtaccggtgccttctacatctccagcctgctggagaagatgacgtccagcgacaaagacttcaggtgcgccctgtgggggctcgggactcgttttcaggggtctcagcctgtcccggccgcccctctgctcccctgccccccccctgcggacccctgtgggagcccccgggcctcttcgcctgggcctggctgggcctgcagccccgcccccagcctcttcccgcctttgctgtgctggcctctcaagtccccaacactgggcgccccccaggctctccagtgaagtccccgtcggcctctctttggaacccagtgcagtcctcttctgaccctcattgaaacaggccgcttccctgcacaacctccatccaaggctatcttccgagacccacacttctgcccggtctctaggttaccccatcccccgcaccctgtacccctaccgggtctcctaaccctaacaaactttacttttctttcatctctttcttttcatcccgtgccttttctccctggcccctcatcaccaccccatcttccttattcccctcctctcccaagatggtttagagcaggaagcaaaggttggggtgagggctatctctctcccccattctttttctcctatcctcctctccaaacaccacagaaacacaggaacagagttggcaagaggaatgggaatatctgatgcagcccctcttgcaggggaaactgaggttcagtgataaaaaggggttgttggtcagttgtggaccctcaagtcaacaggacagtgcaccattctgagtcttctgtcacagtagttatccctccgattacaaacagggaaaattaggttcagggacatgaagggcctggatacaatgctaacggtagggccaagcagagttggaggtgtcagtgggattcccaatctagccagtccggaggggccagaagcctatttgtgtggtctgaccttttccgtgtcctgtaaatacagtcctcaaaaatctctgtgcagccctaagccccacagtggtagtagggcttgggatcctttgccctggcttcagatctcggcaaccatcactaactagatctgtaagtgatgggcaaagtactccatgccctctgagccttagcttagctgtttgtgctttaggtagcaggtaagtgctttgtgaatggttgtcctgactctgtgcagggaaacggggcaggtcctggtagactgttctttgttctttgggcccaagttctttctgttctccagaagtctggagggggctttgacttactcaaagtcacatggcctgccagagttgagggaatgactcctgggcctatcagggagttggctctatcactcagggcctgagaagccctttaaatctgtccctgccagcagcgttgaggacacctaaaaccaccctgagcatatgagaatggtttctatttttaaaagtctgaataccaagagcctgagcctcctcccaacccccgccccccaccagctgtccaggcaccatgtgtcccagtgtcctatggtgctgcctctcaacatggcaggagaccatggcttatggttcccagcggggaatgtctgactggggttccaggcaagggacagccagccttggttctcagttttatttggggatcagactcttgacagagaaaaccaagaacttgagaggtctgacagggatgtccaaatcctttttcactgaggcagtgctgtttgaggattcaggtgacctacctcacgctggtgcttcgtaacctctctgagcctgcttgctcagattgacctattaaaaccctcaaggatgctgtgggagaggggcaaagacaatttccgttttattcatggaaaaaccgaggcttggggttaaggaggcagctggccaaattttacctcactgataagacaagtatgtttacttaaagcctcgctctgctttggagctcttgcttgtcaaattattatccccaccaccccagcaccatgacatttcctctgagagtgatgtctgcagacctgaggtgtttgaaatgctgcggtatatttgtgaatgttgatttctgggttcgggtttccacgaggccgcttggctctaagccagtggttctcaaccttcctaacactgcacacctttaatacagttccttgtgttgtggtgacctccaaccataatatgaattggttgctactcataactataattttgctattgttcggaatggtaatgtaaatacttgatgcaggatatctaatatgtctcacacacacacacacacacacacacacacacacactccaaaaaggggcctcgatccacacctctgctcaaggtctgttgagcacaaactctcctgccctcaccctgctcccttgtcagacctgttccttgctgagcttggagtattagatgtgagcctgctgagcaagagtatgtgtgcacgcacatgtgtttatgtgtgtgcaagatatgtgcatatatttatgtatgtatgtttgtttgtgtgtacatgtgtgaaagtatatgtattcatatatgtgtgtgtatgtgcatggtatgggggttattatgtgtatgtgtatatatgtggggatattatatgtctttctgtgtgtgtgtgtgtgggtgtgtgtgcatgaagtgttctcatacattcgctgtatgggagaaaagtgctgtcaaggaggggtgcaaagtcctgaagtgactatctagggagactgtaatgcttaggtgtgtgttggtcagggtgatcaggatcacccctgaagcaggaacatttgcatcaaactctttttttttttaatttatttatttattatatgtaagtacactgtagctgtccccagatactccagaagagggcatcagatttcgttagggatggttgtgagccaccatgtggttgctgggacttgaactcgggaccttcggaagagcagtcggcgctcttaaccactgaaccatctcaccagccctgcatcaaactcttgatgggtgcgctagttggttttccaagtcaggttgacacaagctagagtcacctaagaagagggaaccataattgagaaaatgcctccataagattgatctagagatagactgtggtccattttttaaaattagtgattgactggggagggtgcatcctgttgtgagtgatgagggccctgggcagatagacttggggatataaggaagcaagttggaagagtcattcgtgcctgtatgtcagtaagcagcgctcctctatggcctctctgggcgtagtggcacatgcttttaaacctccacggcctctgtctcagttccaggctttcagtgatagtgtcttagtcagggtttctattcctgcataaacatcatgaccaaaaagcaagttggggaggaaagggtttattcggcttacacttccacattgctgttcatcaccaaggaagtcaggactggaactcaagcaggtcaggaagcaggagctgatgcagaggccatggagggatgattcttactggcttgcttcccctggcttgctcagcctcctctcttatagaacccaagactaccagcccagagatggtcccacccacaagaggcctttcccccttgatcactaattgagaaaatgccttacagttggatctcatggaggcatttcctcaactgaagctcctttctctgtaataactccagcctgtgtcaagttgacacaaaactagccagtacagactgtgatgtggaagtgtaagctgacataaaccctttcctacctaagttgctttggtcatgatctttatcatagcagaagaaaccttaactgagacagtgagagcatgggagtttggcaggcccattggggccacatgcagcagaagttcagcaaggtccaaaagcaaacaaactttatcctaaagtgcctgggtggtagatgggatagcaatagtaccttcctctctatcagctcagcttcctgccttttctcagcagcttcaggctgatccagctgttaaaattaagaaatggtggcatggacagggtccctccaggttctgtgggcggccatgatatcaaacagcagacctgggccagcaatgtaagggctgggaccccactctagtggtgacagacgggaagcaggctttgtctggactcctctttgtagcatctctcctgctctggctcatttccactcaagtccccgttcctgtgtgagcaggagctagcaagcatggtggcctgtgggagcaggtgtcccgagaagtcttctgcagttagtgcactaggtagagacccaagtcatatttagatcttctgtttctgggagttagaagaatactttaatgctcttcagatattggtgagtaatttacccaggggaaaacatgtttgtaagcctcacacagctgagggcagccagctaggtcctctgctctgccctcttcatttcagcaggaatgatgcctcatgaggccctttcattccattctctgttgccttctgacttggactcccagggtaagccagatgctcaggacagcagcaggcctttttaagaaggcctcgaggcctcatctgcctgggataggtgaagcccagtcctataactaagagagtattggtcaactgttagctctggtctccaaaatatgcatgttttaaaaagtgttcatgaccagccaggcatagtgacctgtgactcttaattccagcacgtcggaggcagaggcaaggggatttcttttttttttttttttttggtttttcgagacagggtttctctgtgtagccctggctgtcctggacctcactttgtagaccaggctggcctggaactcagaaatccgcctgcctctgcctccccaagtgctgggattaaaggcgtgcgccaccactgcccggcggcaaggggctttctatgagtttgagtctagcctggcttgcagagtgagttccaggccagcctacataatgaaacctgtctcaaaaacaaaacaaatgaaaactcaaacaaataaataaccagatttgtgtccctgaacaccacctaaggacttggaaatatgtgttcctagatcaaagcctctattcgtggtctgagaagctgggctggtcctagttgtgatgaacaagtcccttggatgaggggcacaaattcagatacttgctaagggcaggtatctgaacaaggtgcatctctgcatctagaggtgcttctgctccacatctgactctgccaggaagctgttactgtgaaatgtgaatgacacatgacaataactgggtatgtgttgtggatctcacaaccctataatcaaagcctaattcagtttccccctcaatttaaaaagatattttaagaagatttatttatttttattttctgtgtagtagtgcctataatgtacatccagtgttcctggaggccagaagagaaggtcgggaccctggaactagagttacaggtggttgcgggtgatgagcaccaaacccaggttctctgcaagagcattatgtgtctggtttctgtttggttttggcttttgaaataggattcctctgtgtagccctggctgtcctagaactcagtgtgtagaccaggctggccttgaacctggagatctgcctgcctctgcctcccaaatgctgggattaaaggtgtgcaccaccactgcctggctggcaagtgctcttaaatgctgaactaccatttttcaaacaggtaaaccaaggattagggagagtaaagcaagtgacttacacaaattccagcttttgaagtggcagtggcaggagcctccagtccccagaccatgggcttctagcccagtggttctcaaagtgggtcgtgatccctttgggggtcactatcaggtatcctgcatgtcagatattacattacgattcataatagtagcaacattacagttattaagttatgaaatagttttatggttggaaggtcactacaacttgacgaacctattatattaaagggttgcagcactaggaaggttagagactgatttagccagtcctcctgtttcagtgtcccaccttgtggcagctgacatagttgaggtggctcagccttgcccacagtactgattacccacctgcctttgaacccttgcactgagatttacttctggggaatctgagagagtacaccaaattatcagggccttgaagctgctggacagccctcttttccccctgcccctacaccaggttcatggctaccagtgacctgatgtcagagttgcagaaagactccatccagctggatgaggacagcgagcgtaaggtggtgaggacgctcctgcggctcctggaggacaggagtggtgaggtgcagaacctggctgtcaagtggtgagtggagcaggggtgacttgggggagggccactgcccctaggatgcagcctgtgagaatcatcaggccgttcttgggcccatagcagggtcagatggtgccttaggcatcattcctcagaggttgaccctatgccaagagttcaaatctaagttctgtgggagatgatctagggaataggacgggaaatagggaagaggagatgggagggagttagttctgtaaccctgagaggtccctgagtaatgatctggaccaggctttgagaaaggaggctccagatctcaggttgatgaccagcatcagaaagtgcactggaaggccccacctagaccctctggggtggctcagcaactgtttagtagtcccctgggagatgtgacaccagctcgggtgtgaggacccttgctttggggctctgtgggaccccaggataagatgcaattcatagacttgggggtgaaccacattcctagcaagaaagggtttcctgttgagctgaggtctttcctcagtatgtttgtccccaaaagattgagaggaacgaagcaggtagcctggcttaaggcatgcccgcagtgtttggacccttttcccttcctctgtctgtctcagcctgggtcccctggtgggcaaggtgaaggagtaccaagtggagaacattgtggacaccctctgtgccaacatgcggtcagacaaggagcagctccgggacatcgctggcattggcctgaagaccgtgctttcagagctgcctcccgccgccacaggtacccaggcccggtgctgctcctcagcccgctgacgtctcagatactgaggccaggcgactcctctctgggatgcccacaccacatcacagcgtgccttctgtgtgtttcccctcacccagtgcttatgcctatattaagtatctttagtaagtagtgcgtagcatcctggaggtagaggcaatgcatcagtatgagtttgaggtcagcctgatctacattgatccaggacagccagggctaaatagtgagaccttgtctcaaatttaaaaagagagagggctcagcaaaataaaaagacctacttgggtccctcggtagtaaagatttcagacacacggatcagtttacatttgtggctgcctgtttgtcaggaatgcttccagccacaaggaaagagctcgaaggcatggcagcttaaagacctgctgtgatctctctggagggatgactgcagctgccgatcttctcctccaccgatcctcccattcttcctcctcttcccctctcctttttttctggtggtgctggagactaaatgcaggggcttaggtgggctaggccaagctactcctgcccatcctggtagtggttccgtaactcagtctgacagggtcacattcttcatccatgttctctcctctttgtaagaaaagatgcattttcccagtggattgcacaggccagagcggggcacctggccattgctagtagcaagggactgggaaaagaagtgtttatctccctccctggtgtgtgagccagccagcagctcagccattggtttgtcaccttccttagagctgatccctgtagttgttctttaagacttgggtcagccttggaccactgaagcccaggcttccctaaaccacagatatatggggcatatggctccagaagcacaagcaggccagagttgggagctgttttcccaacccagggccttacccttctacttgcaccctgcataggctcagggctggctatcaatgtgtgtcgaaagatcacaggccaactcaccagtgccatcgcccagcaggaggatgtggctgtgcagctggaagccctggacatcctctctgacatgctgagcaggtgagcaagtccactttaggcaagaaagatggggacaggcaagattgagatgagtggcctgcatgccaggtcctgtgcttagtcacccagcagccttgcaaagaaagcagtgtcatactatggaactggctctgggaggtcattagctccaaggtcacacagtcagtaagtttccggtgacttgtgcatttgttctaggggcaggaaaggttaggtgctagcatattggtgcaactgcattgttcccggggaggaattcacaggcaggttggccaactatagtagagtgattaggtcaggtataggtcccaagctgaaaaggcccagccccgctgccaggcaggggaatcttactggagctgagtcttcatgggcccatcagatctaggtcatcacagagggcagaggcaggagaggattgtgaaagggttcaggtttgggggtcaaggggacactgatgcagattgcctttttgattaaaagattaaaagggccaggtgtggtggtgcacatctttagtcccagtactccggaggcagaggcaggcagatctctatgagttcaaggccagcctgttcaacaaagaaagttctaggacagacagggctgttacacaaagagaccctatcttgggagtgggggggacccaacatggtgagctctaagcagagtttaggcctatatggcagagtgaggtcccttaaaggtttcagagttgagaggcatgtgggtgacagctgtccttaattggtgtttgtaatcaggccatctctgatccaggatggcaggggtggggggaggattcttgtatttggaggaaggagtgaccttcaggggaagaggggcccattgatgaatatgtatgcaacattcaggggttagtctgggacctaatacagtgtcagcagcatgtgatcgtgacctaagcagtctctgctctgggtcctaacagacttgagccgaggcttgtgcatggtgagctgattgtgggagctggtgtgcagcagtgaggctggagggctgggcagggcccaggacacagccctgtcttcctttgctctttccttctgtagtctggacaagcagggctggataggagtgtctttgtttttacatttgcggtaggattgtacaatcctaggttttattcatactggggaggaactctaccactgatctatgtctctagcccttgtcctattttatttttgagactccatctctcagagttgctcaggcaggccttgaactcactctgtaacccagattggccttaaacctgcaatccttccaccttagccctcctagcaggtgagattataggcctgtgcccctaagcctggcttggcttccatgagctgtctgaagaggtggactccgcaggatggggtggtgagactagaggatgaccggaaccaggagatgagagaattggggtggggtgctccgggagcagaagggtgcagtaggagattatgtgttgagtttgtggagcttggaaggcactcctcaatcacgggcttcaagggccagagtctgtccttatggcccgacttctagcatagaacctgtgacacggcagatgaattagtaggtaaaggctgcagcagagtgacctgggccagacacaggagagtgaggtcgtggagggcagcagagcaggaagagaacagccttaggacactggggtcagagtcactgagagctatttgactgtgggagaggagctgaggccaccgagagctggttccacccatgggaagactatatgagggctggcgcttgtcttgcgttcagagctcagtttatccagaggacactggggagccatggcaggattaagcctagtgatcaagtttattgggttttattcccctcgagtctcagtaaggaggatagacttgcagggatgggcatagaggcaaacctcaggctcccaagagttcggagcatcctccctggagcccacatgcccactgcactcctccctgagctgagaggatggacacctgggctcaggtcatggacttagactattgacttcagagccttcagaaggcagtctcgtgccactggctgccctataataagcagttgagtcaccccccacagttggagaggtaccttttcactttccaagggtctttgaatatcattggtaagaggtacagagaggatggggatgcagatcctgactgcctgaatgcaatgcctggcctgacattccctcccatcctgtccccaggctaggtgccccgttgggcaccttccatgcaagcctgctgcactgcctattgccccagctgagcagcccacgcctggctgtgcgcaagcgcactgttgtcgcacttggtcatctggcagccgcctgcagcactgacctcttcgtggagcttgctgaccacctggtggaccggctgcctgggccacgggcacccgccagccctgcagccattcgaaccctgatccagtgcttgggcagcgtgggccgtcaggcaggccatcgcctgggtgagagggcagggccaaagcgttgatgggtggaggtaggggatatgctcctagcaggagcataaactggctttccttttctgagtcttctgcctcttgggtggtctcctgggactgacttctgtggcctagaggcttagggatagtccttgcaagtcatgatatgaaacccttattcagaatgtgttccagccttctactttgacaggcacaccttaacctgggagccaggtttggaatctttcatcttttattgaaaataataggtctacagaagccatactatttaaagtacacaccagcatacagttgtgagctcacatcatagtcaaaacactcatcattaggctggagagatggctcagtggttgggaacatcgcctgttcttccagaggacccaagttcaatttccagcaactacatggcagctcacagctgtctgtaatttcagttccaggggacctgacaccctcacacagacatacaggcaggcaaaataccaatggacataaaatttaaaagaaagaaaaagaaacccactcagcattcccaccattcccatttccatctctgcctctcctcagatcaccaccgcaggcttcatcaggtaaactgttagccacagacaccttaggtgttgcaaattagaacaagacagtgtgcgtggaggtagcataaatcagccctcctaaatcctggtgagccagtggtctttagcagctactcctggctaccctctagggttcatgtttggttgggcaggaaactgagttcccaaggatccaaaaaagtttataaaggactgtctagggctggagagatgggtcagtggttaagtgcatttgctgcacatgaggaccagagttcagattctaacaccagtatcaggctgccaacaaatgcctgtaatttcagttccaacagatctgacaccctcttttggtctctgcaggcaacgtgtgtgtgtgtgtgtgtttgtgtgtgtgtgtgtgtgtgtgcgctaaaggggttgagacccctttggggatcaaatgactctttcataggtgtcacctaagatcattggaaaacaaatatttacattatgattcatatctagcaagattacagttatgaagtagcaatgaaaataattgtatggctggcagtcactacaaggtagtgggtggggaccaggcataggaccctcttgttctcacatctgcagctcacaccctagtgtaggaataaggcacattcctgactatgcctcaaccacatttgcccaacctgcagggcccagagcttagctctacctgcattgttcattggttcccatgccatcaccatcagtagactgagtcaggacgtctttgcaagtggcccacagccccataacatagcaaccaggctacaccccagccagcttctaagttgaacctgccctgcaaaggcaaggctgggctgaggcgaagctggtgactgaggaaggctggctgcttcagtgactctttggctctgcaggggcccacctggaccgcctggtgcccatggtggaggagttctgcaacctggatgacgatgagctaagagagtcctgcctccaggcctttgaggccttcctaagaaagtaagtgtggcagttgcgccagacaaaaggcaggggagctccacgggaagttagcggggatggggtgacagctcttgacttgttttggggccccacccctgctcttccacgctgagttccagtgaggcctcccctccttgtccctcaggtgccccaaggagatggaccctcacgtacccaatgtgaccagcctctgcctgcagtacatgaagcatgaccccaactatgaccatgacagtgatgacgaagagcagatggagaccgaggacagtgaattcagtgagcaaggtaggtggacagcctgtttgagggagagcagggcacagcagccaaagcaggggctacatggcctgcctggctggatgctgctcttctctagctgtagggaaggcagtgcagtcatcctcctgctgccctgttaaacagcccacaccaaaaatacctgggaaagaagttagtctgtattcctcacatagacagtgaggtgacagctggtgttgggatgtgtgtgctgtatcaggtgttataaatatttagtggtgacttaaggctgggagtggggtgtgtagggtatatgtgactactctcagatattgtcatccaggctcccacaagtcccaagggacaactcttaattgtcacttcctgattatccactggtattctaagctcttccctcatattcctcatagtgaccctaagacctagggggaatcatactcgtatttcagacaaggaatcaaggaaacacccagaagtgacctagctaggacttgggtgagctctgataaacaccacctttaagctacctttgttgttgttgttgttttctgttttgttttttttgagacagggtttctctgtatagtcctggctatcctggaactcactctgtagaccaggctggccttgaactcagaaattctgcctctgcctcccgagtgctgggattaaaggcgtgcgccaccatgcccaagcttaccttttttttttttaaaaaaaagatttatttattatatatgtaagtacattgtagctgtcctcagacactccagaagagggagtcagacctcattacagatggttgtgagccaccatgtggttgctgggaattgaactcaggaccttcagtagagcagtgagtgctcttaaccgctgagccatctctccagcccctaagctaccttttttataaatggttttcaagataatgcttctagcccagcaccaaagctcgagggagaatggtgggcacttggaggagacaagtccagacgggggctcagtggcttcttcccttgtggcttgagggcctctccatcactcagattcctacaagtggggtgcacatggagactagggacctgaaacaaaatcagacaggcatcctggggccttgaatgctgagctaagagtaggtcattttcttgccagtgatagagagctagggatatttctggaggggtggcacagggtccattaaaggagatgtgtactgagctgcccagtggccatggcccgttgtagctggtccggatctctttgccattcaagccttagttgtcagcagagtggttcagaaggaacacctggtctcagatacagagtgcagagctgcttcttgtcacctctggcttgctccttgtcacctctggctcttacgttctctcatagtaagatagatggagtgaatctctgcattgcattttcctaactatgttccctgaggcggtctctcacgctctctgaaccttggccttgacgacatctgtacagtgggccagtagtccctttgttctggtggagttgtttatctgctgactctcctgcctgtcagcagagagcctcacacacctatttttttctttggtgtttgtctctctgaacacctttgagatctgactggggctgggttagcactgagggcacaagaagtccgcctttctctttggaaatcccagtacataaaagggccagacctgacccagaggatgtgcctgagccccagaaagctccgtgtgtccactgcaaacttgaatgccgtgtcattctattttggaagagggcagtgtttcattaagtattccaggcctctccaggactgggatttacaggcctgtgtcagcataccagcccacttcatccttgatgcagtcagacaaggatctgactacaggctgtggctcaatagcagacaattgtacagtggatcaagccacttattgtctcttggtcccagttttcttctctgcgatagggaatggtccttgcccacaggagagagtgtggatcaaagccgtgggtaccatcctgcgcgtgccacaggtgttcactagggtggtggcgtacccagtgggctgaatactgatcatcaggatgtgaagcccagggcggggcttccactatctcctttcctgagcggagagacacagctctgtatgtcttcctcttccccagagagtgaggacgagtacagtgatgatgacgacatgagctggaaggtacgccgagctgcggccaagtgcatggcagccctcatcagctctcggcccgacctcctgcccgacttccactgcactctggcacctgcgctcatccgccgcttcaaggagcgggaggagaacgtcaaggcagacatcttcggggcttacatcatgttgctgcgacatacacggccccctaaaggctggttggaggctgtggaggagcccacccagactggcagaaacctcaatatgctgcgagcacaggtagactgtgtccttacccactccctccttccgttcttcctttctgtccccatctcttcacttgctgagggatgtggtgtgagcacctctctgtgcccagcctgggtgttcagatggagccctgcctctccttggtctgcatggtgcaagttcggacatgggcagcagcaacacgggcttgcaggagtgaggagaccttgcttgcttagtttaaatcacttctggctggtgggtggggaatggattgtgacaggacaagagtcatggctggggaccaacaggaggacattgcatctgtgtcaggtgacaagagatggtacctttgactcagagaaagcagagggattgaaagggatagtcgttgagaagtgggctggattgaactgtgggatcttgctggtaataggttgcttgtgtctgggagaggcagggatcagttgacttcttggcttcctgagataggggacactgaggaggagggaacatctacatctttgtacatttatggttgaagtcctcattggctgtaagtagtgaattttctgttagtataataaataaactgggtgtggtggcacacacctttaatcccagcacttgggaggcagaggcaggcagatttctgagtttgaggccagcctggtctacaaagtgagttccaggacaaccaggagtacacagagaaaccctgtcttggaaaaaaaaaagccaaacaaacctaaataaataaaacaccagaggcctggtccctactaagaaaagaggtttaattagctcaggtttgaaacacagagtccaaaaatcatggtctgtgccctgatgtggcttgccctagctgtgtgacatctttgcagatagcatgaatatacaaaagagagagcccatggtatgacacaaagccagaattatgaggactaggcccccattttatagttaacctgtccaatagaaccagttcatgctttttagtgacttccagataacgccaccttttaaagggccctctcttctgagttccaccaccacactggggaccaagcttccaatatgtaagttcttgtgggacacaaactttatgtagactgtagcagatgcctaggttgagccacttgggtgggcaggaaatgctcaagctggatcagagacacagatcagggtggaacccatgccactggattcaggaccatctggggagagtataggtaaagaaggggccatgcgctgaagacactaagcttctgctttcccttcatagagatagaggtgacagccaggctgctgggtcaccttgagccagttccttgtgcacatgtataagatggaggtagctgtcactgtgtctgcagagtctgaatcaggtgactagtagggactgatgggcactaaggcgacctgtctgtgttggaaccctccctggggtggcttccttgctggttcctgatctccccgcctgctcacaggtgcccctagtgataaaggccctgcagcgacaacttaaagaccggaatgttcggacccgccaaggctgcttcaacctcttcaccgagctggcaggcgtcctccctggcagcctggcagagcacatggctgtgttggtgtcaggtacgctgggcttcggctggctctcttctctttgggcttcttctagaatacagacccctaccttatattgagccctcaattcttgagagcccagcaatattcctgggcttgccctgtgcgaagatggctcatggtggttgtgtattgtgctccccacctcttggccacagggagaacaaggctgcttttaacttaagatgagttctggccttgttttcctcagctctggtggcttctaggagctttggatgcttggttcaggacagacacattggtcactacagccccagactgagccgggctgaagagcccctaaccttggttcccacctgcaggcattgtcttttcactggccgactactcaagctcctccaccattcggatggatgccctggccttcctgcagggacttctgggtacagagccggctgaggccttccatccccacttgcctaccctcctaccacctgtgatggcctgtgtggctgaccctttctacaaggtggcagctgaggccttactggtgctccaggagctggtgcggaccctgtggccactggataggcctcggctgctggaccctgaaccatatgtcggagagatgtccacagctaccctggcacgactccgagccactgacctggaccaggaggtgaaggaacgggccatctcttgtgtgggccaccttgtgggtcaccttggtgatcgacttggggacgacctagaacccacacttatgcttctcctggatcgcctacggaatgagatcacccggttgcctgctgtcaaggcactgaccctggtggccatgtccccattgcgacttgacctgcagcccatcctggctgaggccctgcccatcctggcttcatttctgcgcaagaatcagcgggccctgcggctggccacactggctgctctggatgccctggctcagagccagggcctcggcctgcccccgcctgccgtgcggactgtgctaaccgagctgcctgctctggtcagcgagaatgacatgcatgtggcccagctggctgtcgacttcctcaccacagtgacccagacgcagcccagctctctggttgaggtcagtggccccgttctgggggagctgctgcagctgctgcactcacccttgctgcctgccggggtgttggcagccactgaaggcttcctgcaggcgctggtgggaacccgccctccgtgtgtggagtactcggagctcattagcctgctcactgcacctgtttacaaccaggttggggacgggggacccggcctgcacaagcaggtgttccactcgctggcccggtgtgtagctgccctctcagctgcctgcccccaggaggccgcaggtactgccagccgcctggtttgtgatgccaagtcgccccactcaagcacgggggtcaaagtcttggcattcctgtcactggctgaggtgggccaggtggcagggccaggcccccagagggagctgaagaccgtgcttctggaagccctggggtctcccagtgaggacgtgagggctgcagccgcatatgccctgggccgtgtgggtgctggcaacctgcctgacttcctgcccttcctgctggcacaaattgaggcccagccccggcgacagtacctgctgctacatgcactcagggaggccctgggggctgcgcagcctgacaatctgaagccctatgttgaggatgtgtgggcgctgctcttccagcgctgtgagagccccgaggaaggcactcggtgtgtggtggcggagtgcatcgggaagctagtgtttgtgaaccctccctacctcctgcctcgattccggaagcagctcgctgcaggtaagagtacagtggcccgggctggccaagcacaaggcgggtacttggtccccaagcatccacacaacttacgcagatcactggagatgagagttgtgtgtgtgtgtgtgtgtgtgtgtgtgtgtgttagtcaaggagaagaagccagtgtgtatgtatgtgagtttgtgtgtgtgtgagagagtgtgtgcatgttagtcaaggagaagaagccagtgtgtatgtatgtgtgtgtgtgtaggtgtgtgagtgtgtgtgtgtgtgtgtgagagagagagagagagagagtgtgtgtgtgagagagtgtgtgtgtgtgttagtcaagaagaagccaatcagacgaacggcgcgtcgcagatgtacaggcttctagtggtctctggggtggaggggcaaggtctttttggctttgttggtttgtttgttttttgaggggttcttcaatttttactttattttatgtatattggtgttttacctgcatagatgtatgtgtactgtatacagacagtgccctcggaggccagaaaaaggcatcagatgccctggaactggggttacagacagctgtgagctgccatgtgggtacttgtaagtaagcctaggtctactgcaagagtggccagtgcttttaattgcttagccatctctccaatccaagaggacagggtttttgatgtgtccctatttcaatcagacctttcactgaaggggactgcatcataggttcgactcacttggatcaaaaataacccaagaaaatattgtgtctgtacttaacatgtgaaaacttttcttgtctttatttccttttgttgtgtgtttgccatggcatgcatatagagacaacttagggatgtcaggtctctccttctgtcatgtagattccaaggacttgcattcaggtcaccaggcttggtgatagctacttttatagcaagaaccatcttgcaagcctttttctccctaaacaatatagatgtaactactgatgacatgtttaatgtaaataacatgaagaagattgaaaatacatgtgtaggttctgtgtaaacaccatgctgttttgtggaagggcttagtatacaaagagctcctgaatcctgtcctctgaagatactaaggggtaaaaatacaacttaaagatggcattaggcatacaggattagaaatctataactaggaggcagaaggcagaaggattacttcaaagtctacctgcttagagatattgaaggccttcctgtgcaatttagtgagacgatagatagatagatagatagatagatagatagatagatagatagatagatagatagatagataagtaggtaggtaggtaggtaggtaggtaggtgggtaggtaggtagataagagcctggggctggggctggggctgttgcttggtggtagaatgtttgcttctgacacacgaggccctgggttctattcctaccgtctcacacaaatcagaggtgacctagagctggctgtggtggtgtacatcttagtcgcggcactcaggaggaactctgaaatagaccaacctgggctacatattgagttccatggcaacatagagaaaccctgcttttaaaaacattatcatagaaataaagccatatgatgtcattttcataatctgctacggtcatgactgctgtgacaaaatacccgatagaagcaactttaacgaggaccctgcttagagggagcagtcagccatagatgggaaggcttcgtgtgagcagtcatggcagcagcaacctgcgcagcggctagttcacaccttggtggatcaggacacagttcaggctggaatcaaaggcaaacgtaaccatcaaggctcaccttctgcagcctacttctgtctgctgggccccagtcccaaagatgcacaaccagtttctaggtgaggaccatgtcctggcatgacccctccatccttagggatctgggtgagccccccccccctttctccagcttctataaagtcagtaacaaggtgaaatgaagtgcgtccttcatgacctcgtgctcggggacctgagttctggggatcccattgaccgccagccagccaaaagcccccctggcctcttctctgtggcctgaaatgtgaacctggccttgctgagtccccctttcctgtgtaaagtgcaggccaatagtcgttcacagttttgtttgtttttgagacaggtactcactctgtagcccaggctgacttccaactcctgaagatactcctgggactttgggatgacagggttgcactaccacaccagcttcattattttaactaacattttgttattatggagtttgaatggagaggatgtctgaaaatgcagtgtagtggcagaactttctctgaggtcctagtgttctgtttggacctgccaagacccagccacttaactcttctagcagcaggaggaagaactgggcagattcaaggctgccatgggaaataaccacataattataataatacttcctgtgagggggttgtttctcaagtagggagagggtgtactatgttttgctgggtctacgggtggtcccctgccccacactatcgcctcttgtcttgcaggtcagccatacacccggagcacggtcatcactgcagtcaagttcctcatctcagaccagcctcactccatcgaccctctcctgaagagcttcattggtaggtgcaactagtacctctcaccctgggtctgaagcatggctagcacatcttacacattaaccaagggagtcagactcttgagtgaggagatgtgccttcaaacccctatgtcaccaccaaggctctggtgggcttcccgtgcccccttactgatgagttttgcttccttatctgtcaaatggttttgaggcacttctggagaacgttctcttggaaacagctaattgggtgggaaatgctctttaaaagtacaggctctgaggatgaaagcaaactggcaagcaccaacttgaccaagtctgagggggtcttagctggaggagccttcatggggtaggctaggccctcccttcaagcctcctgcaggaccagacttcctgccttcaaagcccagtgccagcatcttctcaggggccacaccagaatctcagccctcttctcagcgaaggcggccctacggatgtagagggaggctggacttctccagcctttggctttgaatactgacttagaagtgtgggcaggccatttcaatctcaactataaaatggggtgctgatgcatgcaaaggcactgtgccagaccaaagagcagtgaattggaaactgtatccttgtcgcagtctggactggccctgatggccataggcagatttctagctttgatgagttgttgtagttgcatgtccaggggctcaacagtggtgtcttggttttacttcagagtttagtatttttgttctttgatttttttttattagttggtgtgtgtgtgtgtatgtgtgtgttagtgtttcacttgaacatgtttgtgcactctatgtgctcctggtgcctatagagatcagaagaagacattgaatcccctgggactggagttatggatgattttgagctaccacgtgggttctgggaaccaaactcgggtcgtctgcaagagcagtcagtgctcttaactactggtccatctctccagtccccaaagctggtttgtttttagagatagaatctatgtagcccaggctggactcaaactctatatagccgaggatgactctgaattcctgatcttgcctttatctcccaagtactgggattataggcttatactaccacctttagcatgcttgatcctcagttctgagctccctagggtggataccatgagatgccctttgataaaactcatcagttaattctaatagtcccagcctggtaaagaacactggtcccattttacaaatggggaaactgagtcccaagagagggttcagactcgtcctattcctaggttatgtccttacagaagcaggactctaagagccagcatacattgtgggaagggctctacgtcctagtgtggttgagtcctgatctgcttgaagactgcagttcttcccagtgcagagaaatagatatcatgtgacagtagcataccctgtggtgctgatggccactctggtcatgtggttgcggtggagactcaagtttctgtgtcctactcttctagctgaagacgttactcagtggtagcacggatgctcagcatatgcgagaccctgggttccgtcctcagcactaatccttggagcaaccatgttgggttggcgtttcagacctggtgctgtgggtggccttcacttgttaacctgcgtacaagaggctagggcaggaagagcccagacctggtgtagtcagcgaggccctgtctgagagcagagccatcctctgtgccagctctcagccctgggcttcacagctgctgtcatgtctcactcctaaagactggaggaggtcacggctgccagaacccaaagtccgtgggaagctaggcattcttatttgggctgtgacggcattgtgtctggcttaaggtagatgttcgggtcatgtctgcccttcgttctatataactctcggtgcccaggtcaccaggaacagcatagaggtgactttatgtcctgcttctatgtcctttgtcttgtcactctgcagcggagttcatggaaagcctgcaggacccagacctgaacgtgcgccgggccacactcaccttcttcaactcagctgtgcacaacaaaccatcactggtccgggacctgttggatgacatcctgcccctcctctaccaggagaccaagatccgccgggacctcatccgagaggtatgaggtagcatggacacctagtatggctggcccttgttgagccttctgtgcctcacagtcaagactcattgaaaactaggagtgaggcccacacaggcaccagggtcacatggccctagccatgccatgcctctccactccccagcgggaggcccagactgggcaatccagtgccccattagcttcagttttccctagagctaagtgaggacagtcaccgtgcctgtaccacaaggctgtgccctaagcactgggaggcagccctgatgcttagtgactcatgttcagcatgagcatcctagtccccaaatgtgacatcccctctgacaggctctatttaaaatgcaggcaccctacaaatactacctgaaactaccttcaggcatatgaaaaggaatgcttattcaacatacatggactctgtatttagacttgggttccttccccaatacatctctttgaataatgcaagcattttaaaatccacagtccaaacactgaacctcaaggtgtcaggcatgtggcattggactacagtgtcagcaactcttgtcacttggccagagtctaaagtcccaggactcatagctacaccatacttggcttctgccactaagatgctcagcctgacctccaggagagcggtggttgggagagtcaggttggagagagagctgaaggggcagagggggctgagattgacagccaagtcgccctacagcacctcatgaaggtctgaggaggaagcagtgctcttgagaggggttgaaaaagttttctgaaagaaggacatttgaaggttttttgtttttgttttttctttttgagacagggtttctctgtgtggtcctggctatcctggaactcactatgtagactaggctggccctcaaactcacagggatttatcctcttgcctctgcctcttgagtgctgggattaaaggtgtgagctactgtacctggtatcagatatagttctggaggccaaaaatctaatatctgtacccctgagctgaaaccagggtgtctacagacctcttgcagttcctgtggccaccaacattgcttggcaggcgatgccattccatgaagctctgcctacccacaaggcattatttttaatctgtgtaatctcttcagttgggttttgaggctcagactttactgttagaagccagattccatgattacaagcttcagaggacttggtgttttgagtctggttttgcgacttaccagctgtgtgtcctccagcatgtcagtttacctctctgagccttagtgggatgttgaataggattgatagtagcaccttattcctaaggatttcattttttcctgagacagaatcttgtgtagtctaggttaagaatgctctgacttgcttccacctcctgagcgctgggttacagacatcatgatgtttattcagtgccagagatcaaacttgggtctttgtgtgtgctaggcaagcactctcctgtctaagccatatgcccagaccttcccacggtgtctttagtactcaagtaagatgttgtctgtcaggaaaaagtagctcagttacagaacatgtgctcagtgtgcacgaggtcctacaaacacacacacacacacacacacacacacacacacacacacggaacctgacacttcctgcttagcaggtgtgacagtccagagagaggatgctgcaggctgagttgagacctgagacttgagcgcatagagtgtgacttgggaccaggatgcagtgctgagcaggtgaggtgagtattccaaaccctctatgttatgtccttccttcctgcaggtggagatggggcccttcaagcatactgtggatgatgggctggatgtgaggaaggctgccttcgagtgcatgtactcgctgctggagagctgcctgggccagctggacatgtgcgagtttctgaaccacgtggaggatgggctgaaggaccattatgacatccgggtaggtagcaccatgccagatgcaagcccagctcagagcaagggaccaggcaacattaggcccctgctgttctccctgtctcctggcaccccatgaaagcagctgtgctttctgtcaaggacaaggaaccagccaggtggtagcgcacacctttaatcccagcactcgggaagcagaggcaggcggatttctgagttcaaggccagcctggtctacaaagtgagttctaggacagccaggactataaagagacctgtctcaaaaaaccaaaaaaaaaaaaaagaacgaggaaccagatcttggatgtttcttagggtgtgcactttgggcacaataggtccaagtctattgtagtgttgaaatggcttatgccattttttgctttgcattaatttgttttaagtgttaccaacatttaaaaaattttaaaaatgtatatgaaaaattgtatttcttttgagaacaacccataatgttaggtaaattcccacattgccattatattagtttgtttctggttactattatttcattttgctttgttttttatttttatgtatttattatgggcatgtccacatctgggattcccacatagtacactgtcactgacacaccagaagagggcatcagatcccattacagagggttgtgagccacaatatggttgctgaggattgaactcaagacctttggaagagtagtcagtgctcttaaccactgagccatctgtccagcccttgctttgtttttttttttaaagatttatttatttattgtatataagtacaccagaagaagagggcatcaaatcttgttacggatggttgtgaaccaccatgtggttgctgggacttgaactcaggacctttggaagagcagtcagcgctcctaactgctgagccatctcaccagccccccttgctttgtttttttaagacaaggtttctcttatatagctctgtatgtcctagaagtatgtgttctcacctgacctgttttctgttgctattaaaaaaaaaaaaaatctatggccgggtattcctttagaaggctgttttagatctttctggagactcagaatctggtattggctggcatctgtttttgctctggaggcatcacagtggccggcacctgcagaagttcacatggtagaatcaggcatgaggcgtgttcttgtattgttgttttttgtttttgttttatccagacagggtttcttggtattaacagagccctggctatcctggactcgctttgtagatcagggcagcctggaactgaactcacagaaatttgcctgcctctgcctcccaagtgctgggattaaagatggaggcatgttcattttattattcacttttgtgggaactaaggtcctctgagacctgaactaaccccttccagcaggaccacctccagtgacctagccacctcctgctgaagactccatcacccctcagcattgctatacacaggcttttgtgatacacactcaagatgtatctcaactgcagcatgtccaagccagtgtcagtgcaagccgaggagctgcttggttccttcccagcctgtgccaggggcatgtgaacacgtgccttttgttatccagccatcctcacacaactaaagttagctggcaagattcagcatcatggtgtgcatctataataggaacctgagacccagagaggtgggagccctgggcagggccctagagggacttggttgtcggtttgtggggtacaagccagagcttccattgggtctgctgctctgtctgggtgctgtttcaccatgagctccatctgcttccttgggtagatgctgaccttcatcatgttggcccgactggccactctttgtcctgcacctgtcctgcagagggtggaccggctcatcgagccactcagagccacctgtactgccaaggtaagccctgccctgcctggaccctggagtgcctgttgactttagtcatcactcactggaccatgtgcactgcagtgctgggctggctgttgccccagtctacacagcttcctgggctgggctgtgagattccttcattaaatacttcctgggtgctggcctgggagagggatccagggtataacactccacatactagcttccccacacagtctatgcagatcccagtagggagcagggcctgcctcctatggttgattgattggctagctactcctgctactacagagcaactgctaacacagagtgcaaggtcttctggaaagttgtaatattgggaacagcctggcacactcagggtcctggtggagacctgttgaatgaaagaactctgtatgtgtgtgagtgtgtgtgtgtgtggtgtttctggaaagttgtaatattggaaatagcatggcacactcagggtcctggtggagacctgttgaatgaaagaactctgtgtgtgtgtgtgtgtgtgtgtgtgtggtgtttatgtgttgtgtatctgtggaggccagaagttgacttcagtggtcttccttgatctctctctgccttctttcttctccttcccccttcccagacatggtttctctgtgtaaccctggctgtctgggaactctagaactgacatctgactgcctctgcctattaaaggtgtgccccactattgctaaactgggtgaccatgagctgcagggatctgcctgtgtctacacccaccaacttccacatccagctcttgtgtgggatctgaacttgggtttgtacagcaagtacttcaccactgaaccatctccctagtccctgattggagttttaagatttactcaaaggaccaagaatttcagtctttaggcaagactcagaatagtggttttgttacccttttttaaaaacaaacaaacaaacaaacaaacaaactgttctccaggttagcatcaaattcctgaacttaagtgagtccttcctcctgtcttgctttccatgtagcttgtgtcttgaggcacatattgttattttttcattttctttgtgtgtatgtaggggatattgggggggggggggcggggacgacaaaacacagacactctggtagcccagcctggccttaaactcagtatacagccaaaggtgacatgaatttctggccctgatgcccttgcccccaagtgttgggaataccagctgtgtagtacagcagattggtggatgctggatcaggtcccctcttccctactcagatgtggatatctaactcaggactttgtgcgtgccaggtgaaatactctaccaactgagccacatacccagccccaaagttgtgatcttcaaatagcagcacagtagtagaaaaaaaatgaaatctgattatgcatcagattgaaattaggcctttatttgaaacctatgtttaaggcgggcgtggtggtgcacgcctttaatcccagcactcgggaggcagaggcaggcggatttctgagttcgaggccagcttggtctacagagtgagttccaggacagccagagctaaaagagaaaccctgtctcgaaaaacaaaaaaaacaacaaaaaaaaagaaacctgtttagaatgggtaacagagactcagtaaggacactgtctccctctgcaggtcaaggctggttctgtgaagcaggagctggagaagcaggaggagctgaagcgctcagcaatgcgggcagtggccgccctgctgaccaaccctgaggtgcgcaagagccccactgtagctgacttttccgcccagatccgatccaacccagaactcaccaccctcttcgagagcatccaaaaggacacagcctccggccccagcacggactctatggaactcagctagctgcccccaacacaagtctcccttcttatcccaataggccttggcctcttctgtccttccctgtcagcctcagtgcctttgctagggccccctgctcacagccccagtgccaaagccgggcccaccaactcaggacgttcattcacgagcgtcatgtcccaccacctttacactgcacccctccactcacttaggagccagaattggcctatgcccaagaccagaaggcaagcagggggttgacttcctacttcacttactctgaagtccaaatgtcagttagcaccctgaacctagccatgggtagggtatgtagagcccatacaagagaaccaatttatacttagtgcctcattagttagcagagtgagaactgtttacagggaagatagtgtggctcattggccaggtgtaggtccactgtctcaaacatccctaatcccatcacccaggagtgtaacagtcggcttgtgctcttcccgactttgtagttagtactgaaaatttaagtataaatgacaggttttgatttttaagacattgtttctctttgtagccacatatggcccagactcaaatccacctgcctggaattaaagccagctgaggccagttatctgagttaataacatatacaaagctctcctcacaggattcttatccatattgattcagtcctggaaataacaaggccgatggcatagacctgttatcctaattccttaggaggctgaggctggaccacacactcaggtcgtagtgaacaaatttaagatctacctaaaagcaacagggcaggatagctcagtaccacgccctcctggtagcaacaactttctaacctgtcctaaaggatcctatgccttcgggcagacatatatacaggcaaaacaccaaagtttaaaatagctcagttgtagagcactctccaacactacagcaagatgataaaacctcatttctacaatgagaacaaaagcttagtaataaaaaggctgggatgtctttctctccagtcatttaagtgtcacccgtgacagtcaacccttctgaactccattactgtttcaaaagaacagcgagccagagattggcctagatacagatggcactgcccttgtagtgtcccacgtggcagaagtatttatcagtctcatgaagttctaatatcctccaaagacaggattgtcaatcctgactgattgaggccaagcaggccagttccatgaaactaaaggcttcatcaaaaaagtgccttaagccgggcagtggtggcgcacgcctttaatcccaacacttgggaggcagagacaggcagatttctgagttcgaggccagcctggtctacaaagtgagttccaggacaggcaagactatacagagaaaccctgtctcgaaaaacc

SEQ ID NO: 341 - DNA, 5129 bp, Mus musculus
ccccgcggcgcagccagcatgagtaccggtgccttctacatctccagcctgctggagaagatgacgtccagcgacaaagacttcaggttcatggctaccagtgacctgatgtcagagttgcagaaagactccatccagctggatgaggacagcgagcgtaaggtggtgaggacgctcctgcggctcctggaggacaggagtggtgaggtgcagaacctggctgtcaagtgcctgggtcccctggtgggcaaggtgaaggagtaccaagtggagaacattgtggacaccctctgtgccaacatgcggtcagacaaggagcagctccgggacatcgctggcattggcctgaagaccgtgctttcagagctgcctcccgccgccacaggctcagggctggctatcaatgtgtgtcgaaagatcacaggccaactcaccagtgccatcgcccagcaggaggatgtggctgtgcagctggaagccctggacatcctctctgacatgctgagcaggctaggtgccccgttgggcaccttccatgcaagcctgctgcactgcctattgccccagctgagcagcccacgcctggctgtgcgcaagcgcactgttgtcgcacttggtcatctggcagccgcctgcagcactgacctcttcgtggagcttgctgaccacctggtggaccggctgcctgggccacgggcacccgccagccctgcagccattcgaaccctgatccagtgcttgggcagcgtgggccgtcaggcaggccatcgcctgggggcccacctggaccgcctggtgcccatggtggaggagttctgcaacctggatgacgatgagctaagagagtcctgcctccaggcctttgaggccttcctaagaaagtgccccaaggagatggaccctcacgtacccaatgtgaccagcctctgcctgcagtacatgaagcatgaccccaactatgaccatgacagtgatgacgaagagcagatggagaccgaggacagtgaattcagtgagcaagagagtgaggacgagtacagtgatgatgacgacatgagctggaaggtacgccgagctgcggccaagtgcatggcagccctcatcagctctcggcccgacctcctgcccgacttccactgcactctggcacctgcgctcatccgccgcttcaaggagcgggaggagaacgtcaaggcagacatcttcggggcttacatcatgttgctgcgacatacacggccccctaaaggctggttggaggctgtggaggagcccacccagactggcagaaacctcaatatgctgcgagcacaggtgcccctagtgataaaggccctgcagcgacaacttaaagaccggaatgttcggacccgccaaggctgcttcaacctcttcaccgagctggcaggcgtcctccctggcagcctggcagagcacatggctgtgttggtgtcaggcattgtcttttcactggccgactactcaagctcctccaccattcggatggatgccctggccttcctgcagggacttctgggtacagagccggctgaggccttccatccccacttgcctaccctcctaccacctgtgatggcctgtgtggctgaccctttctacaaggtggcagctgaggccttactggtgctccaggagctggtgcggaccctgtggccactggataggcctcggctgctggaccctgaaccatatgtcggagagatgtccacagctaccctggcacgactccgagccactgacctggaccaggaggtgaaggaacgggccatctcttgtgtgggccaccttgtgggtcaccttggtgatcgacttggggacgacctagaacccacacttatgcttctcctggatcgcctacggaatgagatcacccggttgcctgctgtcaaggcactgaccctggtggccatgtccccattgcgacttgacctgcagcccatcctggctgaggccctgcccatcctggcttcatttctgcgcaagaatcagcgggccctgcggctggccacactggctgctctggatgccctggctcagagccagggcctcggcctgcccccgcctgccgtgcggactgtgctaaccgagctgcctgctctggtcagcgagaatgacatgcatgtggcccagctggctgtcgacttcctcaccacagtgacccagacgcagcccagctctctggttgaggtcagtggccccgttctgggggagctgctgcagctgctgcactcacccttgctgcctgccggggtgttggcagccactgaaggcttcctgcaggcgctggtgggaacccgccctccgtgtgtggagtactcggagctcattagcctgctcactgcacctgtttacaaccaggttggggacgggggacccggcctgcacaagcaggtgttccactcgctggcccggtgtgtagctgccctctcagctgcctgcccccaggaggccgcaggtactgccagccgcctggtttgtgatgccaagtcgccccactcaagcacgggggtcaaagtcttggcattcctgtcactggctgaggtgggccaggtggcagggccaggcccccagagggagctgaagaccgtgcttctggaagccctggggtctcccagtgaggacgtgagggctgcagccgcatatgccctgggccgtgtgggtgctggcaacctgcctgacttcctgcccttcctgctggcacaaattgaggcccagccccggcgacagtacctgctgctacatgcactcagggaggccctgggggctgcgcagcctgacaatctgaagccctatgttgaggatgtgtgggcgctgctcttccagcgctgtgagagccccgaggaaggcactcggtgtgtggtggcggagtgcatcgggaagctagtgtttgtgaaccctccctacctcctgcctcgattccggaagcagctcgctgcaggtcagccatacacccggagcacggtcatcactgcagtcaagttcctcatctcagaccagcctcactccatcgaccctctcctgaagagcttcattgcggagttcatggaaagcctgcaggacccagacctgaacgtgcgccgggccacactcaccttcttcaactcagctgtgcacaacaaaccatcactggtccgggacctgttggatgacatcctgcccctcctctaccaggagaccaagatccgccgggacctcatccgagaggtggagatggggcccttcaagcatactgtggatgatgggctggatgtgaggaaggctgccttcgagtgcatgtactcgctgctggagagctgcctgggccagctggacatgtgcgagtttctgaaccacgtggaggatgggctgaaggaccattatgacatccggatgctgaccttcatcatgttggcccgactggccactctttgtcctgcacctgtcctgcagagggtggaccggctcatcgagccactcagagccacctgtactgccaaggtcaaggctggttctgtgaagcaggagctggagaagcaggaggagctgaagcgctcagcaatgcgggcagtggccgccctgctgaccaaccctgaggtgcgcaagagccccactgtagctgacttttccgcccagatccgatccaacccagaactcaccaccctcttcgagagcatccaaaaggacacagcctccggccccagcacggactctatggaactcagctagctgcccccaacacaagtctcccttcttatcccaataggccttggcctcttctgtccttccctgtcagcctcagtgcctttgctagggccccctgctcacagccccagtgccaaagccgggcccaccaactcaggacgttcattcacgagcgtcatgtcccaccacctttacactgcacccctccactcacttaggagccagaattggcctatgcccaagaccagaaggcaagcagggggttgacttcctacttcacttactctgaagtccaaatgtcagttagcaccctgaacctagccatgggtagggtatgtagagcccatacaagagaaccaatttatacttagtgcctcattagttagcagagtgagaactgtttacagggaagatagtgtggctcattggccaggtgtaggtccactgtctcaaacatccctaatcccatcacccaggagtgtaacagtcggcttgtgctcttcccgactttgtagttagtactgaaaatttaagtataaatgacaggttttgatttttaagacattgtttctctttgtagccacatatggcccagactcaaatccacctgcctggaattaaagccagctgaggccagttatctgagttaataacatatacaaagctctcctcacaggattcttatccatattgattcagtcctggaaataacaaggccgatggcatagacctgttatcctaattccttaggaggctgaggctggaccacacactcaggtcgtagtgaacaaatttaagatctacctaaaagcaacagggcaggatagctcagtaccacgccctcctggtagcaacaactttctaacctgtcctaaaggatcctatgccttcgggcagacatatatacaggcaaaacaccaaagtttaaaatagctcagttgtagagcactctccaacactacagcaagatgataaaacctcatttctacaatgagaacaaaagcttagtaataaaaaggctgggatgtctttctctccagtcatttaagtgtcacccgtgacagtcaacccttctgaactccattactgtttcaaaagaacagcgagccagagattggcctagatacagatggcactgcccttgtagtgtcccacgtggcagaagtatttatcagtctcatgaagttctaatatcctccaaagacaggattgtcaatcctgactgattgaggccaagcaggccagttccatgaaactaaaggcttcatcaaaaaagtgccttaagccgggcagtggtggcgcacgcctttaatcccaacacttgggaggcagagacaggcagatttctgagttcgaggccagcctggtctacaaagtgagttccaggacaggcaagactatacagagaaaccctgtctcgaaaaacc

SEQ ID NO: 342 - protein, 1219 aa, Mus musculus
MSTGAFYISSLLEKMTSSDKDFRFMATSDLMSELQKDSIQLDEDSKVVRTLLRLLEDRSGEVQNLAVKCLGPLVGKVKEYQVENIVDTLCANMRSDKEQLRDIAGIGLKTVLSELPPAATGSGLAINVCRKITGQLTSAIAQQEDVAVQLEALDILSDMLSRLGAPLGTFHASLLHCLLPQLSSPRLAVRKRTVVGHLAAACSTDLFVELADHLVDRLPGPRAPDAAIRTLIQCLGSVGRQAGHRLGAHLDRLVPMVEEFCNLDDDELRESCLQAFEAFLRKCPKEMDPHVPNVTSLCLQYMKHDPNYDHDSDDEEQMEDSEFSEQESEDEYSDDDDMSWKVRRAAAKCMAALISSRPDLLPDFHCTLAPALIRRFKEREENVKADIFGAYIMLLRHWPKGWLEAVEEPTQTGRNLNMLRAQVPLVIKALQRQLKDRNVRTRQGCFNLFTELAGVLPGSLAEHMAVLVSGIVFSLADYSSSSTIRMDAFLQGLLGTEPAEAFHPHLPTLLPPVMACVADPFYKVAAEALLVLQELVRTLWPLDRPRLLDPEPYVGEMSTATLARLRATDLDQEVKERAISCVGHLVGHLGDRLGDDLEPTLMLLLDRLRNEITRLPAVKALTLVAMSPLRLDLQPILAEALPILASFLRKNQRALRLATLAALDAQSQGLGLPPPAVRTVLTELPALVSENDMHVAQLAVDFLTTVTQTQPSSLVEVSGPVLGELLQLLHSPLLPAGVLAATEGFLQALVGWPCVEYSELISLLTAPVYNQVGDGGPGLHKQVFHSLARCVAALSAACPQEAAGTASRLVCDAKSPHSSTGVKVLAFLSLAEVGQVAGPGPQRELKTVLLEALGSPSEDVRAAAAYALGRVGAGNLPDFLPFLLAQIEAQPRRQYLLLHALREALGAAQPDNLKPYVEDVWALLFQRCESPEEGTRCVVAECIGKLVFVNPPYLLPRFRKQLAAGQPYTRSTVITAVKFLISDQPHSIDPLLKSFIAEFMESLQDPDLNVRRATLTFFNSAVHNKPSLVRDLLDDILPLLYQETKIRRDLIREVEMGPFKHTVDDGLDVRKAAFECMYSLLESCLGQLDMCEFLNHVEDGLKDHYDIRMLTFIMLARLATLCPAPVLQRVDRLIEPLRATCTAKVKAGSVKQELEKQEELKRSAMRAVAALLTNPEVRKSPTVADFSAQIRSNPELTTLFESIQKDTASGPSTDSMELS

SEQ ID NO: 343 - DNA, 100385 bp, Homo sapiens
ttgccttggggagagggaggtgtggccagttttcctgttctctggtcaaaatctatccttctaaaaactgacactcactaaagtggaaacaaccaactacctctgcatcacactgcagcctgattcggttcacactgccctacaacaaaggcagtttcctgaacaactgatttatttttcatttattcaatcaatttaattttcaaattataccttaaaatggtagttggtaattaagacatagtaactagttttttcccttggtttctttctaatagtaaatgctttggtatttgaactgtaacaatacttgtaataaaaatggcattaagacttattttttttaagacagggtcttgctgtgtcatccaggctgaagtgcagtggtgtgatcatagctcactgcagcctcaatctcctgggctcaagggattctcccacctcagccttctgagtagctgggaccacaagtgtatgtcaccatgcccaattaatttttaaaattttttgtagagacggggtctcattatgttgcccagtctggttttgaactcctgggctcaagcaatcctcctgcctcagcctcccaaagtgctaggattacaggtgtaagccactgtgcctggccaaatggtataaactccaaatggaagatgagaaatgagttttcacaaagggaccaaggtaaaagagtgagtgagctgaaatggagcagcaggcccatattcacattaggttatcaaatggatactggggtggaatctacaattcctaagagctagtgtggagctgtcaacaatacacaatgccagaggaatcttatttgtctttggggtcagcttttatttttattttttaaatatatattttttgagacagggtctctctctgtcatccagactggagtgcagtggcatgatcatggctcactgaagccttgacctcctgggccctcatgagctcaaatgatcctcctgcctcagccttccgagattacaggcatgcaccaccacgcctagccgataaaaatatttagtgggcccctagctttagcaaggctgatagaaatttgctttgtattattgatagtttagaactatttttcatcttctgattatatttcatcattggaaaagccgtattttttttggattgttgtcaaataataatttattttaaaaaaatctcaaaacatgttcaaacacattcagtagcaaagatccaccattggcacacacattaagaaagcacacacactaggcttctagttgggctaattaaaatctctatggctggaaaggtggttggttgtacttaattaagcttttttgaagtgcaaagctatgcataacagatgagcttgaaagctgcagagtttaagatagacttaatttttcatgattttcccaaagccagtcatgatatttatttaatttgtggtcttcagggtgcacctggaagaaacataagatacagaggcagagaccttaatgtaacttagtcagaaatacattttttaaaattggctttttaaatgtttgctgggggacagtacattacgataccatacctaaaagttataacctttaacctcctgggattcatgaatattttaagttataccttatattaaggtaatctcacacaatttacaaggtactgtccaaattactactcaaccatgacttagaatgtggggtggcgataacatgagtcaagtattaatacctcactttccagaaggaggttctagaccgagaggttaaatggattctcaggtcacaatggattgctctgatgaagctgggataggaccatggtccttcagttcaggcttggccagacctactggctgaatgcatgagggtgagtctcaagctgagtgggcagcataccaggccacccaccagctgccaggatgaccaccagcatgccacaggctgggcatattcaacagggctgaagcaggacccagtcaccacaaacgtagtctgagaccactaagagaaacccaatatgcatacattgcaggcccaaaccttcctgctttcctgtagtggtgtacttttgacaggaggaaaaccacgtcaggcttagagatagcacacaaatagggaatgacaggaacagggccagaggtgacaaaccactggagatgagtcagaggccacgccgctggactggtctttgtggacttgggagcgcctactgatcaaaaaccccaaaacccacatgccacccgcttccccgcagccaggaacacaattgtttgtgactgtaatagcatttgtatccaataaatagtcttaaccataatggtggacttattttgcctcagagaccaaatgtgctgaattatggatgggagtgagcctcacctgcttccactcattgacacaaaaaattcggtaagagtcgttgccatatttaccaatcccatgaagctcaattggatacttccactgctttgtcaggtattcatctgaagaatacaacatcccacattatcaggtcagcttctaaagacaccctcccaaaatgtgtggtgatggggcaggatggagagaacagcagaaagggacaggaaaggctctttcccagcaaccccagttgtgattactcttccttctgaattcctgcagcacccatatcatttgccaattcctaaccactcttttgtgctgtgctaacaagacagaagtcatgtccttgaggtcaagaactgggctttctgcttcactgacttcttcccctaattctgcccacatgcctgacccagtgctgggcaaagatttattgtttaggtcagtgggagactgtggtttggggaaagtggacttttttaaatgccttgggtgcttgagctgaaaaacctccattaatatagtatctgagaacattaaagtttaaggtgtggctctcttaaataagcacaatgtattatgtttttcctttgggtgtataggaaaatacctgagaacttgacaatggtttttgcccgaagatcgtagagaccaagaggtttaagaagttctgacacatctctccagtctgcggttcttgctacctcagctgaaggatacttctccagaaacttccaaagcacaggtattgccattttgcctgggaagtaaaagtaactgaatgattacaagactccaggtgggctgatttcacgttcaagtagtttctcatagaaatctcatccagagggtttttttttttaaagaaaacaaaaaacaaaaaaacactggtgagaagccattatctgaaccagcaaccactttcagaatcaaatgccaaaactgctaatatattgggctaatagtccaaattatgctgaaaactggccttgcatgattagcttttaaatgatcagatcagcagataatgagagtagaagcatatagaacacaaggtacattcagtgaaaaagatacttttaaacacacatgaaagagggtggagaaacgttaactgattttcactgatgatcaaaaagaatttggaagtataaaataaataaaatctacctctttattctaaaaggtctgttggatgtcatccagtctcatttcctcataggtgaagagtttaagggtgaagggggaatgccctatcccaggtgacacactcaaaatggactttgaacccaggcctcaattcagtgctttctccctaccacactgtctctactaagacaaagatgataataatccccaaacctgaggtccgattgagaaatatagtagcgatgagaagcttccatggatcatgaaaaagtgtttcttgaacgagattaaaaggtgaccgaggaggtgtccatttcttaaaggctttacgtcgtggggggctaagagctaaacaaacatagtgcatcagaattgaaaacccaaaatggaattagaatttgctgttctgattgggaaagggataccttctttgttatatttgctggaaaaatacaggcttgttttccttctttctatctgtgttcgtgggatggtatcttctgaaaaggaaaagtaaacactttatggagtctatggtttagcttaaagcaatattgagggatgcaaataataatatcaacactattacaaagcatgccaggcactattctaagccctttacataaatacccaattaatctaactaatgacccatgaacttggtactatttttatctccactttacagataaggacattgaggcacagagaagctaagtaacttgctcaagatcacacagatactaagtgtcccagctaaaattcaaatccagacagtctggctcctgagtcctcacctttaaccactctgtgacactagttctttatgacttatgttcagagtttatagtattgaaaaattaaaggcagtatggaatattttaaattacgatgcatttgtataatgtggtcattaaagtattttttagactattgtgaatattttcctattaacttctaaatgaaaaagcaagagtctacatatgatcccaattttataaaaaaggggaaacatatataaataacaatacagaagttaagaatgaaataagccaaaatgatataatggttgttgccaagtgctaatttttctttccttctttacttttctgtattttccaaaatttctgcagtgaacacttacttttacgcttaccaaaaaaagggatacagacaaaacagaatctgcagaaaaacctacaatttgaaccctagaacacctgagacaactacctattgagaacctctatctattgggaaccagtgttatcagacttctcaaatttctaaaatcacatgtaatactccttaaccataccctcgcaatttgaatatcagttaataataccttgcatttgtatagcatctttttcacttctcattttacaatatttttgatgtgaaaaacaggactagtcaggatggttacctctattttacagatgaagaaagtgaagcttctaaatgaagcaatcatcccaaaatgatactgggattgactataaactggaacaagtatccaggtctccagataattagactactgttttttcgctattttagtttgagtaggtaaagcccagtagagagtaaaaaaaaaaaagaacaaaggaaactgctctgactgctctgatttgacaactttttctgtgggctcctatgaataattactagtctcctttatgccaggtttacttggcaatttctagctaagccaatgggtgtcttcactatttcatggacacctcgtactaagagtacttcatctcatgttgagaactagactcttaccacaaaaaaaagtttttaatatttgcccattttgctagcaataaatctacataaacctcaaagctttcttcaagaagctcagtgtctaggacacagacttgaagaattcttatgcagttcctaggtatatatggccatcttgtgttaaaggcagagaaactccaggcacagaaaagacataaaatcatgggtagaactgggaacaagaatcaaacctaatctcctgcttcacaaatttctccaggctgtttccccacaggagtttaagtaaaattattattctttaaaggagttattcattataccataatggcataatgaataactaatacagggctgctcaaaaggtctcccttttatctcttattcactgaggtattataaagacaaaactgctaagttctgaattctgtattaagagcatattacaaataatagatgaactatgtgattatacttttgaattatttagagctctaaagcattttagagaagcattacattaaaatagaagataaaaatgactatgatatatacaaaattaaattggaagtcacacttagtagtaagtatcaggaggggtgtgaagacaccaactattctccactcatttatgtatataagaagccttccctaaatttttcacaagtgaaggcttttaattttccttcaagttttaagattactggctggaaagaggatgggaagaagggaaagcactgctgaggaggagagtcccagctgctgcaccagggagagacgatggcagctgttaatagtaatactctcctttgccatggcatcacgacagcagtcagccgattttctctctgccataggaaactgcttgaatatcagtttaagataaagtattaggatcaactggtatctcatatttggccctatttcttggctctattttcacatcttaaccatgtatgggcacgaatacaagatgcagcattataaatttctcatcacataatgtttaatagtgcttgaaagcactggataccttgaaatattttctcaccagtgaagtctttcctggttggtgagcagttgttgtccatttcagagccacgttttaaaatgtcagtatgcaaatgttctttcctttccacaacttctacttttgttccgatttcttcagattctaaaaaggtatcctcatacttctcgttgtgttctgagtctttggctgaacaaaatttgtttatgatgccagaagttttttgttcagaacaaaaatttgatcctgaactcaatgatctttcttttttttttacaaggctgttttcttcactggtcacactgagggtctcaccacatgctccagcatcagaaatgcagacagttctatcaagctgacttttttgtgcaacaggttcactttcagcatctgctttattacacacagattctcttttgctatcactttgaacaaaacctgaacagctcttcctacatccttttttagttttcttaattgggattcctttcaaaatagtcacctttcctttgggctttctaacctttctgaagttaacatcatcaacaccctcatcttctttcaaaagcaaatgagtggaagtaaagttagagagtcctctgctctcctgcaactctgaactactacttggcggcataaacacatcctttttgcacttgcttcgggtcctgaggttccagtttgaattgttactttggttttgtagatgggatgtcagggctgccatgctgcagtctttatatcttgacttgataccccttttagaaagtacagtaaaatcaaaatcttctggcttaagagaagtctctccatttttgtgaagataattagcaagtgaacttttggatctgaacttcagtccttgtgggctagaaaatgatattaaaggaaacttactgctagtaaatagaagggacttttaaaagaactggaccacatttcagatttctaattaatttccaaatgttgccataggtatctgtcatttaaaaatgaaaaagagtgataaatggcacttttaaatggtttcctctatgacaatataaatttataaatataactaaaatgcaacctacccgttaaccattcacagaaggagggacaaaatgtatgtaattttccccaaatcacttgatgtaattaatagcaacattgaaagaatagaatctgcaatggttttatggtaaaaatataaagaagctaagattcctgctatgctcccactacctgcccagacaaaatcatttggctgtactatctttaccatcttatatgcttacctgataaagtacacatcaaatcttcctgctgtcttcccaaataacctttgcttcacaactctttcccatccacatgggacagacttacggcattctgttcctgcagtagcaccaaactgagcagaagcgatgggttcttgtagcaagggattacattcactgcttctttttatcatcatttgttcctcatcttctcccactctttccaattccatagcaacatcttctttgctggaaaaacaaagtctaagtgattaacttatttaaaatttatcttccactgcctactcagttttaatccatgacaatgcaggaaccacatagattatccatattaaaatgagggagattaaagtcagtgtggaccagtcttgtgctatgggagtattttcctgtcttccaaaagcttcccatatcctctagcacaggttaaaaggtgttggaaatctctgcacaacaaaaaagtcaagctagaaacttttcggattaatcactgagtagggctattataaagatttctgggggcacttaccataaatttgagaatatgaaccaatagctaagctcttaagcaccagaaaatgcttaaataaatcagtgagttacactgtcttctctgcaaataaatgaggtaaaagttttacataatgtaaaatttctgggagagagtgtgtatcactttcatcagatgtaatcctccagaaggtaaataatttgatacagaatttttgaatcttcttcattcttgatcctcatggtaaccttgtaggtacaataaggtttactctcaatttattgataaaattgagtgacaggttaaattacttgcagaacagacacgagaacccaagtctaccaaatcttggtctaatacttctcccccatactgttattgaaaaaagctggcaaggcaaggtggctcattcctgtaatgctagcactttgggaggaggaagtgggaagatcacctgatcccaagagtttgagaccagcctggagagcacagtgagatcctcgtctttgcaaaaaatgaaaaaaaaaacccaaaaaaacaaaaaaaaacaagcaaccgggcgtggtggagcatacctgtggtcccagctactaaggaggccggggtaggaggactgcttaagtccggcaggtcaaggcttcagggagctatgattgtgccactgcactccagcctgggtgacagagcgagacctcatctcaaaaaaaaacccactaaactaaaacttcattaaagttccaatgtgtcttctatgatgaaaacatacttttaaaattaaaaaaaaaatttcagtaaagtgtatcctaatcactaaaccacagattgtaaaaggtggatgggtctagagagatcatttaacccaagttcttttctacaaatagggaaactgcaagaactagaattagaatcaaggttttctgatgtaatttggggtaaaataattttgaggagctggatggatcttatgaaatgatattgtttacaattttagagataaaaatactgaagcctggtggaatcagcacaaactcttaagagactggggctcaaattccagctctaccagctgtaagtttagcagcaagttacttaacatctcaaagtctcggtaaaagactctgtaaaaagaaggtgatgcctctttcaaagtagttcttagtattaaattttgaaaaaagtaggtaaatcttaacctcctatcacacacgtagtctaatgacttcctaggatcctccaaccccaaggggacctctttcacaaaacctcccggctcccccccagtctccctagtcatcttagatgaggaagtcgagcgcaccccagggctgatcgcacaggaagagcacctgggctccagaccctagtaactaaacccgtgggcttcgaggtttctgccgaccctctgtcaaaggttagaaaggcccacacactgtccactctcccgataccattttacaggtggtgaaactgaggcccaaaaggggacagtaacttaccggaggtcattcggcgggtctgggactaggcgctcactagaggtgacggtgggggcagctccgcggtcccccagactcagactctccagcccagtcgtgcccatcgagcagggtccggctgcagcaacgagcccagcgccgcaacgcccagggtgtggggcggagtaagatgtgaaacctcttcagctcacggcaccgggctgcaaccgaggtctgaatgttgcgaaagcgccccagacgccgccgctgctttccggccgccccctcggctacagccgccatttccacgctccaccaatcaaatccattctcgaggaagacgcaccgcccccacacgccccgaccaatcgctcgcgctctggttgcgctggcgccttaggggctccagtgccaccattgcttttgctgcttttctggctttccctttcggacatgcgcgctcggagcaaggcgccctcgcactcagcttaccgcgcatgtacgttgccaggggtaacgcaggtagccaaagtggcttgtggagtggcgaccgttagtgaggcggttgctgagacagacgctgaggcgggtaggaggagcccgagccgtaagggaagccgtgatgagggccgtgttgacgtggagagataaagccgagcactggtgaggagcggggcggttcgcgaagagcaggaggtcgagtcctcgcggggagtgcgcgagccgctgcagcgtgtttgaggggggcagcgggcttgctgcctgggccgagggcactgaaccccggcctgggagactgcagggtcgccctcccgccccttggcggttggagaaactcccgagggttggagagcggcaaagggaggtgccgcgcctgaggtggtggcgggtggaggcggctcttccctcacggtctggccctgtcgctgccttggattcatctcacacccacgagacagcacgaagctgctcaagcttcacagttcttgccacatccacatagtacccatactcttgttttcttgacgtttttctctaaattgtctcatttattttaattatgatttcacattttacaaggaaactttattactccatttatgaaaaccagtgtcacttgctctaaatgttaagataaaatcagcgtcgcttgctctaagtgtaaaagtaaaacttaaagtagggagaaacaaaactgaacaagctgtagctagctattgttgctagggagcctttaaacctgagatctcgtttctctaaaactggagatgggcaggtatgatcagaaaggtgctcaaaatgagcaccaaacacaagctctcctaattgggaagtctgaaaaagaactgaaggggaatgactttgtcaccttttgattcagttatttaatgtcctattccattgttatcgcctaaatctataacatagcagtctgttttgtcatattcttacttatgggataggtcttggcctgactttgaaaatcattcagcattgttgtgaagcctctgttctggccactggagcaggttacttgtctttggttctgtcccttctgagatctttctctgtgtaaagcatgccgtctctcctcatctcacacggaaatcctgaacatccttcaaggctcacgttggagacgggtcctctcttttgtgttcggcactagtggtagctgacactatgtgccaggtgctggctaagcacttcatatcctttatctcgttgtgtcttcaccactctctaaggtaggtactataatttcctctattttatgtatgaggaaactgaagcccagagagggtggataatttgccagcgtcacacagtgaggggtggaaccagctttcaagctcaggtcttcctcactccaacgtcaacgctctcagccactacattaatttttccttatgttacagacgtggcaaactcaaatgtctgcaggagacaggcaggtaacataaatgggagatgtttatttgcatcttcaacactaggaattgtatgttttccctaggaatagtcttgtattctgtaccccatttttcttgaaacacagccgtatcagtgaatctttcatttgtacttttaatagagatttgagttttaaaaaatcattttacttttaactttattataaacgtacctatagcacaagctgatgatagctggcaactgaacatttggcttcaatgtcagagtaatagagtgtggcaaactgcagagctcatgctcggcctaaaaggggcagctgctgctcagctcctgccaattaccaccatgcaggaatttggcctagtgtgctcagctcttcctgtttttaccagaagctaggaatctgggtttttatgtgaaatggcctaatttttaaatgttagcatccactctgaaaaaaaaacaaaacaccgtgtgggccaaataaaacatttgctggccgaatgcagcctgatttgctctgttttcaacccctggcacagaattttgttcatttctctcttgtggtacttccagagtctgttgagcataagagttaattttttaaatctgtttaattcagaagtctaataaacccgttaaaggcaatggctatgtcttactcgtttccaaattattctagagacaggtcagtggttgttgttactatggatagtaataaaatactagatatatataaaacgaaatactgtgggtagatgtattcatacgtgaatgaatgatgaataaagattggttttctggtttttggcccattacagatttgagacaacctattaggataagggatgtaggggttctatagaccatcaatcctgatggctgctagatataccagctgatagcccagaatgaaaacaaaacaaaaaactaaacaaaaaaaaaaaagacagtagaactaaaaaaatcctagatgtcaaagattagtcctccacatccaaatcagccattgtctcccggtctgctcctttgcttctattttaaccttcacatagcagcaggaactctgtttttttaagacctgctgctgtgatcctgttactctacttctcataaacctagagtgattcccaattactttccatgtcaagtcgtgcattttgctagagggtcctcctgaccctcctccccatcaggcttgcaacatttaaatttatacttttaggttgagctgaaaactctatttttctacccgaagatccttcccaaatgctcccttattctatgaactccctagttttctcctttaaatgcacagctccaggttcatctcaaccaggatgtcttattaggctagcccactgtattccaatcaggctagcatctgctgtaactctccattcatgccagctagtatttactgagtacttgctataggccacatgtccacatgtctttataggtgttatcatgtttaatctctacaacatgtgaggttggaattttcatctcatttaaagatgaagaaattgagatttaatgaggtgacataagttacctaagattacaaaatgagtaagtggggctgggtcagatgatgcaggaattggagaggcactgtgggacattggtttacagtgaggtgggtgcagggttgtcagaggacaatttgcaggattcctctgtatctctgcaatggaatctgacagtgtgtcttctgacagtgtatctcttttataaaaagaggcaggtggagagagaaccatcctacagtagaatagactgcctgcaaatgagtgagctcccagccctggagtgttcaagcaggggctagatggccatctataaggaattcttgccctgatgggccagatggactgcatgacaaggtctagagtcctttccaattctgagtttctggtgatttcataattatatttattacatgtctaggacagtgccatgcactgtgggtccacaaatatgtagaacatggccattgctttcaaattgtgtatgactataattaaaggggcaaggcaagataatatctaacacaatgtaaagaagactgtataagtcagagctaaactgaaatgtacagattctaagtacattaagagtttagattggggcaaatcagacatatatgatatattttaggaaggcaaatttcaagatattcagagaaaatgaatttttatatctaagaggaagaatgttcaggcttggctcaaatgagacattcagaaatgattttgtgataattcaacccaaaatgacccttatgaagaagaggtcacacaggaatcactttgatgagctcatatgtgtacaaggcagaaaggaagccacataccaaggatgactttagatgagaggtgcagacactgctccaacatctaataatccaccatagcaatccacaagtgtcaggcgctttggatagactggcttgtgcaccccgtgagtaggaggctacctctctatccttgttttgtaggtgagaatgaaagctcagataggagatcagcttttctggccccacgtcccccctactttttattccgccatgctgcttctcaaaatgtgaaatgtgccaaggctcagaggaagaaagcgtaagaaacaaggaaggcccaggtctgttaccacataatggtgaggaagctgaaaaactcagggcttcagtttgcccagctggaaagagtgtgataatcatccttgttccagcttctttatcagccagctctgtgactaggagcaaacaacttgcctctctgtactttagtttcctcattggtaaaatcggggcagtggtgcctgtcctgtctactacattatgttttcgtaaggatcaaataagataatgtaagtttacactcttttttttttttgagacagagtctcgctctgttgccaggctggagtgcagtggcgcaatctcggctcactgcaagctccgcctcccaggttcaagccattctcctgcctcagcctcccgagtaggtgggactacaggtgtgcaccaccacgcccagctaatttctgtatttttagtagagatacagtttcaccatgttggccaggatggtctccatctcttgacctcgtgatctgcctgcctcggcctcccaaaatgctaagattataggcgtgagccaccatgtctggccaagtttacactctttaacaattcttaaatattgaataactgtgaagagtttttattaaaggaagcgtcaggtcaacagagccatattaaaagctttctgaattcttcatgtaatgccttaagtaggtaataatacctttttttgacatatgccaacaatgataatggcagccacatagcataatggttaaaacatgggcttcaggccagattgcctgggtttgaggccggatgcagtggctcacacttaaaatcccagcactttgggaggctgaggcagatggatcacttgaggtcaggagttcgagaccagcctggccaacatggtaaaaccctgtctttaccaaaaatacaaaaatgacctgggtgtggtggcaggcacctgtcatcccagctactcaggaggctaaggcaggagaatcgattgaaactgggaggcagaggttgctgtgagccaagatcctgctactgcactccagcctgggtgacagagcaagactccacctcaaaaaaaacaaaaacaaaaacaaaaaaacagattgccttggtttgaatcctggctccatttccattcagtagcactttattttcaggcaagttatttaacttctctgtaccatagttttctcatctgtgaaacaggtatacagttgttttgaggttaacatgagttaatacatgtaaagcatttaagctgtacctggcatacacaataataaatgtgttcaataaatgttagtcactgttattaaagtatgaaggataacagatttgacatacttggcagtaattcaagggagcagaaggcagcatagcgcgttaattacaagcacagactctagagtcagacctgagttgaaatcctggcccttgcacttgctagttgtgtgacatcaggcaaactacttgacctctctgagccatggtatcctcatctacaaaacagagtaataattcctacctcacagaattattgtggagatgaaataaaataatgcattttaagagctcagcaggtgctgtctggaataagagttcgaagtactgtcattgagagtgtacttccaagttactgacaaaagcttgatttttagattactggtataaaccaaaaataaaattcagaggccccccaaccatctgaatggatttccttctcaaccagggctcttttaaaatttaacctgagagactgtttcaggccatgatgggaaatgggggtcaaacatgcctcagtatacctctctggcattaacatcaacacagactttaagtatgataagaaacattttacaaactctcctctctaaagcctagtacctcaaggcttcctctgcaaacagtaacttgggttgccacaatcctttatcttaacccaggcattcctttctgttgaacctaggttttttgttttttttttttctgagacagagtctcactctgtcgcccaggctggagtgtagtggcgcgatctcagctcactgcaagctccaccttccgggttcacgccattctcctgcctcatcctcccgtgtagctgggactataggtgcccgccatcatgcttggctaattttttgtagagacggggtttcaccgtgttagccaggatggtctcagtctcctgacctcatgatccacccacctcggcctcccaaagtgctgggattacaggcatgagccaccgcgcccggccgaccctaggtccttagataagctcaaccaattgtcagaaaaattttaaatcaacctataagctagaagccccctgcttcaagttgttccatctttctggaccaaaccaatgcatttcttaaatgtatttgattgaagtctcatgtttcactaaaatgtgtcaaaccgagctgcaccctgaccaccttgggcacatgttctcaggaccacctgagggctgtgtcatgggctgtggtcactcatatttggctcagaataaatctcttcagatattttacagagtttgattttttgttgacactggcaagtttatcccatgctaaacttttactatgggttgggttttgtttttttgttgttgttgtttgttttttgtgtgttttgttttgagtaacttcagtagtaaccttaacaatagtctgttttgacaggtttttgacacattcttactatagtcacctgaaccaatgaaatcctctgcctggggcatttgaaaaatctttgtaatatggctctagcccatttttctagcctcatttctccatgttctagcaacatcttgcacatagccagatgtttcagtcaaattaaattattttgattacttgtgttggcaagaagagtcaaactgcaaaatattttaagagatttattctgagcctaatatgagtgaccacagccagtgacacagccctcaggaggtccacagaacatgtgcccacggtggttggggtgcagtttggggaggcatgagacatcaatcagatacatttaagaaatacattggtttgatccagaaaggcaggacaactcaaagtgagggcttccaggctataggtaaatttaaacattttctggctgacaattggctgagtttgtttaaagacctgggatcaacagaaaggaatgtctgggttaagataaaggattgtggagacccatgttcttatttgcagaggaagccttcgggtactaggcttcagaaagaataggttgtaaaatgtttcttctcaccctgcaaaacagagtcttgctgtcacccaggctggagtgcagtggtgcaatctcggctcactgcaacctctgtctcccgggttcaagcaattctcctgcctcagcctccctagtagctgggattacaggcgcccgccaccacacctggctaatttttgtatttttagttgagacagggtttcaccatgttggtcaggctggcctcaaactcctgacctcgtgatccgcccgcctcggcctcccaaaacgctgggattacaggcatgagcaccgcacccagcctaaaatgtttatcatacttaaagtctgtgttgatattaatgccggagaggtacaatgaggcatgtcagaggcccacttcccgtcatggcctgaaacagtctctcaggttaaattttaaaagagccctggttgaggaggaagtccattcagacggttgggggggcttacaattttatttttgttttacacttgttatttctcactttcatgtctttgcttgttttattttctttgcctgaaatgtcctttacccagtgtcctcctccatgtttcaaaagccctacctttttcaaatatcttcttcattaatctttttctgatcctctccttgaattaaaatgctgttgaagcggcgtcattgtctggggtaaatatccgagatttgttgtctcaacagcaatggaaaactaggatacggacacaccagagtgaggttacgagtagaagtttaacaggcgaaagaaagagaagagctcactgcagctgacagcgttctcgaaaaaatgagttgccacctctgtggtgaaatgcaggttttatagataagcttgaggaggtggtgtctgatttacatagggcacaaaagattgattggattggtgtttcatttgcataactttcgaaaaactggttagggctaggtgtgtcatttgcattgggtgcgaaaagctggccacccccaccctaatcttttattatgcagttgggttatttacgtggccagcgccatgttgcccgtttctttactgtacacgtggtgacaaattaaagggaggacagaacctccatgttgaacatacttggcccccaggtagcctttttctattggcacagctgccggcattcaccagtgcaagcttccagcttgcctttttatttatttatttattttttttttttgagacggagtcttcctccgtcgcccagactggagtgcagtggcatgatcttggctcactgcaacctctgcctcccaggttctagtgattctcctgcctcagcctctcgagtagctgggattacaggcgctcaccacccaccaccatgcccagctaatttttgtatttttggtagagacaaggtttcactatgttggccaggctggtctcgaactcctgacctcaagtcttcctcctgccttggcctcccagagtgctgggattacaggcatgagccgctgcgccaggcctcagcttgcctatctatgtttgcagctcgatttttcaggctgctctttgttagaaaaaaataatttcttgggctgctttttattaaaagggaagttctgccgaagactcttttaccttcactatctggctaaataatttctttctagctcctgtatcactgcgtcttcctccttcgaatcctgttttcatgtgtctcttaaagcctttatcagagtactgttctgtatttcatccaatctaataggtcattgattataaaataccattgttttgtgtatcaataagaaagcaaaaaatgctgccagttacactgaaacatcatcaattataagacacaaccttagaggtgagaaaatgtgaaaaaaaaatgtaagctttagaattgatgacatatggtagttctttgtgaaagtgtctgtttcacaccttctcactggatagtaatttccctgaggggagggagggattatgatctgttcatatctgttggtgcctggcacctaagagggactcagtaagtatctgtggatttactggcccttaacacattctctcatgttgtctagcctttatgatattattagaagagttaataccctcaacagttgaccctttgaataatttcttgtgtctggcttctggacaagaggaaatcaggacaaagagctaactactgagtggatcatgattgaatgggctgctgtggtgtggcggttgaatggaatttgcaacaaatgcaattcgtagttattctttttctcctcagtacacacacagtgtttcttaatggcaataaagtttactttcctggccattagcagacttcatcattttggttcctaattgtctttttcccttgtcttctgttcagtataaatgacatcgcatttaagcctgatggaactcaactgattttggctgccggaagcagattactggtaggattttgtcttagtttcctcttaaagtgcttccctaacctccctcttgtgagtactctgaaatttgaccctttttttttttttttgagattaaaaaggcaagggtggaaaaaccttccctattactttttaatagggatggaaatgggctatttaaaacgggcaagtaaactatcagataagaacctgtgaacaataccacctttggggtcattcatctttccctttttactttgagacacccatgaaagagttgaaaacaatcacaatgcctttgaaactggactggtgtcagtttacattttgtcccccagaaaaattcaagcaacaggactgacggtgctgtgtccatgaaaagtcagatagcctgaccccaacttttaggcattggcctatctaaacagttccatatggatgttgtcctatttttcatattttcaaataacataagctccctctggaacctatccaggtatataaaagtaattttcagagaaccccttatgtttgaccaaaaaacctttgtatgatctctctttctgtctaagtctacttcctcttctctgttgtctctagatacgcagactgattaatctccattctttgtatggttaactacataatcttaaaacatggttaaattgttctgcagacttctctccagtgtaaacaatccaaactctattagtttttctacataggttatcttttccaatactctaaccatttcagaaagtttccgcttgatttctcagatggtgtgtgtgtgtgtgttttttttttttttttttttttttggagacagagtctggctctgtcgcccaggctggagtgcagtgacgcgatctcggcttactgcaagctccacctcccgggttcacaccattctcctgcctcagcctcctgagtagctgggactacaggcgcctgccgctacgctcagctaattttttgtatttttagtagagacggggtttctccgtgttagccaggatggtctcgatctcctgacctcgtaatccacccacctcggcctcccaaagtgctgggattacagaggtgagccaccgcgcccggccagatggtgtgtttttaaactctccacatagtgatagatgtcacatggctatcaaatacctaaatccatattacagctgggttttattttatttcttagagacagggttgtgctctgttgcccaagctggtgtgcagtagtgcagtcatagatcactgcagcctcaaactcctgggcttaagggatcttcccacctcagcctcccgagtagctaggactgtggacacacaccacctcgtccacctaatttttatttttttttatttttatttatttttattttttgtagagatggggtttcacttagttgcccaagctggtcttgaactcctggtttcaagcaatcctcccacttcagcctcccagagtgttgggatgacaggagtgagctaccatgcctggcctacagttgggttttataacattccctcctacttgaaagcccagagttctgtgactttcaaattcttggtagcaaatatgaaacatctattatgttgatttagtgcagagctggcattaaaatttaatcatgttgtagctggctctttttatgggctagttttatttaggagggcctgccttgatcaatcatatatccaaattcaggtaaggatgagtataaagaatttccatggagtgagtaattgaacctttggttctcaaggattggtagtatattcctggtcacatagtacatagacctgggtcctctacttcttggttacccaactttaagtcacgttgtttttggttttgcagtgcagtttttattggctacagatttagaatattgacacgtattgttataaaaacaaaaatagcagtagcaaccctgcaggaattctgactaatagatatcacatagataatctgtatttgtctcttttgccaggtttatgacacctctgatggcaccttacttcagcccctcaagggacacaaagacactgtgtactgtgtggcatatgcgaaggatggtaaaaggctgctctgggtttccattctctataatagcctcatcattgttcatttttctctttagtcactttttaattatttctagtaagctggagtacaagttgcaagttcagaagacagtgaagttgctaagacttcagtttggtcattcaatctagcaagtatttattgaggtcatctatgttccaggcactgttcaaggtgcttgagttacttcagagaaaaaaacggtggtccctccccttatggggcttctgttttatggggtggtggtgagaagtgagggaggaagaaagtatgagggaagacatacagtaaacatagtaaaaaggtaaattaagtagtatgctggaaggtgataactgttatggaagaagaaaaagtagagcagaatgagggggattgagagtgctgggcagggcagggggttgggtacagtattgaattagactagtgagggtgggctcattgagatgaggacaggtgaggaaaaagactttgaagtcaggaggcaatgagattgtgccagtgggcatcggggggaagagagctctttgcagaggaagagccattgcagaggccctcaggtgtgggtgtggctgctaggagctggatcaaagagaatcgggaattgtagaggatgaggataaagtggtaacagacatggggtggtcagatcataaagattttgattctcagtcaaaatggaactactgaaaggtcctcagcagaggagggatctgatttgatttgtattttaaaaggatccctctagttgctgagttggaaacaacctgcaagaggtgagggttaggacatctgtgtgaggaagcatcatccagacagggggtgatggtggctcagacctctgtgggggcagaggaggtgatgagaaattatcagactctggatataatgggagggtggagccaactggattgtctgacagattggatatgggctatgaagaaaaaggagtcaagtttttgacctgaggactgaaaggttggagttgccccccccactgagatggaaaagactgcaggtagagaaaagttatggttgaagatcagaaattcagttttatacatgctgaatttgagaaaagttgatgatgtcggagaggggagagaactgctggaacagagttgttgagtaggcaagaggagatgggatctagggcatagacggggtatttgctttagataggggcacagtaggaactgcagaggccagcagatggggacaatgtggtagtaggaatctaatggaaattctcaattccattttttttttcttcagtgaaataggaagcaacagcaactgagagtggcaatggggaagggaggtttcagagagttgaagagaaagggaaaaagtgtaaagtcactgcctcagagaatgggacagcgagtggacccaggaggtgtagtgagatccccggtgacatgaagggccctcttgaagattgtgatcatgaattgaaagtgagattagttggtgtgattgtgtctttttctccagcgattttgagctgcatagttgtagaggcagaagaggtgaatttaaccagaggtggttttgcaagcacatttgaagatgaagtaggagggcaagggagcagaaagtgtatacagataaataattatgtacattaaccttgaattgttggctgaataatgaagggagagaggacagcaatggagaagtagtaggttctggtggtgttgaaggattgttacagttggggtaccaggtgggttgggaaggaagggaagtggtgcatgaaactgagatttaaatttattttaaaataaatccatgttgtcccacagcataggattagtgggaagaaatgggctttggaatgagacagttgtgagttccaaccccaacccaacaccagagttctgtgagtctgagctggttattgagtctgagtcacgatttcttcatgtatcaaatggataacattgagataacattctgtagccactgccaagaagtcacaaaattgtaatgttataattcttgaatgaaccttggagattattccagtcccaggtttttaacttcttttggctgatgggcctctttgataatcagatggaagctttagaccactttctagaaagatgcaaattcttcatgtgtatgcagaatttcatgcatataattttagtctgattagtccagtctcttcactttagtcctgcataaagacataaacaattggccaggcacggtggctcatgcctataatcctactgaaatcctaaagctctgggagcctgagttgggaagattgcttaaggcaggagtttgagaccagcctgggcaacatagtgagactccctaaaatctggcctgggtgacagagctagactctgtctcttaaaaaaaaaaaaaaaagacaagtcatgtgacttgccaaggccatgcagcagattggcccaaagacaaaactaatttcttgcttcatagtcaggtgtgctgtaccatggtagtcatatttgtgtgtgtgtgtgtgtgtgtgtgtgtgtgtgtgtgtgtgtgtgcatgtttgagttcaagttcagaataatgttttagggagacctgtgaggagggagcctggagagctgaactgtttctgtctcatcctagtggctgttgaggaatgtgggtcagtccagggcccagtataaggcccagtaggtacagaagagctattgggcctctggtgcctctggtgtttataagcatagcagggctctttgacctgcaacaccattagggcacttgaggatgtcagagtgtgacccatcagtagtggcatttgcacagcactttgcagagtcctgtcacacacatctcacttgatgcttccaacaactctctgaagcaggcagcaaggggactcttatctccgctcaaagatgagaaaacagacttggagcaattacaggtgatggtggcagaggcaggcctaacccaggttctctgactgcagagtctttgttctttctagtgtatcatgctgcctcttcatgacacctgtataatgattaagaagtcttttagtcctcagaattggttttttcctcttagacctgaagattgagatacactgaattccagctttgctctttaagtctgcttgtttctgatttctcctttaagttcattaagttttttttgtttttttttttgagatgaagtctcgctctgtcgcccaggctggagtgcagtggcgcgatctcggctcatggcaacctctgactccctggttcaagtgattctcctgcctcagcctcctgagtagctgggactacaggcacgcgccaccatgcctagctaatttttgtattttcagtagagacagggtttcaccatgttggtcggcctgatctcaaactcctgacctcgtgatccgcccacctcggcctcccaaagtgctgggattacaggcgtgaaccaccatgcctggcccaagtttaataagtatttaatgagcaaccatgatataaaagtatgtaagacatagtttttttgttcaagaaaaacaatataatatgaagaaataatagaaatagctaatttttttttaattctattccaggcccagttctaagcaacataagggttaggggtgccactgcctgtgcaataaaaaatctgcatgtaatttctgaaccccccaaaactttactattaatagcctactgttgaccagaagccttacctgttacataaacagttaacacatttttaatattatatgtattatatattgtattcttaaaataagctagataaaatgttaattgagaaaaaagaaaaatatatttactcttcattaaatggaagtggatcatcataaaggtcttcatcttcattgtcttcaggttgaataggctgaggaggaggaggaggaggaggaggaggaagagggattggtgatgctgtgccagggagacagaggcaaaagaaaattcacatgtaaaagtggactcatgtagttaaaactcatgttgttcaggggtcaactgtatgtacacatgtacatacactcatttaatcttcacaccaaccatgaggtaaatactaacattgtatccatttttcaaataaggaaatgaaagctcttcagtagcttgtttgggtcatgcagctggtcagtgagatctctaggaattctgacccagagactctgagcccaaagcttatgcttttcatcaccatcacctgctacctaccaggatgagggaggagtgatggaaatagtaagagcagtttctttgtttatttagtatttgcagcaatatcatatggctcaccctaatatctactatttcagctactgtaaaaggtacttggccgggtgtggtggctcatgcttgtgatctcagcactttgggaagccaaggcgggtggatcatgaggtcaggagtttgagacaagcctggccaacacagtgaaacctcgtctgtactaaatatataaaaattagctgggcatggtggtgtgtgcctgtaatcccaactacttgggaggctgaggcaggagaattgcttgaacctgggaggcggagattgcagtgagctgagattatgccactgctctctggcctgggtgacagagctagactccgtctcaaaaagggccagtcgtggtgactcatgcctgtaatcacagcactttggaaggcggatcacctgaggtcaggagtttgagaccagcctgcccaacatggagaaaccccatctctactaaaaatacaaaaaattagccaggtgtggtggtgggcacctgtagtcccagctactcgggaggctgaggcaggataatcgcttgaacccgggagtcggaggttgcggtgagccgagatcgtgccactgcactatagcctgggcaacagagtgagacttagtctcaaaaaaaaggtactttacagatactatcttagttgactcccataaaaagactctgaggaagatactgttcctctgtgtttcagatgaaggcattgaggctcagagaacagtgacttgcccaaggtcaccttccacttgccctgtgaataaagtctaaaagtccttaagatgtacagaatgtggcacatacttacctcttaatcctcgtctctcaccagagtaggtgaagaccccgttatttgctgccatggtaccgtgatcctcttccaaatgcttataaatgtggaacagtgtaattaataacaaattacttgttatatgttgcctctctccagtctgttccttcataaagcccaagtagtatgaaaatgcgaatctgatctatcactctttgcttaaaacctttctttggcttcccattgctttaggataaagagcaaggcctctgctgtgtccctgaggtcccaagagatccttccacaacccacctcacccttccctccgttccatgatgactccgctcattccctcagacatgccaggcttttcctgcttcagggcctttgcacatctgttccatccatgtggatgggtctgtctcctctctacatctggctaagctctgctcatcctttaggtctccactgaaggatctcatccttagagaaatgttccctcatctaaattaggtcccccaggagatgttgaccaaagggtagtttcagtcagacaaaaggagtacatttttgagatctattgcacagcatggtgaccatagttaataatagcgtatatttcaaaactggcacaggaatagtttttttttttttttttttttgagatggagtctcgctctgttgcccaggctggagtgcagtggcgtgatctcggctcactgcaagccccacctcctgggttcactccattttcccacctcagcctccagagtagctgggactacaggcgcccgtcaccaggccggctaattttgtttttgtatttttagtagagacggggtttcaccgtgttggccaggatggtctcgatctcctgacctcgtgatccacccgcctcagccctccaaagtgctgggattacaggtgtgagccactgttcccggccaggaatagattttaaatgttctcactataaaaaaataagtatctgcagtgatggatatgttaattagcttaatcattcttcaatgtgtatgtatataaaataccacattgtacttcataagtagatataattattatttgtcaaaaataaaaatttaagtaaaaaagtaaatcaggttccccagttattctctttcataggatccgtgtcttaccatgttgtatttgtgttagattaatttgatgtgtacttcttacactagactgaactttatgaaagtagggatcatgtgtgttttaatcattacttaatccctagcatagaacatgacagctacatgtagtaggctcccaatacatctttgtttactcagtgtcagacaaagcaggtttggaacccaaatattctgactccaaggtcctgcctcccagtactgataagaactaggaaagaagctaacacttactaggtaccttaaagaactagttttctaaagaattctctctgggaaatgctggtttaagataaatgtaagactttccattttacaaacacttttaggcaagcgctttgcttctggatcagctgacaaaagcgttattatctggacatcaaaactggaaggcattctgaagtacacgtaagtaacttaggtgtacagtattatgagtttgatgcttattgaataattgcagcaaaagcctcttagaaaagatgtaggagaaaacttttttctcttaaattgaacttgaaattaagttgtgggtgtgtgtggttggtataggaaggttgagtagtgaataagttaatgaatatttcttggccacttactggcgtggccagcactgggctaggtgcttttatgtagctcatctcagttcatctgacattgtagactttatcccacccccaacctgtcatcttccagtgtccctgtctcagagaatggccttatatccacccagtgtcaaatgtcagaaacttggggtcagtgtgctccaggcctcctcttactattggggatctgccgtgttcttcccctgttcctctactagttggtccctatttaccctgcagatctcagactcaaatgtcagtttctttgtaaggactttcctgcctctctagactggaacaggtctctttcgaggcatttctcacaattgcagttttaggtttattctggtgactgatcagtattgctcatcggcctgtaagttccataagaacagatactgcatctattttttgttttgttttgttttgttttgagacagagtcttgctctgttgcccaggctggagtgcagtggcacgatctcggctcaccgcaagctccacctcccaggttcacgccattctcctgcctcagcctcccgagtagctgggactataggcgctcaccaccatgccaggctaattttttgtatttttagtagagatggggtttcaccatgttagctaggatggtctcgatctcctgactacatctattttttttttctcactcttgtgtccctgatacaatgcctagcccataattggtactcaccaattatccttcctttccatctttcctccttccttccttcttccttccttccctccctccttcttccttccttccttccctccctccctcccttcttccttccttccttccttccttccttccttccttcccttccctccctccctcccttcttccttccttccttccttccttccttcctttcttttcagtcttgctctgtctcccaggctacagtgcagtggtaactagctcactgcaactacaaccttccaggctcaaataatcctcttacttcagcttcccaaatagctggaactgcaggtgcacacccccacaccaggccaatttttaaatttttttttttcttggtagagacagggtttcactttgttgcctgtactggtcttgaactcctgggctcaagcagtcctctcaaagtactgggattacagatacgagccactgcacctggcctcttttcaattgtggtaaaatatacatgacataaaatttatcatattaactactttttaagtttacagtttaatgttaaatacatttacattgttgtgcaaccaatctcccaaactcttttatcctgctaaactaaaattctatatccttcaaatacctactcacccttctctcctacccccagcccctgaaaaccagcattctactttctgtctctctgagtttgactgctttacatacctcatataagtagagtcatacaatgtttgttcttttgtggctgagttatttcatttcacgtaatgtcctcaaggctcatctgtgttgtagcatgtgtcagaatttactttctgtgttgtagcatgtgtcagaatttacttccttttttttctttattattatttttttttatgaagacgaggtctcactatgactcctgagctcaagcaatccttctcccttggccgcccaaactgctgggattacaggtgtgagccactgggctcagcttccttcctttttaagtctgaatattattccattgtatatatagaccacattttctttatccattcatctgttgatggacacttgtgttgcttctgcttcttagctattatgaataatgctgctatgaacatgggtgtacaaatcaacaaacaatttttgaaggaatgaatgaatgagtgaagttgtaagtaaagtattacccacaagtgaaggactaaaacgggttgagacgccttgcatggtacatgatttgctcagctttcattgttgtctaaggatttgtcatgtttccagatcttggtctgtgatgtcttcattgcacctccatcttccatttctgggcctccacaaaacagtaagagtaacagccacagataaagcacctaaaggccaaggtgggaggattgattgcttgaggccaagcgttcaaaaccaacctggccaaaagtgagtccccatctctacaaataagaaaacagtgggtgaggagaaggagaattaattctttaggagtaggagaattaatttctgtgctttttgttggtcacttgcagaagagcatgtggtctaaagtcagaggctgtgggctcattattaaaatcttcagttgtagccactgaaatctttgtggtttgctgcatagtaatctacagttgtttacttcccaggcacaatgatgctatacaatgtgtctcctacaatcctattactcatcaactggcatcttgttcctccagtgactttggtacgttctgattcctgatgtcctgtcctggaataactgaaaatctgggctaaaaatgctaaaatgcattcagaatatggtgattttatcctgagagagttaatactacttctctaccttcaatggctgaggggaggctgacagttattctttaaattgtgtggaaaccaagacagtgaatggtgacctttactctggtaagacatcagagactacaggaagggccccagcaaaggaaatggtaacaagattgggagggcacaggcataacttggtgttgctgcctttgggaagccttcccttggtgttgctgcctctgggaagccttccctgactcaccctggcagagacagtgcagttgtcctcacctttgtattgacccacatctatgtttatgtgaaattcttcactgttgcggttctacttcttgtgcaatttgtcgtcattactggtttaggtggctgtagctgtcctccctgaggggctgaacaccttgaggagttcatcctggccacggtcccgtgccagcattacagcactggtgtagtactggcacaaaagaggtgtcagtaaaatgtctgtggagggaggaagggagtgaaattgggcagaggcttgtaggttatttccattaatggttgattctgttttcagctctatcagtctgtgttcgttgctagtggatacaatgaagtcactagatgaggagtcagaggcctaatccctctcagtgttccagttcccttatctaaaaggagcatgctactcactgtgtctcactgatacggttctggttctgaggttcaaaagagagaatggaattgaaagccaattgtataaatacatggagaaaggcctgtcatttgtttaacatattttatagcattttcttcatgtgaagcactggtctgtgtgcttacactggaatattaaaaaggcaaaatagaatccctaccctcaaggagcttgtggtcttaggagaaggtgggattaaaaaaaatataatattaagtactagtatttattgaatgcttgcagtgtgctaggcactgttctaaggattagaaatgaatttctatttgagctttatgacagcccctgaggtgtcaggtattattctcattcccaccctactgatgaaaaagaggtagaggtcccttagctagtaagtggaggaaccagggcttggactttagaccaggtgattgcatacagagcctgctctgctaagcactgctgaaggaggcccaggaggaaggagtttcttccagcttggggctccaggcaggcttagtggaacacagataacatgtgcacacgtcaaaatgtttggaggaagcgttctggaccaggggaaaggcaaaaaataacttgtttgatgttgcacttggccatgtatttgtgcactggagttaccttcttgattgtacttcgcaacttggcaaatagaagaatttgcttatgttgtctagacatacacttgctatgaggcactgagccagggcatctgggacaggggggagcaagccttaggtgaccagtgtgccatgggagaggcacagctcagatagagtcatgtgttgtgattgagacctatgaaagaaaactagattttcagaaagcatcattgttattttaaatgctaggttatactctggttgcagtgtcaaagttataaacaatgaaactgtcatttctttgagagtcaaatccctgaaaagttggctagaactttaccaatctattttatttttcttctgaaagaatgatagattcatagtaagttacaaagatggtaccaagaagtctatgtacttttcatccagtttcccccagtggatccatcttatgtaactattatacaatatcaagaccaggaaactgagactggcacaaagtgtgtatattatatagttctgttgttttatcgcatgtgtagattgccatcagcgtgacacagaactaagccatcaccatgcagttaccacttagtgtcatatctactcaccttacctccagttatctccaaaccctggtaaccacaaatctgttctccatttctataattttgtcattcaagaatgttatataaatggaatcgtacagtatatgaccttttgagattatgttttttcattcagcataaaatcctggagatccatctaagttgttgtatgtttcaattatttgttcctttttattgctgggtagtattccaaccaatccatcttcttttatattattgtgcattgaagggttgtggtctcctgaacagaagtctgtctccaaacacaaatcaagcagcaagatcatctgctgcaggtaagtgcagctctgacgataagatttatgttccttcatcttccacacagactctcaaaatccaattatttcatgcagcagagaaggtcttgtgttaggtagttggtttaggcccctgtatttccttttttcttctttcttcgtctcctcgatgggaaagacttgtgcctttgatcatgaagcaaaagagaactacaagttgccttcatgcagttacttagcaacaagcctcaacatccagctatactgagtggaggcttgttgaaaatgtgaggctgtcattgtccaggcagcatgtgtggggaagaaagctttccctcccacactttgatgctagacctgaattagaatccagaatctctcattgacaggccatgtgacctcaggaaagttactaaatctttctgagctggagctttacgttcctcatctgacagatagggataaaaatactgacttgacgagattgttgtgaaatgcacacaaactcatgagtgtaaagcgtgcaggacagtacctggtgtacagtagacactctaaatggtagctattcttgctgttcagcttctaggagtatatcccttccgttcagcatctgttgagcaccttctacaaagcaagcactgttctaggggttggaagacaccaagtctgttcttaaggtgctctttaagtgggaggggattgagatggagagtgggaagtggtggctggcccagagatgtaggcacaagctaagggctgtcatagaggtatgtacagagggctgggggagctcagaaaaaggcaccaaatggtgccttcacttctcactgtttattacagaactaaatagcattttaagtttgatcctctgactttatgtcaggaccggcaataatgaaaccatatcccagctgttgctgcctcatcagacttttatttcaaaccaaggcatcatcctcactagttttaccttctgtggggtgcttcccctatccccatgccttttgttggttgtgtacacagctggacaaatgatggtcagtacctggcgctggggatgttcaatgggatcatcagcatacggaacaaaaatggcgaggagaaagtaaagatcgagcggccggggggctccctctcgccaatatggtccatctgctggaacccttcaaggtactcttaaagttgtcctccttctagaacaaacaccatcatgaagaagggctttttgtcttcctgaggtctccctacattcaaaggcttctcacctcacttgaatggtctgttttagaacctgtcccatttgtatggattttttttttaatagtcccgctacctgagaatgtatggaatttattaagagcctcctcaaaagttgagtttaggaatgaatcctggacattttagcaaagcagatgagctatttaggacaggccaaagtgtgtgtgtggcgtgtgtgtctgcgcacatgtgcatgcacacatgtgtacgtgtacatgtatatgagtgtgtgtgtgtgtgtgtgtgtgtgtgtgtgtgtgtgtgtgtgtggtgtgtgagtgatgcagcaggaccatttccttatgaatcaatagtggagctctttgctgtggctttatttttgcctttccttttttagttcttccctccaagtttgggcagaatatgtgcccacctgttaataaatagctttttcatgagcctttttttgcccttgtcagaaagtcaaaattaagtctacagacgtccctaaagcctagagatacacaaacaattggcacctaccttcttaaattttatacacactttgctttctatgtccatgtgactttgagagtaaactaattatatgctctttttttttttttttttttttttgagatggagtctcgctcggttgcccagcctggagtgcagtggcacaatctcggctcactgcaacctccacctctcgggttcacgcagttctcctgtctcagcctcctgagtagctgggattacaggtgcctgccaccacgcctggctaattttttttttttttttgagacggagtctcgctctgtcgcccaggccggactgcggactgcagtggcgcaatctcggctcactgcaagctccgcttcccgggttcacgccattctcctgcctcagcctcccgagtagctgggactacaggcgcccgccaccgcgcccggctaattttttgtatttttagtagagacggggtttcaccttgttagccaggatggtctcgatctcctgacctcatgatccacccgcctcggcctcccaaagtgctgggattacaggcgtgagccaccgcgcacgcctggctaattttttgttgccaccacacctggctaattttttgtatttttagtagagacagggtttcaccatgttggccaggctggtcttgaacttctgacctcaggttatccacccacctcagcctcccaaagtgctgagattacaggtgtgagccactgtgcctgaccctatatgctctttatatatcctataatattattaaaccatcagtatcctttacagagtcctctgagggtaaacgaaaggtcctacttgtttaccagctcaatgtcattttacagatggttgcctacttgatttagaaggttgtttggaaggttattatgcttcttcctgaataattttttttggcccatgctgtaccatgcatgtctaatgctgtcaaaggccattagcctgccccagagttcctgctgtttgatttgtggctgcagaggacttggtggctctaggctaccatttttaattcatgagaagcaggaggccctgtatacctggtggctgtcctcctccaggtagggttcagaggctccttttattttttatttttattcttttttttttttttttttttttttgagacggggtctcactctgtcacccaggctgcagtgcagtagtgcgatcttggctcactgcaacctccgcctcccaggttcaagcaatcctctcacctcagcctcccaagtagcttggatcacaggcacatgccactacacctgtctaattttttgtatttttggtagagacagggtttcaccatgttggccaggctggtcttgaactcctgatctcgagcgattcacttgcctcggcctcctgaagtgctgggattacaggcgtgagtcactgcacctggcccccaggggctccttgacaggattttaaattatagttttagtgtagttctaggcaatgtaattttgaacaactacttactgtctacagccgatgggagagtttctggatgaacagagagaatgaggatgccgaggatgtcattgtcaacagatatattcaggaaatcccttccactctgaagtcagcagtgtacagtagtcagggtagtgaggcagaggaggaagaaccagaggaagaggacgacagtcccagggacgacaacttgtgagtgtgtcccagtgagtgggaacccttctggtaagggcccaggccccacacagacttgccaggacagatgttaaactctttggccaagggagtgcagggactagggggaactgtgggtgaaagcgccttcaaaaaaaggagacatacccttaaaacttgtgtgtgggtataaagtgatcctgtgagaaactataggaaatactgaaaagactaaaggagaaagttcaacttttctgataaaaccccatcccctgaggaaatcactgttagcaatctagtgtatttctcctcagtcttttcgtgtgttcatataattaactaagtcatattctgctttttttttcacttaacattataatgtgaaccctttccagtaacattacaaatccttcgaagaacatgatttttaatgtctgaaaagtgtgcccttttgtggatgccccatcactcgacacttcctctattactggacacgtttcttagcctgttcccacactatcccttaccttaccttgcattttctaggatgtatatcagagaggaagcccttaccttagccacagtcttcactcccaaatcctggctgtctagtcattcttctcttcagttgagattgcctgtagggaaaacatgggcaggccagagtggggaaagctggggtagccaggatatctcagtttggcagtagagatctagcttgagactttccaaactgttttacatagtacctgagtttccttggaagaatcccaccctgaggtcatgggggctgggaagtggggaccagtaaaggaggaaggtatggctttgggtccccatctcagtgcctttgattgtttcaacatgagtttttgtttcataaagaatcctactgccccaggaggtaaaagggggttgaaaatcactgatccatctcacagggactgagcccagcccagagccatatgtggcctccccaagagggctcactggtgggctgggctcctggattgtgtttggactttggacatcagtgccagtcacacaaaggtcatctgcaggctccctcattaacatccctctcggtctttgtctcttttcccttagttttgggttagtgcctatgacatttgccactcttggctgggttttacaaacaaggctttaccttgcctgcctacatatccagtggtgctaccaggttaccacaagacactgggatcagaaaagctggaattaataaacaaagaggcaacattaggtggattaagacccagcctcaagggctaggaatgcttttcttttttttttttgtgacagagtctggctctgtcacctgggctggagtgcagtggcacgatctcggctcactgcaacttccgcctcccgggttctaagcgattcttgtgcctcagcctctggaatagctgggattacagacacgcgacaccacgccgaactaattttgcattttcagtaaagatagggtttccccatgttggccaggctggtctagaactcctgacctcaggtgatccacctgcctcaacctcccaaagtgctggaattacaagcgtgagccatcacgggctgccgcttttctcttgaactagattcccaggtagcttgctctccagcctcaggcaagggagtttctcctgtgtgctggtcctacagtcccagccccacagcactgatccccataggttctcagtttcaaagacagttgtttgttttcagagcccattgctcttttttgaaaattagattcagtcagaaaccatttcacctgtgcaaggacccccgcctgcaggagaacctatttttaggtgttaattttctttcttcaggaagagcaagcaagtttcccttctattaaaaaatgtctttgtgctgcaagagatgtttctctgccatctccccacattttctagtatgtaagagaaaagcagtctcaatattgcagccttgcctatcttagtgttgctccccagtaagctctgaaatgagaggtttatcttcttcagctgcagcagtgtccccagcaccataaggtcatagcaggggactcagtgaaacagcagatcccaggaaggctgaacctcaactctgcttcatcccgtaagactgattgatgggttgggccaaattataacttttggcttcagtaaagctgtacaacatttggcaacctgaggccaggacttccttgttcctgttgtttaagcccttagagctatactcatcagcaggctgtggcccttcataacctcttttatcttctgttgattagagaggaacgtaatgacatcctggctgtggctgactggggacagaaagtttccttctaccagctgagtggaaaacaggtatgtagccctgtacaaatccaattgcagtcatgcctgttatattttcattttctgagattctgttactattaattatacattatcattgttagttcctgcttattgagcatttgctgtggtaccagatactgtgctcactgctttgcatactttatcctattttattcttataaaacccaatgaagtgggtactactttccttatcaactttttagaaatgagtaaaccagaactcagagcagtgaaattatatgcccaagatctcacacagctagtaaatggtggagcctaggagttaaacccaggttggtttgactttaaaatctagctcttaattttgaccttactttcctctattcgctttctttcattcaaccagtatttatgagtacccactcaggaaagccctttcataaaggagctgctgacatagagctgggaaagtgatagcctctacctgcaagagctcacaggctggcggagacacacttgatagcaaagagcccctgtgtggtgtggtatgtgacacaatagaaagctgtacagatagacagctttttgggacacaaaagagggtaacatcactacttggtagagatgggaggtcttgttagaggttatctttgagcaggccatctttgagttaggctaaggacattgggaatggtgtttcaggcagaaaaaaaaatagcatgtatcaaggcaggaaggaatgaaaatatatgacagttcagagaatggtgagttgtacagggtgactgcatctcagagtttgtgacctgaaaacagagctgaagaggaacatgggggtatgattttttatttatttatttatttatttatttatttttaatttttttcgagatggagtctcactctgtggcccaggctggagtgcagtggctcagtcttggctcactgcaagctccgcctcctgggttcacgccattctcctacctcagcctcctgagtagctgggactacaggcgcccaccaccacgcctggctaatattttttgtatttttagtagagacggggtttcactgtgttagccaggatggtctcaatctcctgacctcgtgatccgcccgcctcagcctcccaaagtgctgggattacaggcatgagccaccacgcccggcctatgattttttgtttgtttgttttgagacagagtctcactctgtcgcctaggctggagtgtaatggctcaatctcggttcactgcgacctctgcctcacgggttcaagagattctcctgcctcagcctcctgggtagctgggattacaggcatgtgccaccatgtccggctaattttgtatttttagtagagacggggtttctccatgttggtcaggctggtctcaagctcctgacctcaggtgatccacctgcctcagtctcccaaagtgctgggattacaggcatgagctgccaccacgcctggctggagatgtgattataaaggacctgagtagtgtgaataagaagtttgaacatcatatactgtaagtattcaggagccataggtggcaggaagtggcatcacagattcttgcttcagaagaataacttgtttccatggagggtggattaaaatatagagagcatggtagtaggatgacttattagtaggcaggaaatgccaaggattagagtaaaggtgctgggtacagatttcacaccacagccaagcaagtgagaaatgcaacctgtgcagtgaagcctttaattgcgtagcatccttattcctcaaaacatgtcatgtaagagggaagagttttagatgtgtgtagcccagcttttgggccatttcttctacccctgccttaccattggtcatttcttttgtattcgagtaaagaaaagataaagggagcagataatgaagtattttctcagtttcccatggctgatttcctaaaactctcattttaattaactatcatctagtttccctggccctctctattcatctgcttaatgtgtgtacatcatcattcaacagatacttattggcacacctactgtgtacgaggcactggatgtgggtactgaagactcttgggaacaaataaccacactgcagtgggagggaatggggtcttgttgctatggccacagaagaaaagagctcaacatggccgagggccacaggaaatatcttgcatgtatgcagccccagagctcatgttgtggcccaaagtttctgcacgatgagcaaccttaacctgctgagatggtaaccccaacttgtttgggacagtaaaattgttttcttgctgggtgtcttcccttcccaatctaggaagatttagaattcaatataggatgatgaagtaaatcaaacccatacttttgtgttagtctgaggtataatttgtgtatttttgtcatttgaagtgttagtaatacttaaggggatctggcttaataataataatagctaacatttattgaattccaggcattatataaactctttacaaggattaactcttttaatccttataacaaccctatgaggtaaatactgttatcatcaccattttacatgtacgaaaattgaagcacagagaggctcaataatttgcccaaaggcacacatttagtctgtggtccaccctgctgaaacccaggcatactggtgccagaatccatattagaatgtctatcagattagtcttgcaatgaccattcaaaagttgtattgagtaatttcatatgtctgattttatttactttttgagaaaaggcctcaccctgttacccaggctggagtgcagtggtatgatcatggttcactgcagccttgatccccctgggctcaaggaatcttcccactttggccttccaagtagctgggactacaggcacatgccaccacatcctgctaattaaaaaaaaaaattttttttttttggtagagatagggtctcctatgttgtccaggctggtctcaaactcctgggctcaaatgattcttctgccttggcttcccaaactgctgggaatacaggtgtgagccaccatatctggcctacttctgattttaagtggaaagataagaattatatttaaagtgtatattatttaaggttcctaagcaatattggaatgcttaagcaatttgttacatttttcttcttggtgttcactgagctttttgaatctacacattgatatcgttctgtctttcaccaaatgtgaaaacattttggccatgatttcttgaaatatttcttcttctccattctttcctttcctctggaactctaattacacttacattagaccttttgttactgttctccaagtcatcgaggccctgttattatttttttaaatcccttcttttccctctgatcttcagattagaggatttctgttgttcagtattaaatttcattgactcttctgcaacttccaatatttttcttaagctcattcagtgtgtatttgtttcagttattattgcatttttccttttctagaatttccatttggttcttttttcctttttattcattacaagcgtatttttctttatagccttaatcatagttataataactgttttaaaattctcatctgcagctgggcatggtggctcatgcctgtaatcttagtacttctggaggccaaggagggacgattgcttgaggccaggagttcaagactagcctgggctacatagagagactccatccctaaaaacgaacaaacaaattggccagggaggtggcaggcacccattgtcctaacaactctgtaggctgaggtgggagtattctcaagctgaggagttcaaggctgcagtgaactcttaccactgcactccagtgtgggtgacagagcaagacctgtgcccaaaaagcaaacaaaaattcttatctgctatttctaacatttgggtcgtcatggttcagtctccattgatttttttcccttgaatatggttcacattttcctgctttggggaattttgaattgtactcaatattgtgagtaatatgtcataaagactcatatccatcatgttcctctgaagattattgtgtatgtttgtgtgtatatatgtttaagcaggcagtttactttgctgggctcaaaatcaaaactccatgttttcagtggtgtcagcagctgacatctctgtgcagttctttagctgtagctaggctgcttggcatcttgtcacagtttatagttcaagggtttccagatattcagtggagtttatgtgcagaatttaagctcttactttgcttctcttttctgggatttcccacttcactttccgggtgctgtggtcctcccaaattctatactcacccagcatgatggtgaagagggctgccctcaggcaaaaacccttaaaaaaatgagaagttcacctagtgtttgttcccttcttctaaatgtgcatgtgtcttcagtttctgcctgcttttggtcgccctgaaatggttgttgtttatagttggtccagagtttattgttgttactttgtgggaagattggtccgatgggaactagtgagccatttccagaagctgctagccttccatgtcgtgattcataagaatttttagttttcttgttaggttttctagcatcagataagtgctagggaaagttttcgttgctaggcatttgaaattcctatacaggaaaggaaatttgaatgtattaaacttataattgcagtttaaattggtgtaagggaattaatttaactaagttttaaatgggactggatatttaagggattttataatctgttcaaaattggatgccttaaacagtcaaagtcaattggctgttcactttaactagatttataaataggaaaatatttgtaaattgaacttaagaacttaaggagaaaccagttccctaaagttatttcttttataaattgaatattagtttaataatgttaatcacaaatcgtctttttattcacaaaagacacccttggggcagcaaaaaactccagtggtaataaggaacttgggctttagtggggcagacctgattaaccctgtgtctacagacaacgagagaagtgcaatgggataggcgagcacaagtgctgtgggaggatgaggggatggggattggagatgttcctggaggagatgacacctggcagacaaagtgagggaaagagcattcctggctgggtctaggaatggtgtggagtgtagcacctgtgaggatgtggaggcctgaaaaagcattgcccgcttaggaaacttacaagttcattttggctgagagaatgaccttgggggctgagctcgggagtttgacctgcatcctagaagctgaggaagcaccatcaagaaagagaaaagacaacccacagaatgagagaagttttacaactcatatatctgataaaggacttgtatctggaatatataaagagctataaagacagggctgggcatggtggttcacacgtgtaatcccagtgctttgggaggcagagacagggagatcacttgagaacaggagttcaggaccaacctgggtaacagtgggaccccacctctaaaaaaatatatttttaattagctgagtgtggtggtatatgcctctagtcccagctactgggggtggtgaggggctgaggcagaggaattgagcccagaagttcaaggttgcattgagttatgatcatacgactgcattccagcctaagccacagagtgtgacatttctctgtggccaataagcacatgaaatgatgctccatatcattagccatcaggaaaatgcaaattgaaaccacaatgagataattcgcactcactaaaatggagaaattggaatcctcatacactgctaatgcaaatataaagtggtgcattcacttgaaaagtgtagcagttcctaaaaaaggttcaacgtagagtttaaaaataaaaaaatataggccaggagctatgactcactcctgtaatcccagcactttgggaggccaaggtgggtggatcatctgagctcaggagtttgagactagccgggacaacaaggagaaacaccgtctctgcaaaaaatacaaaaattagccaggcgtgttctcacacatctgtagtcccagctacttgggaggctgaggtaggaggatcacgtgaagctgggaagtggaggttgcagtaagccaagatggcgccactgcactccagcctgggcaacagagtcagaccctttttcaaaaaaaaaattttttgccaggcatggtggcactcacctatggtcccagctacttaggaggctgaggcaggaagatcgcttgagtccaggagttgaaggctgcagtgagccgtaattgcaccactgcactccagcctgggtgacagagtgagaccccatcttgaaataaacaagaattaaaaaatgaagagaagtagtatgggtgtagttgcagaataaaggacagtctttaaactgaataaactcagctttataaaatacttttttaaaaaggcggagaaaagaagctgagggaacccattgaactataggaagaactatatttgcagagggaggggggcctttgggaacaaaaccacccacagtctccatcttggcggaggagccctgacacactcctgcactcctggagcacttgggtgggactaggggaggtgccactgactccaggagctgaggtttgggctgtgtagaggatgagtagggagatgcagaggcagagaggcctgtgttcaccatgggatgacacaggagaaaaggctggccagctctccctgtcttcccaactccctctaaagttggcgagaaaaagcccttaattgtattgcaatggttatggattcggaaatggtttttcccttgctgtgtgttctttttcctcagattggaaaggatcgggcactgaactttgacccctgctgcatcagctactttactaaaggcgagtacattttgctggggggttcagacaagcaagtatctcttttcaccaaggatggagtgcggcttgggactgttggggagcagaactcctgggtgtggacgtgtcaagcgaaaccggattccaactatgtggtaagaagagaaagtttgttctgtggggccatggcttgaagaggcactgagcagccgccgtgtctcgagtcacatcactggggtttgtgtctgacaaatgggggaatgcagactttctccagagagctgggaattgacagttctctcaccccgcaggtggtcggctgccaggacggcaccatttccttctaccagcttattttcagcacagtccatgggctttacaaggaccgctatgcctacagggatagcatgactgacgtcattgtgcagcacctgatcactgagcagaaaggtaagaggcaggtccagaccttgggaagagggacaggtggaagcaggtggaaagggctggtgacagggcacttgaaatgacaggaaaaggtttctctttggcgttttgcaaacctgttagccactgggtctgtgtcttgttttcttttttttttttttttggtgggggaagtagggatgccagtctccttgaggatctcatgaaagcaataaatcctctctgaaaaatgtaccaactcagaattttgcacataatttcaaggagtacatgaatttccttagtgagggaggatgatttatgacaggttggagccaggtggttgacctgcatgggtcttcgtggacctttatcctttctggtcagagtcactctggggtgcttctccctcagccctgtctccacttgcctcctggtgggtccttctgccagagatgagcagtggaattggattggcacaggctaggtcagaagatcagagttcccggcctcgcatagtcattctaagccctaagactgcagtctctccctctgtccacttaagttgctgtgctggttaaatagactcaatccacttacttcaggtgtattcatatctggatgtgctggccttagtgcactgctaggtgcctttgcaagggatccaggttgggggttgtcttgtagattcagatgagtgtcctttggtccccctgggggaccctatctttttgaagattctggctgtggtggttggggcaaagccccttgggcagcttcacagtgtcccccttagggacattttctccacctggtctgtagtgggagtgtagagcctggtgtgtaccagaaattacatgtcttccccgtttgtcaaggaggtgggcagggagcggccagaggtgaggtcagttacttaggcaggcttctgatcaccgggggccactagtgctgtgcagaggagtttatatttgtatccagcaagtgatggtaacagtgagtagtttatttccatactcagttgtcagccttggaccatgaagattgtgtcctataggactttggatcccagggttcagcagagttgattgtatgtattagatactctaaagatttttcaatgagagtatctcactttaattgccagtagcgctaagtaaatgatggcttttaatttctctgccttgcaccttacataacaacctcttgctagaactagatatttttttctttgacagttcggattaaatgcaaagagcttgtcaagaagattgccatctacagaaatcgattggctatccaactgccagagaaaatcctcatctatgagttgtattcagaggacttatcagacatgcattaccgggtaaaggagaagattatcaagaagtttgagtgcaacctcctggtggtgtgtgccaatcacatcatcctgtgccaggtgggcagcagcatgttgaaggagttgggctgaattccatttgtgctccccccccagtgatagggtgcccacctcatggttttaaaactggtcactagaaaacaagtctgttccatcaaactaagtggtgcttattggctttcattttcctggcatctggatgaaccagactctatcagcaagtcatgagccataaactggagaatgtttttttgttttattttattattttttaaaaaatatttttcttgagacagacagggtcttgctctgttgcccaggctggaatgcagtggcacaattatggctcactgcagctttgacctcccaagctcaagcggtcttcctcctgagtagctggcaccacaggcacatgccaccacacccaactaattttttatttttagtagagacgcgaggctgtactttgggaggctaaggcgggaggaatgcttgaacccaggagtttgagacctgtccagcttcctaaagtactgggattataggtgtgagccactgtgtctagccaagaataccttgttctattgcagaacatcttgtcatactgggattagatatactttaatgacttaaaacataaattggtgtacagaatgaagatagtttttattgataagcatatacacataaaatttgtatcaactcagtaattgtcaaggaagttttaattcctgaaagattttttttcatagaaaaatatttctcaagattcttagagagtgtctaagtcaatgccaagagaagtttggaaagactttgagagaaggctagcccagcatcttggaagtagaggtggatttagttttacatagttctgttggaggtgataaaagagaagaattccttaggaatcactgtagtgtaaaatactattaaaatctctcaaaagcctagaactgggctgggtgcagtggctcatgcctgtaaatcccagcactttgggaggccaaggcaggatgattgcttgaggctagtagttcgaaagcagtctagaaaacagagaccccatctccaccaaaaaaaaaaaaaaaaaaaaaaaattatttaattagctgggtgtggtggcgcttgcctgtagtcccagctacttgggaggctgaggcaggagaattgctttagccagaaattggaggcagcagtgagctatgatagcgccactacactccagcctgggtgacagagtgagactctgtctcaaaaacaaataataaataaataatcaaagttagaactccaagcggtttagggttgctacaaattacaggatagatgtggcaagtatgtgtacttttgagtgctgcctctggcctaggctgcctgggtgggggtttgcattgaagatctgaggctgaattgggctccgtggggaagccttgcatggagtcttggattaacgatgccaatcgtggggtctacattgggttagatagatggatactgaatgtgtaggtattttctccccttagggacagaaagatctccttggggaggtctgggggcacttattctgttgaatttccatgcagagctgggtttgcttcctaggagaaacggctgcagtgcctgtccttcagcggagtgaaggagcgggagtggcagatggagtctctcattcgttacatcaaggtgatcggtggccctcctggaagagaaggcctcttagtggggctgaagaatggacaggtgagtgctccctcacgtctcctgtcaggctgataatctgcatgcacacgtgggtgacccgtctagcaatgactctgagctgggttctcagggcaggaaaagggcttctctcctccatgggtgaattgtggggcagcctgagttcagttttttgaggacagcctcaggccaaaggtgctgtggccctcacactcctagcaggcccacgttttggcagagttgagctataacctttggctacatgtagagtgtattagtggcttaaggtctccagaaggtgggagatttgttagagatgttgcttctgtggatttctagagggaggcagagatcgttacctaggtcagctcctgattagggcagcgagtggattaaggcagtgcgttccagcatgtgtcctaaagaatgctgggtcctcaagatactgatagatgtcataagcaaaatgggccctttggccagttagatgtgggatatccaggttacacaaaattctgtgtgtgtgtatacatgtgtacacgtgtgttctttgctcagcataagaaaagttctaagtaggctgctacatggaactttgaaagtgacaatgtagctgcattagcctgacagccaagctgtgcagcagatggcttatggctgaggcttgtcaggtctttgctggggatggaagtcacagggcatgagagcagtgggtgaagtcaagcagcaatgccaaggggaggaagggccgcttatttctcaggcagctctcacttccaatgggagcatggactatggggtcaggtgggccggaggtcgtgttcttacttagctactcactggctttgtcatcctgggcaggtcactttacctctgtgaggctggttttacatgaggataataccacatatttcatagggctgtcaaaaacagatatcatcagggttgggagttaaagccaatgttaaaaacaaaacaaaacaaaaaaaacaccaggggtattaaaacaggcatggtggagggtacctgttttcccagctactcaggaggctgagataggaggatcactttgagcccaggagtttgaggctgcagtgtgatatgattatacctgtgaatagccactgcgatcagcctgggcaacatagcaagaccttatctctaaaaaaaattttttttaaaccagggatatcagtaaatgatagctatcatgatcactatcatcattattataattttctaccacatgtcttgtcagtgttcatagtagctttttcctgtgttagttcgtgactcagatctctgctaggtggcatctcctaaagctgcagtttgggtaatgtcatcaacaaatccccagtccgaacagacactgaagtgagctcggcctgtctcagggctgtcattacttctgcagcctctgatgaacctcgcttctggcctcctaaggataagccattgccccccacccccctctttcttttgatgagtccttttccctgcacagagcttctggtgaaggtggtgggagttgttcttgcagagcacatgggattccaacggcctggcagtgggccaggatcttgttgccatggtgactgacactgttttcgctgaaattttgccagatcctgaagatcttcgtggacaatctctttgctatcgtcctgctgaagcaggccacagctgtgcgctgcttggacatgagtgcctcccgtaagaagctggccgtggtagatgaaaatgacacttgcctggtgtatgacatcgacaccaaggagctgctttttcaggtgaagtccctgagggggcccagggacatcatcctttgattagagactctcctctagcttcccagtccctgcaggaggctctcctgctctggcccaggcaggtctctgggaggggcaggggccaagcacatgcacagagtcccagaggccctgggccacaacctgctcctcccacacaggcacaagccgcagggcctggaccggcctctttaactttggtttccttgccaatggaaaccgaaggctctgagccagcagagcctttcttaagcgtttaccatgaacaagaaatggggcaatgactctgagaggggtgtgacgttggcactcagtgaatggggcgatggatgcacttcctttgcagaagtctgtgtctcacctgctgcaggcctgcctgtgtctatgcgcacctacagcgtgggaaggaaacaggatgttttgtcatctgaaagggggaaggggatgggcaagcctggccttctacttaattcacaagaatgctagaagagccagcagaatgcgaagtgcttggatctttggggttgtaggcgttgttcagtggagtcatccagccctgtggcctgaggaagtgtgtcaccagagaagacagcccggcagctctgtgccccgggcctggttggctttctgctgggctcgcgccattctttctctctttaggtctttgtaggtggtcaggactggttttccagagtgaagttccccccaaagctggagcccctcctgactggtttcctcggccactgcagggtttcctgatgttatgggcagattcagtccccttaccaggctcctccttgttctcagcagcagaatcgatgggggaggggtctggagtggggagcagcctcagtcaattagaaggagttacctggccacctctagcccagaggtaactccatgtcagtctcaactcactcatgtccttgagagagtagaatggtttcggggaaagagagggcatagccttcaagctgacctgggcttgggtcctgcctgcatcccttactgtgtgatcttaagttagtgagcctctctgagccttaattacttttctctaaaatgaaattagtaattgccccttacagaattgctacaggaatacactagatactacagtgcctagctcagtgttgagcacaaaatggggcctgaaatgttacttcccttctccccagcctcacctcccacctatagggggcatagctggccccaaatgtgaatcttgtgtctgagcctagaatcatacaagtgtggaagggcgtctgtgctgccccatccccactgctggctctatggcaggctaggggaggtgattctcagccctgccaggagacatcagcattcccagctgtaacattgcctgctggcttttcctcttctccactgcccctccctctacacataaaacagctatattgattttttctcattataaaaaacaatccatgctgattataaaagatttagtcattataaaagatcctaggcagaaaggtatgagcatatttcaggagaataattttttttcaaaagtaatacttgcttactcaaaaattccaacaacacgcaggtgcatggaggggcttgcctctgttcatttctcttgcctctgttcatttctttgtggtcccctttcatccttttccctccatcccactgtaagcaatttagtgggattcagtctttaagagggtattgggctgaaatgtgtgagcgctgaccaagcccagggtggttctcacaggatccccactgtccctgttccccaggaaccaaacgccaacagtgtagcttggaacacccagtgtgaggacatgctctgcttctcgggaggaggctacctcaacatcaaagccagcaccttccctgtgcaccggcagaagctgcagggctttgtggtcggctacaatggctccaagatcttctgcctccatgtcttctccatttctgccgtggaggtgccgcaggtaactgggggtgcctgtccactcttagcactggcaaggctgacaagaccagggaagctgggccctttgctggtgctttggggagagagtagcaaggagagaagaatggcagctgtgaggtcgtgggaggcagtctgggcctggaacctgccgccctgtctccactccttgcaacctgtgtgactgggggcaaacagctcaacctccctgagtatcagtttcttccttgtcccctttctgtagggatgggaggggtatgcagtgttgtcagcagcgtgtgttttgcagagagcccagcgtggggccgaatggagtgagcagcaaagccgggagtccggcagggtgtgtgtgtgagtacgtgtgtgatggtggtgatgtgtgtgtgagagagaggggagagagagaatgagtgggtggggggtgtgggctgaggtctgtgagccaataagggagcatgggactctgcacaagctctctgaaccaggaggtggccagaacagaaatggggcactgaagggtggagccacagaatgggggagggcagaaccacagacaggcgcctgagattgacctcccgaatgcaggatggtctcccctccaccttctgcaccccaggcagatggtgctcactgtagaattgccataaaacagagacgtgcatagcgagaaactgtagccttcagcatcccatcctcaggacagaatcactcttaaacatgttgaaatacatctgcttagcgcttttctacgtgtatatataatatatgcataatatacaattaggagcatgtggttttataagaacatttttaaacaaaagtggaatcacactgcaaatacttttcatgacttttatgtgtatacgtattgctacctatagatggaacctcagatttactgtattccctgagcctggcctgtaaacaagacttctcatcccttcctttatggctatcttctcatttcacctcacattcggttatggcagccccatcactgtctatgaagtgctggctgtacactagtcatctggccttttcactcaacaatctcctaaagcatcgttctgtgtcagtaaatggtaaatgttcttattctgcatggcaaaatttagggtaattgtagactcacataaattgtaggaaataatacagagatcccttaaaccctttgcctagtttcccccaacggtaacagtgtgcatagctctagagtgatcttcccacccatgttggcatgtgtaatctcccaccacagtcatggcactgaacactgccaccaccacaaggtccctggtgttgtgctttttacagccagcacccctccctcctgcctggtccccacctgccttgtatttacagctgcattttattgtgtcttgtggatgttccacagctttctttaccagtcctactggacatgtttgctgcttatagcttttttgtattattgtaaatagcaggcatctttctagctaggtccttgcacctgtcccaacttggcgccttggcataaattcctagaaatgaaattgctgggtcaaagcacgtgtacctttgaaagacttttagggaaatttccaggtttcccttccgctaggctctgtcagtctgttttccccatacaactcagcttcaggctagagcccacttcttctaagttgatgataccctcgaaactcatgactgcaagacttactggggaaatgcccatcatccatgcctgacacagatcagctattcaagaaatgttagtggaattcagatctgaggaaaaagaccagaaagcaagaggaagaagggaatgaggtgggtggaagtggcagcaggacgaggggcacgaacagcttctcctggactgtgtcctcgtcatccttgtctgccccattacaaacccacgcaccacatccaccaggaactcatctccctcaattgccccaaactagctctgcttattttattaaaaggttttctcccaagattgccatcctgacctcaaaaataaatgcagtttgctgctctctgactgtggccggccaagaggagccagaggggcagcctggggcttcctctgccaggactttaagattcagcagcaaagtcttgctgactgcaccaaggccatcctgctgacgcagcgggtcaggactgccaagggttaggaaacacattctcaagacaaaggctgttcatctgtcgcctctgcctccggccatcctgtggttttggcccagagaggagggagaaagcatcagacccagtcttggaatttttggttgcctttcgaaatttacattgtcttgtgcaagaactggtttgtcagggctgccaagtaggacaacgagccctaggagggcttctcaaggcggtggtgacttcatgtttgaaatccaacagcaagataaagtatagctcagagagtatttgttcagtggggtctatttttaaaactccactcaaattgtgcctcccaagtaagtccaagtgttagccatccatcatatgctcagctgtgatatgcctgcctgagtgcctgtcccactcacggggcagtcagcatggcaagcagttggtgtggttcggggaaggagcaccagctttcagtcctgactctgccatctcaagcagctgtaactagagcaactcatttcactctttggggcctcatttcttttctgtgaaatggggttaattatacccatctttcaggtttcgtcaagccaaatttctattattatttctccttattactgactcataaaatagcaaaaaccacaaaacacaactaaattgcaacaggctgtacttactgacggactttagaaaggaaagctcattgtgtgctttaagaaaagctttcaggagtttgagaaagcttccaggagatggtgaaacttgatctgagccctgagaggtctggaaaggaagagtggagcagggaagcttttcaaacaaagggaaaggtgggggtaggaacaagactggagagcctgggagatggtgaggagctggtgctgagaaaatacagtgaaggtaatgatcatgcctgcattttgcccagtgcttcattatttttggagcacatctctcctttgcccatggtagcctgagctgggcaggacatctaaacagaagttaatggatttacccaaaaagtcaccagcctaggatgtggctgagcctggcctgggttctaggtcacctgctccgtagcctatgcctgctgccccgctaaagggagcatttaatgtgccaatgaggagagatggcatggtggaaaagataagcacttggaagcagccatgttttgctctgagagtagacagactcaaaataaaaaaaattccttcaattctaaagctaaaaaatgggactggaaatttcaaagacagacaaaagccccaaatggagaaaacaatacttcaagctccacatttgggaaccattagcacagaggtcctggctgatttctcttccctgcccaggaagccaggagagatgcaggccactgaagcacactggctggcctaaaacaagggcaaggcctttccttgttaaagatgtcatggcccaactcaagactcattctcaggcctgcacgcacatatgcacatatacacgcgtgcatacatgtggcaggaaggggcacagaacctggagtccagtcacctctggctattgccagctatttgctgggacaggtcatttgtcctctctgagtctcggtctcctgggctgtagccagggagaaataatacctactgcacaggactgtggggacagccaaaagccttttataaacctaagaaagagaagtcgttaggaactattcatgggcactcacagcaaggcaaccccatcttgtaggagggcatctgtccccagggcagggatcaggagagctgtttccagaggcttccagggtaacttggagcaaatcacttacctttcttggactcagtccctggaagaagaggccattccagaccgcttcctcccacgaactcattcattgtgtcagcaaacgtagactggggttctgctgagggaggccgatacaacccaccactgcccacggctgtgcacggctttgctgtgggaacaggcctgtaactgcggcacaacctgcgatctggacaaagggcagaggaagctgagactctttcccctggggtgggggcttgaggggcttgggaggactctgcagaagaggtgacatttcaacagggccttgaaagccaaataggtattttccagaggcagagtggggaggggcaaaggcattccaggtgagggtgacatcctatggcgaggcaggcctgtaggtgggaaggaggggaggatgggcagagagtttgtgctgtggagcacagtagcccagtcatgagagaggtgcaggatggagcacacagggtgggctgggcaggctgggcagggtgctgattggcggctgcagggctgctccccaggcatgggtaatcatcccacgcatctggaggcaggctctgtatgcatctggttctttccatggctctgaaaacagtcttctttttttcccttgatgaaatcctgcagtccgctcccatgtaccagtacctggataggaaactgttcaaggaagcctaccagattgcttgcttgggtgtcacagacactgattggcgtgaactggccatggaagcgctagaaggtttagattttgaaacagcaaagaaggtaagcatctagccagcaggagctggagtttggtccttgtggggtcccttaagaaggcagatggggacccaggtggcacggagaggccatagactgcagcagtctctggagttaggctgacctgggcttgtatcttagccacttcctcactgtgggcctgggtaggtgacaccctttctaagattgcttctctatagacgtaggatgatgacaggccccatcctcacaaagctgtgaggatcaaatgggaggatgcctgtaaagcctgacccaggagcagcatgtcagattctggctgtcactcttattagctgttctctgtgggaagcacctgactagtagcctggcacatcacaggcactccgtaaatggcggcttttattatcggtgtagtcactggccatgatgctgcacacaatgctgcttttcttagcatctgccaactaaggtgggagagatggtcaaggtctctgattctgacagcaatgtgggcacttcccacgtaccttcatggcgggattcatggacttgattcgttgtgtcctttcctggcctagtctatgaaagctagagagatggctgaaaacatctgacccctctctgcacataaggaaaagcccaggtatgttcctgagctgtgtttccatctagaacctcagatggaggaaggaatggcttccaacctccactcccctaccccttccctctttatctccccacagtcaattaatgagctgctcattttgtccatattcccgggctgacattgaaggagtggcaaagagggacgtgatgcccgccttgggttagatcaagacttgtaggcatgaagagaggagactggaccagaccaggactaagaagcctggctgagaacgagctgtgtcacataaggggctctgggacctcaggccagccactttccttggagccccagtcctcccagttctgaaatgggggtggtgagaatgcccgctgcagtcatgaggcttaactgagatgttgtaaaggggaatttaaatcagggatggttgtgcagatgctagccattactaaacaagggaagtgatcgttgtgtaacaatgatctagattatatttttagatgtcctcagtgtaggaaagtggagatggaggaggctgtaagaattcagaggaggggccaggcgcggtggctcacgcctgtaaatcctagcactttgggaggccgaggtgtgcggatcacaaggtcaggagatcgagaccatcctggctaacacggtgaaaccccgtctctactaaaaatacaaaaaattagccgggcatggtggcaggcgcctgtagtcccagctactccggaggctgaggcaggagaatggcgtgaacctgggaggcggagcgtgcagtgagccgagatggtgccactgcactccagcctgggccatagagcaagactctgacttaaaaaaaaaaaaaaaaaagaattcagaggagggaggaggcatctctatggagggagcttccctctcctgccccacccagaaatgccagcagggagggagacgacaaatccctagaatagaaaggattgtaaaaagccacaaggtttaatatgagtgtttactgatatttttataaatatatatatttttatatatttgtttaaatattgagacggggactcactgtgttgcccaggcaggtcttgaactcctgggctcaagcagtcttcttgcctcagcctcccaaagtgctgggattacaggtataaaccaccacacccagccagatttactatagttgaaaagtaagtgtatgtggtatatatctattgtgtacaacatgctgttttgaaaaagccacatgatattgaagataggctggatgttactatttcatctaaatcccgagtaccccacctctttactctgtgccaggcactcaggctcaccagcttggatatagtggttcctagagatggacagccatccccactagatggcagagaagagctgctgagctcccgccagaccctgagcagagctgcaggttcctccctattcccaggcttccctctgctgagctcattcaggggccttgtgactctgaccaggcaccctgacgctgcaaaatgtgtcaggttgaaggaactcggaaacagatttattaatgggcaaatcctagacactagcacagctgagctacagctagaaagacccttgagagggtgtcagtagcaggcccctttccacaaagaagatggttggagcccagaagcagagaagtaggctcagagcgaggactcagacctcgaatgctcctttccctcttggccactgtgctgggctttgcagggttgccctctcaaggcgctttaaggaaacccagatctagagggtgatgtgtaagacctacagcttgggacacaggtagtcttagccctgtgttccttggcccatgtgatgcccgcattgcccttttctacgaattcctcttcacaaacacttgtttgccaggttctgactctgatgcctcccttaacgctgcctcccacccctgctcatgctcagaccattcatccgtgttctccaggcatgtggttcgtagttggagagctcttagctctgggaggtgtcatgatctgtttaattgaccagctttccctgttagaatgtggacctctgaattgtggagggggacaggggccgagacatgtttctccctgggtcctcagtctcttgacaggaagcctggtcctgtgggatgaaaagataaagttgcattgtggtcacctgcaaggcaggccggggacttgctcatctcccgaggtcttttcaggagggaggatgccatgctgctgagcagaggctgcaagtggtcaggattgctctgcgtgttcagttcaaagggctctggagctgctgcctcctctaggcacaggtcagcccattttgaatggggcaataaatggtgacagcaaagccacctgaaagcagcctgacctggtggcttgtgctcctccaaaccctgggcagaatctgaaagcagcaaaactagcttagctaacaccagtctgcttgttcctcagaaacttctagaggtccatgagttaaagtctctggctttactgtgagttcaaggcaagggctgcaattttagggtttacataaagagtttgccttccacagacttggtgggattcattccctacccctccaccttcttccagaatctgtctttataccctctcagctttcccctcctctgctccctctgtggtaccaggggctctgggtcccctgtgtctgtggcaccactgggtaggcatagctgtcccctgcattctacccatgttgccaagatgtataggcagtctctcatcagtccatgcatctcatcctctcctgctgtgatgctgcgtgaccccccagagggtcagaccggcttgttcttctttgggtctagagtctcccaaggaggcaccgccacagactgtggcatcacggttttgttttacctgatctcaaaatgactgatgcaactgggatgtctttgctgttctttacatggtccaatcccatggataaagccatgcctcgctgggtggtataacctcctgcacgcacgatgattaatctgtgcttgctcccttcctctcctctgtggctcactgtctagatagagcttgacttcccacccctagccaatcacccacttttgaagccaagaagacagcttattttattctttatttcttcgccacaggccttcatcagagtacaagacctccgatatttagagctcatcagcagcattgaggtaaaagatgaagcatttttccttctcaagaaggcatacttggggttcctgttttaggggcagcccttctaacaggcaagagccttgaggacatgggaacagagctcactggcgtctgggcatctgggccacagccttgctccgggggcagagtggccacactgggggagacaacagcaggtagtgtgagctgttgtgtgatagctgggtgaggcacatgggttccggatctctccagggttgggtttctagtctgtgaaaagggattggacctacctcacaggctgctgtgaggattcagtaggttctcaggaactggtttgcatcctcctggtggcggatagctggtcaccatcctctcagactccagtaatctgatagtgttggaggagtttcccaaatgcacatgagctgagctccattccccagaaatggacctggggagcaaggcccacagtctgaactgagcgccccagagttctggagcaacccctagccctactgtttctggctgagaatattgaccttgtcatccaaacccaataggcctgcagtgtgctaaggaagctggttgtaggtatgccatttgctgggtggtggtcaacactatgctttttttttcttttttttttttttttttctgaaacaaggtctcactctgttccccaggctcaagcgcagtggcacgatcacagcttactgcagcatagacctcccaggctcaaatgatcctcccacctagcctcccaagtagctgggaccacatgcatgtgccaccccgcctgattaattttttgtatattttttagagcagggttttcccatgttgcccaggctggtttcaaattcgtgggctcaagctattagcccaccttagcctcccaaagtgctagcattatagacttgagctaccatgcccggcccttagacactattcttaatttctgtgtatctcagtgctgtctggctgtctgttaaaaggcatatacattttttctcctgaacatatttattgtgaaggtatgggaatgtgagatacatttgaattcccagttggaaacagtgaggaaatagcaaatgtcttgtccctctcattcatttccccataataaacacctgtcatgggccagcccttgtgccgagctcagtgggcacagagctgaggaggagagaggctgacaggagctcacagcctgctaagcctcataacgtaatctgctctgtgccacatgcgtgatttatgtgaatgctgttctagatcctcacattaactgaatgaggcaggtactgttgctctccctattccatgcaggaggaaattaaggctcagcaagacgatgccacatccccatgggtccatagccaaaaacttggtggaattcaagcccagtctatttcctaagctcatgctctctcggccacataccctccctacccgcgtgttgtaaggggcatctgtatattctggggtttacctacccgcgtggtaaagggcttgttcggagctattgctcaaaatgcccagtgctgctgactttcacttgtaaatccactggcctggatctgggggtcttcacctgaagccaaggagcataattttcctctctacaaaagtaactgctgtggggtccaactattacttgtcacatcttactggggtcaaaatgtagtcctctcctcgtatgctatgagctgggaagtgcgttaaagtaaactcctaagattgtctcttgaaaaaaagtaaagtgcctttgagtgtgctctatatcgactgcctgcagacttatttgcacacatctgggtgctcagcataattccagagaactgcagatccttagtgggtgccttttggataggggagatgttcttgtcctgctgacggggggaaagaacctgcccatgttgacatgcacctgctgagtgccatagatcgtttttattggtcatggtgatatcctggggcctagaatggatatggcctgaatttcatgtctagtaaaaccttttttgtttgtttgtttgttttttttttgcagagatagagtctggctatattgaccaggctggcctacaactcctgggctcaagtgatcctcctcttttgacctcccaaagtgtagggatcacaggtgtaagccaccatgtccagccaaaatcaatcttttatctcacggcaagatttcaattcatttccaactattaggagttagtttgtttgatgagcctgagctgtgtgcaggtttttagaatgataatttctgtcagtatggaagcatgttgcctccagctgttaaaactttcaccagcttgtctaagagtttgattcaatgtcttatcgtcctccaatatgctgctctttctagaaaacaagcaaaaggaaactgctagggctcagggtttgggtgctactgagtgtttacaaatactcgagctgtagacaagcgaatgttccctgacacagaaggaagaagctttatcctagctgtgctaagtgtgtgtgtgtgtgtgtgtgtgttgttggggacatcacttgcttcaaaagactacattgtgtgatacaaggaatatctggagtcagacagaactgcgtccaaattccagctctgtctgaccctgacctgttcctcttcttgagtctcagcgtccttcactctaacacttgggtagtgagacctaccctgagggtcactgagaggaataaaggggccatgtgtgtataaagtatatacccagaacctagtggatgttcagcatgcgggatttcttaccttctctttagaagtagggatatcgtaagacttgtcatcctattttattggtctccctcttgggcagaaaccctaaacattctcctgctctgtcatccccatgagccacaactctgccaaacggggcctgcggatttgggagatcttgggagcttaggggtcatggatgagtcagagcacacactattcaaactattccgtcatagccttggaatacacaggaaagcaaccctgaggaatttccattaaacaaacaaaggtttgcatctttttttgatctttgcttgtctggtaaaagcctgcttttgttgtcaagccttcccagcgggaacctaggggagagagacaacagccaggagccaagcccaggttccagtaggaaggcccaggggcctcacttgaaatagccacatctaacctttgtaaaggctgcttcctgcccatggctgcagaggccatttcctttgcttctaatttttccaggagaggaagaagcggggagagaccaacaatgacctgtttctggcagatgtgttttcctaccaggggaagttccatgaggccgccaaactgtacaagaggagtgggcacgagaacctcgcgcttgaaatgtacaccgacctctgcatgtttgagtatgccaaggtaacctaccctgtcccaggcccaagctccagcttggagcccactggtattctcacgtgcggtgtccaagttattttccccaagagtgctgcggacaaaaactagcaatggtctcagaaaggatgtggggaaactggtaaacaaaggacccatctacagccactggttgaaactcacctaaaactgacctttaaggctgacaccaagggggcagactatggcagttcagaccttcatcagtgacagggctggatggctgtgggtctacaccagcacaatcccttcattgagttgagggctcagggcttcagggctgtcccccacaaatcctctcaatccttgtcaggagccgccaagaatcggtgtcttcaggcaggagccggtcctgccgatcatgcaggacgacatggtgcctgccagccaagtttcccatagcacctgctgattgtcctggacttctcactgggcttctgggaagtcaggcagagcctccgccctcccatgttagcgcagcatgcctcacgcctgccggctgcagagtggctaccatgtggttgcagtgggtgatggcagagattcccttttgcattgggacggcccccatgaaccttactccccagcagagctgggccttttaaggcaggtgtaggagaggagcttcctggaccaggctcctgatggcttctgtgggaaggagttgcactaaggagcccagagcagtcaagacatttgcagttcagtctaagcaaggttcaaagaggcttcggtacactgggcaatgagggtcttccttccatcaaggggctttgttaacctgccttttctggaagtgtcaaaagtggctctcagtatgttatgaagtgactcatcagccataacctattggtgggctactaatggtagttctccagctcacaagttcaagatggaaaatcttccccacttttttctgcttttctattcctgaagatggctgtgctcttccaccacctgttcgaccctggggctgaaggtgtgtttggtggcctgtgatgttgcccaggacctattgttcatcaggacttggacgagctcctgggccccagcctgtcttttcaccttagtgatttcttcactccgtacctgagacccagggtgttcaggctccctctactttttcctcgtcacctttcctaccctccctcaggccccaccaaagacacctagaagatttcataacacattcatactgagatcaccagagtcagtgcatctctgcttccggggataacaaaattttaactcaggatgaacccttaagggatcaagaccctagaggtagaatttagggttgggaacccctgaggcctcctcaaggaggcagctgtgctgcagtagaaaatgcctgaccaggctgggcatggtggctcaaacctgtaatactagcactttgggaggctgaagtgggtggattgcttgagctcaggaggtcgagaccagcctgggcaatatggtgaaaccctctctctaccaaaaatgcaaaaaattagctggtgcctgtagtcccagctactgggaggctaaggtggaaagattgcttgagccccagaggtggaagttgcagtgagccaagatcacgccactgcattccagcctgggtgacagagcaagacccatgtcaaaaaaaaataataaaatgcctggccttggtgccccagagctggtgtgagtgcagtttctttctgtgggatgacctggggaaaggctcttcggtttgccaaacctcccttcccttctcagatggtaatagcgacagctcagtttagtcatgagatttgcacagaataatgtataggaaagcgcattagaaatgccaacctgtagaaagattaggaagatgagaggggccacacgtgaccacagagtggattttcatacctctctccctggctggccccactcctgcccctgctctgaggcccctccttacactgtggtggacttcgtgtgcccacagcctcccaccagaactgcagcccatttacacactccatttgctccgtctctctatgaaggtaaatactctgggacttgtttttggttttagtttttgatcactattccaaggaggttggttccttttcaatcccccctgcccccacctggtagtctgaatttgagaaatatgtacctacacattatgtggggggtgggggagatctagtcctgattaacgtggcatatttttgtttacttgaaaattgcttcccaagattcaatctggttttcagaaaattttaaaattacattcccacgtacaaataaattgtatgctttctggataagtgacatgtttatatggtgataaagggaattataatgctcttaactcttatgtagtatgttcttatcaaaatcaccaagcatgagaacactgtttagtctcattcatcactcagcacagcctctttctgtccacttcagggccaagtctttgccatggccccagataatgtgtaacttagcttcaggaaagcaaaaagcctttgaatttccagtttgctgagccttgaaggaagcttttagacccagcttcaatgaagtcacagctccctgagtgaccagctggcctaggcttatggctccctctcagcctctcacccttgccgtggtcacccctggtcccctgagcactcactgaagtccctttgaaggacatttctagtctcctaagatgcctgttttcctccagctgccaccctcatttcaccagccaggtaggcagggtttccagcttcgtgctggcatagagaatccgcgccatagcagctgccagaaggaaaggtgtgtctgtaaaggcccaaactaggcggggacagcggctgctttccaagccccttccctttgtcagctccagggagaaccaaaggccagccagggggcctgtcttctattgggtcccagcatcagggtatacaatgcgctttcctccccttcttaaaatgtatcatatattaggccgacctaatactctgaaagcacatttaccctgaaagcaaatgagggaaaaaagcgagctaattgttcaagtggatttttagcatacattgactgtacttttctgacacatgagtgttaatcatggggaaaggagtgctttttttgttctcagtgaggctgacacaaagtactctccacagggtacattattcctgagacaaaccacttcttaccagtaacatagacctgggctgtaagtgctcccagtttccctttttgaaaagctccacctttaaaagctgcctcaactctggcaaactcccacgtgtgtattttgggtaactactctgaaaagaggtggtgttctgaggctgtttctcacacattgtagggcctgcccagagaagctgggcataccgcttcagaggtatgctgaggccgaaggaacacaggccctaggcctgatctctgagcctccaggaccacagccatctcttccttctcaggtcctctcctgagcaccttccctgcctcagattcccccatggcctcctgctgtcccactgtcggatcaggttctcacccctgcagacctgacctcagcacaggatccctaaccattcagctgagaagcaactaaccagagagatgtttgcttgttatctgttccaggaaagtaactggggcaaagacaatgtgatgattctctagttcagggcacagaatgtttgctggtgactcagagagggcatggagggcacggagggccggcaaacactgtaagtcattttgtttgtgtaagtttaggggaacccatgctcagcctcactctgaagcatgtggtatcacccatatgatctgaataagatgacaggtctcgatatgtggaattgtgcaccaggttgtctcattgctgtttaggaacagtcctgtattgaccaaactatgtgagagagagacagcctgatcatgaacccccgaccctgcagacttcatgtgcagtgccccaaatagtctagaaagtgttgtttagccgatgaacaaatgcccatttgtgagacgggaaggaagcactgggggccagcgtccctgatgctgtcccaggatcccccaggaacacctgcagggcagcctgagatcactcttcccgagacctgggactcccccaactcagcccctcagggccgggccctgcctacctcctggttgcctgcttcagccatgtggagcccgcccttgctgctagaaaagcctgatgtaacgctggcacaggaagttctgatccagagtgtttttgtttgttgtgcttcctcaggatttccttggatctggagaccccaaagaaacaaagatgctaatcaccaaacaggctgactgggccagaaatatcaaggagcccaaagccgccgtggagatgtacatctcagcaggagagcacgtcaaggccatcgagatctgtggtgaccatggctgggttgacatgtaggttttggtccctgccccgagaagcatttggcagcatgtcatcacatgtcacctcttgactgacaagggaaccaatagtgcttttctaattatctaaagctaatgtgatagtggctaggttcttcaggagacacagagattgcacaaggcagtggctgccttccaggagcttgtggagtcactaggggaagggatggtggggaccagggaagaggagacaccgggacatcacagctgccatttgctgagcgctcactacaacccagacgctgtgataaccttccaggcattaggttttccacctatgccatcagggctggtgtctcctcgcccaccttgcagatgatgaaacagaagctaaagggacaagttattcccaaagtccagatagctggaaagttgtagagctgagctttagcctctgatctgctggatgtcgatgccaactacgcgtgtaatggtaggaacaaaaacaaaacaagttccaaatccatcagggaagaattcttatgggaggaaccatggatatcttctcttaggagacactctttccatgaagggaccttaaagaattccaagaggtaaatagagatggcgggaaaggatatgcaggcaggaagtacagcagaaacacagcgagttggctctggttggaataaaagacgtgtgggaatgggagggtgaaggacatgggctgtgggttgggggaagtgggctggccacactggaagggcctccgatgccaaacggaggtgcttagatttgccaatagtgagtgaccacctacagtcagacaccccctcaggcaggcaggtagaatggagaccagataactggctagtgcagtagagcaggagggaacttggtagctgagggcatgagagagaagtagcagtgttagaaccaagtggcccatcccagggtgttggggcagtggtgagtgtcaggctggctttgctctgtggctgctggtgggttacaccattcgtcaaggtggacaacagggagaggagggggttggggtggggcagcactgagacaggatggattcagccttgggactcagcacaccggaccttgagggggaaggctttgtcctcccagtcagtgagcttcaggctcaagcatgtgcacacacacgtgcacatgctgctgcggtaggcaaaggacacgatgggacaagctcctgagggtggctcaggctgggtcctaaaggctgttgattcttctggaaacaacgttgtggtctacaggtagcagtggcccagccaggatttggggatatggaagaggctggttaatgattaaattgtttccttgggtgctgccatatattaataattggtgtgtgggcccctcacaaagggaccttgatggatgtcctaccaccccatctttttcttgtccgatagtaatttttttaaagacagaggcacagattttgttccccacattattctttaaatgaaggggttcatatagaagagagccaggcagatttagggtgctctgttctctcttctggtttttcttgtcactttcatttgtaagtgctatagtatcaggttaccctgagggtacttgagtaattcaagaaacacattaagcatgttctgcttgctttccagatgtggctataaaaggtgtctttcctccagggacgttgggtgtgatgggtgggaaggtttctaaggctgtaagggctgtctatgccacctttccctaaaaacgtgtcctttttctgctgagcagtgttatttttagatgccattattattctaagtgtagactgacaggcctccgtgccttgcctgtctccagacagggattcgttacagctgcttctccttcctttctcaccaagactagcctgggtagaaccctttctcctgggagagttagtttgactccaaattccagcctgaccagagagaacaagcgcattctatccaggcctcatgtccccatgagtgatgggagggctgctcaccatggggaagcagtggtgagccagtgggtccctgcagctcctccctctttggtcagcacgttggccaggaggacagggaagacttcctgcaggcctttgtccagagctcagagcaggccccacactcacctcttcctttagagggcagtcattgaggtattcttatgccttggcatccacttttccgtgagaattcctgcacccgtggtggaaagagtgctgggcccagtcttgggctgggtgcttcaccttccccacagactttattcttctcatctgagagatggaaataatcatgcccacctcttagggtggtgaagattctgatttcacgcatgggaaagctcatggcgtcatctgggtacctggtaggggattaggagataattgtttctataccctgctggatagctcagtgacttccgagaaagacacacaaggtggctgacaggatcctgtaaaggccacctctcccagatcctggtgatgtttctggagtgtgtattcatgcatttaataactacccactgagcaactcccatgggccatggcatagtatcaacactggggaccacagaatgaatggacatacggcttgccgttgacaagacccagagcccaccctcctacctgccccttccctctccaggttgatcgacatcgcccgcaaactggacaaggctgagcgcgagcccctgctgctgtgcgctacctacctcaagaagctggacagccctggctatgctgctgagacctacctgaagatgggtgacctcaagtccctggtgcagctgcacgtggagacccagcgctgggatgaggtgaggggaaagcaggcctcatgggctggggccccacctgagccctgggacacaggcgggtgggtacaggggccctttggggttcagatggagagaagctgccctcgtgatggaaggaacattgggctggcagtcaggtaacttaacctcgaattctctgagccacagaatcgtggagggcctttccacttgtcccttcattcagtcattgagaaaatcgttactgacagccagctctgccagggtggtgacaggcaccggggatgttagtgtgaacacgacagctccagtgcctgctgttgggctgagctgcctctgaccagcaccacaggctcagacacatggctgatgtggagatgcacctgcgtgacatttaaaacctgctgggtagcattttggcagaaagcaccatctgtgctttccagatccagactgtgagagccatttcaggggccagttttttccctcccttctctgcccccaccccacaaccactacttctctctggtgtcaggggctgtaaagaattagccaggtcagcgagaaaggtggccagcctcaggctggcagaagcagctgatgctgccccttctatggctcaacccccaccctccagctcactggctccctgttccctgcagagaaatccatccccgagaggattaggagctgtgccaagatcctcccccgactcacccacccacccatcatggtccattttagagtgaaagcaaagccttcactgagaggagccgtctgactgttgtctgctctctgaacagctccattggtgaggtgatgaggtcagtcatgagaaaaggtggggctagggacagaggcaatggtggcttctcaagagaaatttattagatttcccaagcagcatagattagagcatcttagaatgactcagacctcgctgtgcatcaggcagactttctcaccatggctcatgtccggttctcctggcctgacaggtggttctggggcttaggtgagaagcagtcagtgggtccatacagcacgaagcccacagtcatctttgacaactgataagaagtggtgatgatgataatgtcaattctgtttccttaggtgtcgcccgcaattaaaagaaatctgtttgcagcactacaggagcccacgcaaaccctcaaaataaaatgtttccgattctgtgccgcttctgtggtccagaaacagactgtgttgttactgaatccagtcgcttgcatattgctgttaattgccttttgttttcgaagagctgatttgtttttgcatttctgtgggtagttttttgggggaggcactctccccctctgagttgtcaggctggcaaaatatgatgtccctaatggattcagccaagtacagtgttttcatgggggctgcaggggcagctttattaagacttcatttgctccttcccccaggcctttgctttgggtgagaagcatcctgagtttaaggatgacatctacatgccgtatgctcagtggctagcagagaacgatcgctttgaggaagcccagaaaggtaggcaacacagactgtcaccttctagaaggagcaggagaagttactgccaagacatacatttcaggaaggctaccaagcccttcccatctgtagatcccaagatagatgacttcatcctggggatgtgattgtttggtggtgaaagactgtggagcatggaaagaccattggccttggagtcacaccctcctgggccacactcacttgccacaggcccttaagaggtgctgcctcctctccaagcctctgtggttactgagcaaagtgctgtgcactgcagtgtatcttcccgtttaatcctcgcaacagccctatggtatagctaccatcattatgattcccattttgcagatgagaaaactgaagggtaaagaggtgaagaaatttgcctgaagtttcatagctaggaagtggcagggaggtaatgtgagccagggtaccatgaggacaataagggaggattgccacacagtgtgaggcatggtctcacctctactgagaatagaaactcagcttctatttctggctcagataaacgggtgacttctgctcctcaagaattctgttggtaaaatgggctgcacacagcgtacaacagcatctgaaataggagttaaagcaagtatagaactttcgctgatgttattaatcatattttttaaagttgacttccctctctgtgtcaggccctggctgagcacttaacctatgtaaccttgaatcttgccaacagctgtgcaaggacgaagaggctaaatgtgccatgccaagtcacaaatctagtcagcagcagagccagaattggaccagtacctctctgactggggaacctgatttttctgttttgctgcctatttagccttctaatggaagttgggtgtttgatgttccatagcatctgatttacgcttctatatggtaaccgttgccctctctggacacattgcagaacaaatgtctccctgttggagcccctcaaccgaaagccctcattgaaggttagcgcattctctgctgcttcagcatttccagagcacccagttgctgaagtatctgcatgtttgggcaaaacacatcaacctatccatctgtctgtgtctgcccttccaagaatccatcaccatagtaacttggtactcagacaagaggttgtagatgagaacggaacaaaggccagaccttctccttctctgaaggcggaggattaggatcatttgagtgctctcatatggcaagtgtcatggctacaagtgcttcactggcagccaccaacatctcaaggggctggccacgtagtaggtactcagaaaatatctgttaaacagtataggaacgattgagagtttttttgcttgttttcacaaatggttgtgataactgaggcagatccttcaaagtggtcattgaaaagcagtcatttgaagacaaactgaggacttgagttgggcttggttctgggaccttgggtgtgacactttacctccattttgcaaagcccatttcattgctcataaaaagggggataattttccttcttcataagtctgtggtgaggatccagtgaggtgattagcaacaaaagcattttacctccaagtgcagtaaagtggcaggtcctgtttctatcaccttaggagtcacaaaactttgccctggaatgagcagggggcagaacctcactgaagatgagcaagtttcactcttagactttgccctggaatttggcccctccagtttttcctttctgcatgcttttcaaagtcagtcgccttttcccagccaaaaaggaatttatctcactgtactttttccaggatgtagccttggttatttagagaagcgccatcccagcaacgaagcactgcagatgctccaatgagtgtcctacttccaaagcagccctgtgcaagccccacagagctccatcctgcctcctgtgtgacttcctaaatagcatgtgcttttttcctccctccaccactcctacagcgttccacaaggctgggcgacagagagaagcggtccaggtgctggagcagctcacaaacaatgccgtggcggagagcaggtttaatgatgctgcctattattactggatgctgtccatgcagtgcctcgatatagctcaaggtgtgtaaacatcagccagaccactgttttcccaagccccactctgacaccaagataaacatcagaagagctgggacattttaattaaagccctgggcttgtttattgggtgtattgtccataagcctgccttgcagtggcgtaatctggtgtatcatctttttccagtttgcccatcagaatggtatgaggaccgtcctggggttatggttggcaggtccagccctgcattgctaattcagagcatatctctcccctgctacctgggagcccatagctggacctgggtgagcactgggttttaaatttttttaattaaatgagaagatgaacgagagatggctttacagtaacacactccagattcttactcatcccagccaggaaaacagtttcaatattgctttctttcacaagacttcccatgatgtactgaaggagtagtggaagtggaagagacaaggagatgttcttctccactggacaaggccacatgcaggggtgggaaaaacactggcatggaagctgcaggtgacttgtagcaagtcacaatccttcctgagctctgcatgcccatctgtcctgtgggagtcccttgtcctggtccctttggttgctgggagcctcacagagtcatgcttacagtttgaaaattgtcaagcctaggtgtaaggtcgcatttttctgtttgggccagtgccttatgcttctgataggagcagcagagggaagaggcataagatgagcatgaatacagttggtgtctgcctgcctttgtcccagcaggctcttccgacacatcttgggtcttgctgcagctgtcgctcccccaggggaataatctgggagggtgcagtgagagatctggaaaaaatatcctcaaactccctggccttatgccctgtccacctaagaattcaccatcctggagtggccctactcctaagcagagtggctttcccctcactacactttgtccctcaccctggcacagacactgtgtggtgggagaactgatgctgggaaaagtactgttgcctggcccctcctcctggggccagttggcagccacagacactgtttgacacgtttcccctcccacccgctgcacacagcagatcctgcccagaaggacacaatgcttggcaagttctaccacttccagcgtttggcagagctgtaccatggttaccatgccatccatcgccacacggtaaggtggctgggtcaccagcacctgagggtaccatctcctgagctaggggtcccgggcatatctaaagagcagcagactggatggaatgtaacccactggtcacagtgaactgctgaggaatcttggtctcctctgggaagaaaaagtttgagtttctttgattgactgtttgtctgccatgcatcaagcagtgggctcctgaattgtgatccagagctggaatgggccttgctagttcctcagtgcaggctttgatgactcagggaaactctgcattaaccagcaagaggggtgggagttccatgaggccctctccttcagtagggcgaaggcccagattaaccaaaggctcgagatccctccctggccctgtcagtgatttgtgtgttcttcagcaattcactttccctctctgtccctcagtttccttctctgtgaaactagagtgttggcttggtctccagaaacccaagtagttctttttagtcactccctgattcctttgagaaagccattttaaatctctctggtggcaatggggaacaggtgatgggttgtcaacagcctcttcatccactgtatctcctcaatcacccaacagatgttgagcacttagtacctagtaggcaatgtactgagggcttcattgtatcaagtcatttcctcctttcaaccacactttgagggaaggactgtcacccccatgttacagatgagaatgaagccctagacagagaggtctcagaggttattaggttggtgcaaaagtaattgcggtttcagactgaattttaaatcattataactaggctcaaacacatctttattaattaaaataggaaccattatgatcaacacatttttgccaatgagaaataagtctgtttatttctgtagcataaaaatccatactttgggatttgacgaactcttggaaagcattttctgcatcctgctggttgtggaagcattttccctgcaaaaagttgttgagatggttgaagaagtggtagttggttagcaagaggtcaggtgaatattgcgatgaggcaaaattttgaagtattggttgtgtgatgtgcagtcaggtgggtggagaagaattgggccctttctgtgaaccagtgccagctgcaggtgttgcagttttcggtgcatctcctcgatttgctgagcatacttctcaaatgtaatcatttcaccaggatcagacaactgtagtggatcagaccagcagcagaccaccaaacagtgatcatgacctttttttggtgcaagtttggctttgggaactgctttggagctttttctcagtccagccgtggagctggtcatcacggttgtcatgtaaagtccactttttgtcacacctcacatctgattgagaaatgttttgttgttgttgcatagaataagaaaagacaacacttcaaaacgactatattttcattttctatcagctcatgaggcacccacttatcaagctttttcaccttcccaatttgcttcaaatgccaaacaaccgtagaatggttgacattgagttcttcggcaacttctcctgtagttgtgagaggatcagcttcgatgattgctctcggttgttgtcaacttccagtggccggccactatgctcctcatcttcaagcctctcatctcctttgcaaaacttcttgaaccaccactgcactgtatgtttgttagcagttcctgggccaaatgcgttgtcgatgttacgagttgtctctgttgctttatgacccattttgaactcaaataagaaaactgcttgaatttgttttttgtctaacatcatttgcatagtctaaaataaacagtaagtaataactcattagcaaaaaaacataaagcgagaaatgcccgttgaaatgatgtataacataaccacatttaagaatgtattctactatcaaacagcaaattccagagccaatatgtgagtctcagtagtctggcactggagcctgtgttcctagcctttccctccctgtctccttttagagaaagcaggctagtatgttggtttagtgggtaaactcgagagtcctcacacacaaatgacactgtgttacttatcttctctggccttcagcttctttctctataaaatagggataacagcactatgtacttgatgggattgttttgaggattagacgagttaatattggaagagtacctagcacagagtgaccctaggtggcagctatccttactgctgctccaggcaaggcttcacgccagctttccctgacctgctccctccagctgggcatctagcatttctcttttttcagagatgaggtctctgtcgcccaaggtggagtgcagtgtcatgatcatagctcatggcagcctcaaactgctggactcaagtgatcctcctgcctgagcctcccagagcactgggattacaggcatgagccaccacgcccagccttcccgccgttctttgacctctcaaatgccctgccttccaccttgggcatttctttccctctaatctgtgctgacttctcagcacattttttgcctcttgggaaagtctggcaagaaggactcctgacaggctctgtgcatgccgtcagtctagtgttacatctcttcccacagcagggtcagtggtctcaagggacctcatcttcccttacagtctttggctttcctgaaacgagaccccctcagggtccctcatctttatcaggtgctcacctggagagaaaccaccacaaaaggagcccagactcaacttaggctggaagtcagggcccagctcagcctcactttgcccaagccactccagagcctggctctcagctccttccctcagacttttctctcgctgctccctgtcctcttcctcacctggggcatggggctgagggctcctgtctctaacagctgagctctgctccaggacctacatgggactaggagctaaggggcctcagaccagctggggccctggctcttatcccagctgaatcttattaattgggccattccttcattcaataaatgcctactacgtgacagaccctgtgatgagacctggtgacacggtggtgaacaaaacgttgtccctgcagtcagtcccagtctagcaaacaggacaatccctcaggggaaacgtttagaggcctgtgaagagacttcctggaggaggtgtcctctcagccagaaggagggagagaataaaaatggggcaagtgaagtggaggaggattaggaagggtgtttgtggcaaaggtcacagcctgtgcaaaggcctggaggtgagtggtagtttgtggttcagcatccagggcccagcagagcagcactgattcagggcaagactggaaagggaagttcaggtccttcctggatacatggcatctttcccagaggaaaggactcccctgctacctattctctctgggacgttacttagcttccctacctagtgcagtagaaccacaggcagagttcatcttgttcttaccctggaaaggatgtggtctcaggttttcttgggttcttggagctaacaaaaggtatagaaatttacgtgtgaactaaatagaaaatgctaagctctgaactgaagaagtgtagagcaaagtgagtcctcaggagttcagaccaattaggggttaagctttggtggctcagtgatgagtagggcctcacaagacccttcttaagtgctcacaagaaagaggagttactggcctgctgtaatcctcaccatctaaagctttattagaaatgggcaatctcagtttatatacagtgtgccagatgccttcaaaataaggtattcttaaccttttgtagaccctcacacagaaaattccttatttgtctgctgagcttctggcagcctctaggtacgaagaccaatcactaatctgtgctaactgcctcctgttagtgcctatgccaggagccagggaaatgggtcagcagttgaggaactccgcatgtgtgctcgtttggtggcacatcagtcaagctgctgttggaaagcacagaagaggcatgtgggttcatgctggagagggctaaatgcctctgttgaaagacaggcttatatgaatcagtggttatgtcctaagctgcatagaaggtcttctcttttagagctaattggagacaacttgagtagttcagagaaatggaataattaccaactccagaggcagtacagcttggaagaaagacattcttgggctttggaatcagacctgggtttgaacagcagctcagctctgttctagttggtgacttgggcaaatcatctatctaggtgtcggtttcctcatcagtactgtgaggataaaaatgcataccacaaggttattatgttaaagaccagatgagacagtggctatatggcgctcagcacacagtaggagtaggtgctcaataatcagagccgctcttgttgatgtcactcagaattattggtgtctgccttttggcctggcccagcagcagctcttgaagaactcaatccctgtttgcttttctctcactgcaggaagatccgttcagtgtccatcgtcctgaaactcttttcaacatctccaggttcctgctgcacagcctgcccaaggacaccccctcgggcatctctaaagtgtatcctttctcttatccctcctccgtcccaccaccgttcttgtctaatggccccaagaaattccttccagagcactttcctggcagaaccttcctctctcagcaaccctcagggaagacagagaactcaccctcccgctgctgtttggctatagaggctcagcagggaggcccaggggcccaggccaagagaagatgagttttcagggctctctgagctgaacccagcagtgggtctctggccaacacactgtcccaatccctcctagaacccacagatgagggtgtgactgaaatggaagaagcaccaggccttcaggcttggaaccttgggcacttctccagactggggaggagggagtgtttgttcagcccaggtatacatagcaccttctgtgccccaagccctgggccaggcaccaggtggcaaagctgccatcaaagagggaggtcacaagttagggtctggtttggtggatgtgtgctgtgtctgagggtggaatgaagctgaggtcagggccatggtcagggaagtttacctggaggaggagatgtccatcatgcaagctgaggcagccagggaagatggccaagtggatgttccaggggaggacccagcatatggagaggcaagcaaggcatgtgggagagggtgaggggaccctgggtgggaggggccggagaggcagcaggacccaaggcctgagagcctacctttgggttttcctctcttctgtagccatcgagggccacagtggtaccataagcagagcaggtgcctgaagggcctgtgcagccagatactggatcattaccaggcaatgatccagatttttaaggtcttggatgtcaggagacataattgtccctgttcttttctaaatctcactgtactctcagctccttcccagccgcagccccaccttccctctgtaaggaaaacccactccactggagaagacccagagctccttgttgtaagaattggcctcgctagaggattccaggcccattatgtacatttcaggggaaataccctcaaatcaaggggtgccttcctggagtcagacctctgctgcatgcgtctccgtctttccccgtaggagcagtcagggctatgcctgtgggggctgagcacctgtactcatcctttccagcaagttctgtttgagtcaacagcttgatagaacctctaccctgagccttaccctgtgccatcccctggggacctggaaatggctcctgacagtccctgactttgaggagtcatgctggagacacagaaggaaactctccacagaactgctgaagtggacggggctgcactgcagacggcgggagcaggaacactgggagagatgcgggaggaagggcaggagggcctgggggcagccaacatcggaggtgacctgagaggagagcacaaaggctcgtcagcctctggctgaggagcttcaagggggccccagagcacaggctgccgctcagaaactgcccaccaggccctcggggaagggtgtgcagacagagtggggtacacccaggggcctcagagcagggttgagggtggctccccagggagtctggaccaggccccacctggcagggtgagagcagagtgccctttgtgccaggcatcctaggagggcctggctggcaggtttggtgaggcaggaagagccattttggcctagtcagggtataagatgagccatcagcaggcccagagatgctaagcaaggttaaagtattaatggaaactacgctgtttttatctttggaaaaattcctgggccttgccatccgagaagtacactcacctctcacaagcgcacagagccttcctcacggtctttcctctgccttcccggcaccagcacaagctgtgttccagcctggggctcactccaaggacaggcagtgccagctcctgggcctggtgttgcccctgctgtccttaaccctgttcacggcaggaaaatactcttcaccttggccaagcagagcaaggccctcggtgcctacaggctggcccggcacgcctatgacaagctgcgtggcctgtacatccctgccagattccaaaagtccattgagctgggtaccctgaccatccgcgccaagcccttccacgacagtgaggtgaggatgcagcacccttgggcaggtggcttctcctctcccttgaggccatctcatgccttcttgcctggcctgggttccgtttgaagagagacagctgcagctccctctaggctctgtgccccctgctcaagcctggccatgccagctcccctgtgcttccctgtccacctcctgttctccccgcagtccacctggcgcccgctcacagcccccggccccggcctcagccctcagcctggcctcccttgctccttgccctcccctaggcaagccccacacctctgtgcccaggtggctctgcctttaccccaggcctggccccagagctgactcttactctagaaacctctgccctttctggaaccaggctgtagttctccagcaaatctaccccacactcccaacccacattccttcaacccagccagcttccttctttcacacatcctccctcaagctcagagcaaggacttggttcagacagacctgggttcacatcccggctccaccctctcctagctctgtctccatctttctgcaccttgggttccccctttcccacaggtagttgtgaggctaaatgagccagtatagtccacgtgctccgcacggtgcccggagcatggtaaatggctggctaatggtggcagcggccactgtcattcctgccaggggaaaagtgccgttgagcgctgcctgtgcaggtgtcttgggcacggggacccaagtgacagggcttgggtatttcggcaggcctttatcctgcttccccatggcatggagctcctgggcccggcgccccttccctgcctgcccacccgggtggcctttcctcttggcagccaggccccaggggcctgaagccagagtccagggggaggaggacacgtgcctgccccggcccctcgggagtccgtggctgttttgtaggagttggtgcccttgtgctaccgctgctccaccaacaacccgctgctcaacaacctgggcaacgtctgcatcaactgccgccagcccttcatcttctccgcctcttcctacggtgagtccctgcatcctgagcatgtgggtgggacagcctgtggacagccaggctcactccactgctctctggcctcaggacgttgggcaagggccaaaggcctctgaatgtccctgtttatgaaatgaggacactctgacgcccacctacctgacacaaggagtcactgtcggtgttcccagagataggacccactgctgcccaaagctgaagcacccactctgggaacctggcgcagggctttacataaccaaatgccccagaaagagagtccgatggctttgcattcagaccaggaggctgagataggttatcaaggcccagctcctttgatgttgacagaggatcagaagccccttcccaggagctgagcagaggccacacacacacacagacacacacgcacacacagactgcccctgcacacacacacatacagaaactgcccctgcacacacacacacagactgtccctgaacacacacacagactgctcctgcacacacacacacagactgcccctgcacacacagagactgcccctgcacacacacacagagaccgcccctgcacacacacacacagaaaccgcccctgcacacacacggagactgcctctgcacacacacacagactgcccctgcgtgcacacacagactgcccctacacacacacagattgctcctgcacacacacacacacacacacagagactgcccctgcacacacacagagactgcccctgcacacacacacagagactgcccctgcacacacacacagagactgctcctgcacacacatacagagactgcccctgcacacacacacagactgcccctgcccacacacacagagaccgcccctgcacacacacatggagactgcccctgcacacacacatggagactgcccctgcgtgcacacacagagactgcccctgcacacacacagattgctcctgcacacacacacacacagagagactgcccctgcacacacacagagactgcccctgcacacacacacacacacggagactgcccctacacacacacacagaaactgcccctgcacacacacagattgctcctgcacacacacacacacacacacacacacacacagagagactgcccctgcacacacacacacagactgcccctgcacacagacacacagagaccgctcctgcacacacacagagactgcccctgcacacacacacagagactgcccctgcacacacacacacacagaggctgcccctgcacacacacagaccgctcctgcacacagacacacagagaccgctcctgcacacacacggagactgcccctgcacacacacagagactgcccctacacacacacacacagactgcccctgcacacacacacacacagaaactgcccctgcacacacacagattgctcctgcacacacacacacacacacacagactgcccctgcacacacacacagagactgcccctgcacacagacacacagagaccgctcctgcacacacacatggagactgcccctgcacacacacggagactgcctctgcacacacacagagactgcccctacacacacacacagactgcccctgcacacacacacacacagaaactgcccctgcacacacacacattgctcctgcacacacacacacacacacacacacacacacacacagagactgctcctgcacacacatacagagactgcccctgctgcctcttcttgcttttggtgaagctgccagtgggttgagaagcaactctgtggtcaccccacctgcctggcggcaagtcctttgcaaggcctccagccccctcagccctttctctatgccctccagacgtgctacacctggttgagttctacctggaggaagggatcactgatgaagaagccatctccctcatcgacctggaggtgctgagacccaagcgggatgacagacagctagagattgcaaacaacagtatccatgcccttggccagagcctgtgtgtgcggctgtgtgaggggtctggggacaggcgggaagtaggagggcccagtcccaggggatcgcgggccatgctgagcctggccctgtgttcccagagagattggagaggcccacatgggacagggacagggatcagagatgggcagacagctggccagggcctaaggacccagaagtggcaagtggcaccttggtcttcccgtgtgggtctcccaccctcccctgacccctaaaaggcactggctgtgcctctgtctgtgcatagctcctgcatagccaacatgggacatgatgtcatgatgtcggtgttggcccccagctcttccactcaagtcactttcgcatgcaagtgacagagtccaaaactgacaagctgaacaagcaaagggtgtgcaaggaagccccaagcaggagaggaagcttcctggcccagcgctcagtctggtcggtcacaggctggctctgcctctcttggccgcactgtcctctgggcaacttcattctttggcagccccgtggtgcccccataacacagagatgtcaggagcagtgccagccccacatcccctcagccttatagcccccagaaacagccagctttcctctcagctgtggcagtgaaagccccggggcacagctcagcctgccccttggccaggaggatgcaccagggcagttgtccagggcaggccacacttgcaggctggacatgggaggggcttctggcagggaacagcacacacgtggcctgaggcctcgctcccttgcactgactgagtctgcaggcctgggggctgtaagcctgccttccttgcagctcccaggtgctgccacccccaggggccacactgggaggagggaagctcagagagctgcttgctgaaggaaagacggacccatctctgccacccaggctccctcaggtgccacagatgatatgtgctatggtgctggcaggtgggtgctgtgcccactccaacttggtaccagcagtccccatgtcctgggcctccctgcaggacccctgctggcctctgttaccagccccaccactgtgggagaggggcggtttccagggacctccaggtgagtctgacccgccctggggtcagcagggactctcgcccctgtctgctccatcacaagtgcccgcagacccccagcagccactgaatgtttctccaggatccctgggcccatcccctccgtgcctacccgcagtggctcacagggcccgcatgtgcttcccactggccctgggagctatggtgtgtgtggcctgcgaggggaatgggtgagggcagcagggccagcagagtcccttccttctgattccttggcctgagccccctctgttcctccacctggaaaactcttccactggtctggctgcccttgagtcttctcacaggggtgtagggtggaggctagggtctgtctccatctctgcttctgattccatccttgaccagatccctccaggctcccagattctgcggctagtggagaccaaggactccatcggagatgaggacccgttcacagctaagctgagctttgaggtgagggtgcctctctgggtgacctgcaggagggcagcctccatcccttctcctgtgcacatggggaccctcagctagcgcagtggtggaggaggattggccagaacttccagatgtggtggcacgaaggaggggcaggaccccttcctgtggggtgtgggagccatggctgcccccgagggaccatggccaagggcgcaggtctgtggacagggaggcagcttcagctctggtgggaggagcttgccactgttagggtcacctgggtttaggaagcaggtcctctctcaccactgccaaagattccaggatcataatccacacagatgtctcactgtggctgagtgaggacactgtgcctccttcccgcccaccctgcagcaaggtggctcagagttcgtgccagtggtggtgagccggctggtgctgcgctccatgagccgccgggatgtcctcatcaagcgatggcccccacccctgaggtggcaatacttccgctcactgctgcctgacgcctccattaccatgtgcccctcctgcttccaggtaggtggccaccctggtagctcacatgtgcttctcttggccacttttcccttgcccaaatgtccctctgggaggcgtggcccctgggaggaggggcacatccatggctccaagttgggacagaggcttgtctgtcctctcccctgcttgcattccatgtgcatctaaagtggacttcactggcccctgcgctgtccacatcctccccaaatcctgggggcccagcaagcgtgatgtgcccttgaccttcactcagaaaacaagaaaccccacagccccctcccatctccccttccagccctcaaacaaaggtgctgcaggtctgtgtccagccctgaccactgccaagccccctccccttgagaggcagtgcgtcctggccccaggcgtagggctgatgagcactagggcttcagcctggtcttacagctgtcttcccttagatgttccattctgaggactatgagttgctggtgcttcagcatggctgctgcccctactgccgcaggtgcaaggatgaccctggcccatgaccagcatcctggggacggcctgcaccctctgcccgccttggggtctgctgggctgtgaaggagaataaagagttaaactgtcagaatgtgtttcttgcccagatgaagtttgtgttttgtggggggggccttgtgtaaccacggaattcctatttatggcatttcatgccttgtaaatagcaccaggagatgaggaagagaatgtacatatattttctaaggaaaaaaatctgttactttcagaacggctccgagttgttcgtggcagcctgctggagtccgccgatctgtcagaccgttagcatgtacattttgccaacagattgcctcaataatgacaaaagggctccttattttcatcagcatctacattttagcaaatcatcttattgtctgcaacttaatttccgtatgcaaaagtgcacctgtttctaatttgaaaggaacattacatttgtgtgctcttaacatttaatcaaaatggcaatatagaaaggggtgggggagcagggggtttttttgtttatttattttgatttaatggggatccatcttgacaagagaaaatacgtgggtccaaagaagatggcaggagtttaaaaaaaggctcctgtttggtagcccagtcaaggctcctgtccaggctctggagccgccctcttccatccaccttccccagccccacagagcagccccagcccaatggagactcttccctttggaacagctccttaagcagggggtttccgtttgagattccagactgccaaggtctgttccctcaggcatcactggtgtccagtccaacagcttgagggcatggaaggaacagcacacagaagctaaggagaactcacatgtatgggggacgtttttggcaccagccacgttccatgctgtctcaggcctctcagcagccctgtgaaggaagagttatgatttccagtggggctgggaagggggttgccagggcccaggggctgcctccagccctgggaggggcggcccatgatgtgtccagccccaaggccctgcccctttcacccccagtccacctgccagaggtggcaatgcagcacttcatgaaaagcccaagaacagctggcacaggcaggagagagggtgtgggctgtcatgccatgccgaaacgcaccctcccctcgtgctgcagtattgattccttacaacctacctgtgcaggggtcagggcagggcaaatatgcccactggagggacgcagacactgagaccccaaggagagtggctgcagaggcccccagtgggaagtgtcggagctagagccccatcccagagcccttgccccaccccagaccgcccctcctccctgcctccctccgcatctctctggagatgatggaggaaaataaagaaagggagccagacagttgtgccaacagaactcctccgtcgagtgtctaattacttaccatcatgcatgcgctctctcactaaacatttattaatgtgttaggatttccattagcgcatgacttcaactgaaatcatttgcatatggctgggaaaaaggggagagggagaaaacagctccagctacccagcagtcaatcacagtgacagatcagatggtccctggctggaggcaggggagggttccagccgagactccagcatgcatcccctcagccgaagaacacaaaaatgagtgtgctgtgccgggctctgctgccccaggaagctcagctctagaggcctgagtaggacccctattcattcagatgcactttccgtgcatcatccaaggctgcctattacacaggtgatgacactgagcctcagtcatgttatttttcattcagcaaatatgcattaagccaaggcatatttggtcgcacctgggtgcaacctttgtgcataagccctgtgtctggctgcttttctctctcagcctgatctgggtctgaaccaagtccagtcttttctccaaggctgtttccccatctgcacaaaagggccccctccagctctgactctgaggttccagcctcagtctgcgtctgtgaacagcgctggatgatgatcctgttgacccctcaagtgcctgtgacaaggaaggcaccacagggacctggtgatgcccattgaactaagaggacactgaggccagagaggagcagctgctgaaggctgcacggtggggcagtgattctggcctttagcctgtagtcccaactactcaggaggctgaggtggaaggatcaattgagccaaggacaggaattcaaggctgcagtaagctatgattgcaccactgcactccagcctgggcaacagagcaacattcatctctaaacaacatttaaaaattgttttaagaagacaaatgagataactgttgatcgtaatggctgtgtaaaaactgaacatggctgggtgtggtcgctcacacctgtaatctcagcactttgggaggccaaggcaggaggatcgcttgagccgggagttagagaccagctcagacaatatagggagaccccatctgactgggactggtcctgatctctcatctccaagtgctcaacattgtgcccatgttcttggaaggaggaagtaagggagaggtagactgagcagcctcaggtggacctgactggagacgcacctcaggcagctggaggtccccgggccttggtttcccatctgtccccagcaaggctgtgaagctaggagcccctggtggctgtcacacaggtgggcagaggcccctcctccaaggtcgctctgtgtctcttccctggcttggagtctgtgtgcccacagcagaggccaccactgggcagggtgcttaccccgagcctccctgattctccccctgcagatccagaacactggcctggtatggagacctcgtcatggccctccctgcttgccacccgcagtagctgcccatgcaattcagccaacacccagacccctaggcctgccctctatccccagcacgccaccctggggggcccagcacctccaggcccagctggccctccctacctgccctgcttgggagactcttttgaccctcctggtccaccttttgctcctctgggctcccacagcactgggactgggagaaaatgctcatctctcatgtttagtttccgatcagtaccccctgagactgggagccccttgaaagcaggaaccatgtgggatccacctcagcgtccccagggcctggcgcatataaggagtttggcaaatgctagggtagaaaagagaaagaggaaggagggaatgagagctggtctttctccctcccttattcccccttgatgctctcagtaccgctgaaggcctcatgtagccttggtgacgcagcctggtggggctgagccatgtgggggaccaggagaaagaaagccaaggaagaggaggaggaggaggagaaggaggagaaggatgctgacctagcagctcctctcacagcagctcctctcttgcagaggctgaagagcgatttgtgccctgcaagctaagcccctaatccaccgaggcaaaggcaaagcccctagccgggctcccgagggctgggactcgggtgccccaagatggctgcatccagccatcttggcttagaaagccccccacatgccagcttggccaacacccacaccatgggtttctctggactgcccgacacaaggtgtgggtgctggccaggcctgtgttcaaatcccagctctgcagaggaactttgaccctgcataccccagattcctcagtggtcagtggggagttagaccctcttcatagggggcaggaggagttgttcattcattcaacaaatgtttattgaacacctcctatgggttgtgagctcagaggcagcgatgaacaggccaggctggtcctgcattctagaaatagatgggaagtcagtcaataagtagacaaatgaggccaggtgtggtggcatgcctgtagacccagttactcgggatgctgaggtaggaggatcacttgagcctaggacaggaattcaaggctgcagtaagctatgattgcgccactgcactccagcctgggcaacagagcaagactcatctctaaaaaacatttaaaaattgttttaagaagacaaatgagatagtcgctgatggtaatgactgtgtaaaaactgaacatggctgggtgtggttgctcacacctataatctcagcactttgggaggctgagattacagcctcccaagtggctcccaaggcaggaggatcacttgagcctgggagttagagaacagcttggacaatatagggagagcccaactctacaaaaatgaaaataaattagccaggcatggtggcacacaccaatggtcccagctactcaggggttgaggtggtggaccgcttgagcccaggaggttgaggctgcagtgagccatgatcatgccgctgcactccaacctgagtcacagagtgataccctgtctcaaaaaacaataggccaggtgtggtggctcacgcctgtaaccccagcactttgggaggccgaggcggatggatcacttgagatcaggagttagagaccagcctggctaacatggcaaaatcctgtctgtactaaaaatataaaaattagccaggcatggcagtacatgcctgtagtcctggttacttgggaggctaaggcaggagaatcgcttgaacccaggaagaggaggttgcagtgagccaagatcacaccactgcactccagcttgggtgacagagtgagaccctgtctcaaaacagctaaacctggtgggggtgcctggtgtgtaggatggtcaggggtggtctctccaaggacatgagtgtgagcggagacctgaaggagactcaggaagagattaatactgtcagcaacaaatatattgatcacttacaagcactcccaataatcctattaggtaggcactattatcattcccattttacagagtggagaaccgaagcacactctcgggagggcggggtagctggctgcacccaggctgtgtagcctcagtccagatgtaagggtgggtggaaaagagccttgcccaatgagggagaacagtgaaaccaaggccatagggtctaaagattcacgaaccaggctctcatggagaaagcaggtgaggtttactgtatagatgggtgtgcccctaccccacactgaggcttcctcgtctgagcaaactgaggcccagagaggggaaggaagcaggactaccatggtgactcaaagaccagctagaatccagcctcctctcctcgaggcttccactgccccacgccaggcctgtgtgactcagtctagggcctttccattaccccagctaaacctttctttagtcatttataccatggtgtgaatggctggctggtctttcctgagagctatctttgatgaggggagggaggcatagccaggtttgggaagctgataccccaggaagcccagttgactgtgtgggttatagcccaggctgtcactgatttgtaacgggacctgagcaactctgcagagctaggcctcagtcttttcatctgcaaaatggatatagcagagatggtcagagtaggtgacttcgaatgacccttccagctcactatgagtctgttttcctgaacaaagagcattttttgtttaaaaaaaaatttcttgggccggacacggtggttcactcctataatcctggcactttgggaggccgaggagggtggatcgcttgagccaggagttcaggaccagcctgggcaacatagcgagactccacccctacaaaaaatacaaaaactagtggtgtgcacttgtggtcccagctactcaggaggctgaggtgagaggatcgcttgagcccaggaggcagaggctacagtgagctatgattgtggcactgcactccagcctgggcgacagagaccttgtctcaaaactttttttttcttcgtcaagctttacagaataaagagcactgtcacctcagtgatggctgttagttccccatcaccagggctccatgaggttgcaattgtgaaactcacaaaggaggaacctgagacagagaggggaagtactgagatcatctaggtccattcccccactcactcgttcattcaacaaatattcaggagcaccttctaggtgccaggccctggagacacatcagtgaacaaaacagacatcatcccacctctttccactacaggccaagcaccatgctggtctctgggaaccctgttgtgagcaagacagacccaggcttacccttgtggactcatgttacaggcagggagacgggcacaaaacacaaataaaaagcttccatgctgtcagaagcactatgcaaaaagcaagatgctgaggtactgctaagctgtgtgggatgggggctcagcccggccagggaggggccagttgtgggtcagtcttgacccaaggcatccaggacaccctccttctggccatgagggtccacgtcagaatcaaaccctcaccttaacctcattagcgttgggcataatcaccaggccaagcgccttaaactacgagaggccccatcccacccgccctgccttagccctgccacgtgtgccaaacgctgttagacccaacaccacccaggccaggtagggggctggagcccaggtgggctgcagggaagggggcactcttctgagcagacagatctgggaatcctgggtgggaagagagacagtgagagagagattaagggatatttcccaggcatcagggctttgcactctcaggggtccttccgcctggatgtccttcccctgaagcttcctcctgttgttccgttctcagctcaagctccagcttctcagagaagcctcctgtgttgggagtggctgcgactgaactgtccctactgttattcgctcttctatttgtttgtggtccctgtgccccctcaccccacaaaaacactggcttcttgtgagcaggagcttgctctttcgtgtaccctgtgtgtccccaaggaccaagcaccttgtctgggccacagtaggtgctcaatacacatgttggctggacagtggtcactgagcggccgcacgtcgggcactctcagcacttgcacaggccgccccagacaccccacttcattcctgggaggtgtcatcatgttgcttggacgacggggagagggggacctgccagtgttggcctccattttcccccagtcatctgcccccaaggctctgactactttctttctcacggtacatcctgctattctggaatcggccctcgtggggccacctggtacatggcatttgaggccctcgtggctgattaggcctcccccaacagtgccctgtctgctgcctccagggccagcctccccttcagactggagtcccctgaagggttctgcccctcccctgctctggtagccccctccatcctccctccctccactccatctttgggggcatttgagtcacctttctacaccagtgatctgcccaagccactgctcactttcctctggataaagccaggttccccggcctagcgttcaagacccattacaactgcccccagcccagatcttccccacctagccacctggcaaactgctccttctctcaaaggcccaaacatggcctcccagactgcaacccccaggcagtcaggccctgtctccacaacctcacagccaccctggacggaatctgcttcttcccacatttgagtcctcctcagcccctgagctcctctgggcagggctgtttctttccatctttgtattcccaggggcctgcaaataaatgtttaatgaacgaacaagagagtgaattccaattccatgcaacaaggattgggctcctgggccctaggctatgtgtctggcaccagaaacggaagctgcaggttgcagcccctgccctcatggagctcctcctgtcagaggagtgtggggactggatgactccagaggtaacttgtgggggaacgaacaggtaaggggctgtgtgacgagatgagagactgggagaataaaccagaaagtctctagctgtccagaggacatagcacagaggcccatggtccctatttcaaacccaggccaccagactgagctgggaccttgggacagacaagtcatgcagaagttaggggaccttctcctcccttttcctggatcctgagtacctctcctccctgacctcaggcttcctcctagtgtcaccttggcccctcttagaagccaattaggccctcagtttctgcagcggggattaatatgattatgaacacccccaatctcccagatgctgattcagccaggagcttaggagggggaggtcactttataagggtctgggggggtcagaacccagagtcatccagctggagccctgagtggctgagctcaggccttcgcagcattcttgggtgggagcagccacgggtcagccacaagggccacagccatgaatggcacagaaggccctaacttctacgtgcccttctccaatgcgacgggtgtggtacgcagccccttcgagtacccacagtactacctggctgagccatggcagttctccatgctggccgcctacatgtttctgctgatcgtgctgggcttccccatcaacttcctcacgctctacgtcaccgtccagcacaagaagctgcgcacgcctctcaactacatcctgctcaacctagccgtggctgacctcttcatggtcctaggtggcttcaccagcaccctctacacctctctgcatggatacttcgtcttcgggcccacaggatgcaatttggagggcttctttgccaccctgggcggtatgagccgggtgtgggtggggtgtgcaggagcccgggagcatggaggggtctgggagagtcccgggcttggcggtggtggctgagaggccttctcccttctcctgtcctgtcaatgttatccaaagccctcatatattcagtcaacaaacaccattcatggtgatagccgggctgctgtttgtgcagggctggcactgaacactgccttgatcttatttggagcaatatgcgcttgtctaatttcacagcaagaaaactgagctgaggctcaaagaagtcaagcgccctgctggggcgtcacacagggacgggtgcagagttgagttggaagcccgcatctatctcgggccatgtttgcagcaccaagcctctgtttcccttggagcagctgtgctgagtcagacccaggctgggcactgagggagagctgggcaagccagacccctcctctctgggggcccaagctcagggtgggaagtggattttccattctccagtcattgggtcttccctgtgctgggcaatgggctcggtcccctctggcatcctctgcctcccctctcagcccctgtcctcaggtgcccctccagcctccctgccgcgttccaagtctcctggtgttgagaaccgcaagcagccgctctgaagcagttcctttttgctttagaataatgtcttgcatttaacaggaaaacagatggggtgctgcagggataacagatcccacttaacagagaggaaaactgaggcagggagaggggaagagactcatttagggatgtggccaggcagcaacaagagcctaggtctcctggctgtgatccaggaatatctctgctgagatgcaggaggagacgctagaagcagccattgcaaagctgggtgacggggagagcttaccgccagccacaagcgtctctctgccagccttgccctgtctcccccatgtccaggctgctgcctcggtcccattctcagggaatctctggccattgttgggtgtttgttgcattcaataatcacagatcactcagttctggccagaaggtgggtgtgccacttacgggtggttgttctctgcagggtcagtcccagtttacaaatattgtccctttcactgttaggaatgtcccagtttggttgattaactatatggccactctccctatggaacttcatggggtggtgagcaggacagatgtctgaattccatcatttccttcttcttcctctgggcaaaacattgcacattgcttcatggctcctaggagaggcccccacatgtccgggttatttcatttcccgagaagggagagggaggaaggactgccaattctgggtttccaccacctctgcattccttcccaacaaggaactctgccccacattaggatgcattcttctgctaaaca

SEQ ID NO: 344 - DNA, 3846 bp, Homo sapiens
attgcttttgctgcttttctggctttccctttcggacatgcgcgctcggagcaaggcgccctcgcactcagcttaccgcgcatgtacgttgccaggggtaacgcaggtagccaaagtggcttgtggagtggcgaccgttagtgaggcggttgctgagacagacgctgaggcgggtaggaggagcccgagccgtaagggaagccgtgatgagggccgtgttgacgtggagagataaagccgagcactgtataaatgacatcgcatttaagcctgatggaactcaactgattttggctgccggaagcagattactggtttatgacacctctgatggcaccttacttcagcccctcaagggacacaaagacactgtgtactgtgtggcatatgcgaaggatgggttgtggtctcctgaacagaagtctgtctccaaacacaaatcaagcagcaagatcatctgctgcagctggacaaatgatggtcagtacctggcgctggggatgttcaatgggatcatcagcatacggaacaaaaatggcgaggagaaagtaaagatcgagcggccggggggctccctctcgccaatatggtccatctgctggaacccttcaagagaggaacgtaatgacatcctggctgtggctgactggggacagaaagtttccttctaccagctgagtggaaaacagattggaaaggatcgggcactgaactttgacccctgctgcatcagctactttactaaaggcgagtacattttgctggggggttcagacaagcaagtatctcttttcaccaaggatggagtgcggcttgggactgttggggagcagaactcctgggtgtggacgtgtcaagcgaaaccggattccaactatgtggtggtcggctgccaggacggcaccatttccttctaccagcttattttcagcacagtccatgggctttacaaggaccgctatgcctacagggatagcatgactgacgtcattgtgcagcacctgatcactgagcagaaagttcggattaaatgcaaagagcttgtcaagaagattgccatctacagaaatcgattggctatccaactgccagagaaaatcctcatctatgagttgtattcagaggacttatcagacatgcattaccgggtaaaggagaagattatcaagaagtttgagtgcaacctcctggtggtgtgtgccaatcacatcatcctgtgccaggagaaacggctgcagtgcctgtccttcagcggagtgaaggagcgggagtggcagatggagtctctcattcgttacatcaaggtgatcggtggccctcctggaagagaaggcctcttagtggggctgaagaatggacagatcctgaagatcttcgtggacaatctctttgctatcgtcctgctgaagcaggccacagctgtgcgctgcttggacatgagtgcctcccgtaagaagctggccgtggtagatgaaaatgacacttgcctggtgtatgacatcgacaccaaggagctgctttttcaggaaccaaacgccaacagtgtagcttggaacacccagtgtgaggacatgctctgcttctcgggaggaggctacctcaacatcaaagccagcaccttccctgtgcaccggcagaagctgcagggctttgtggtcggctacaatggctccaagatcttctgcctccatgtcttctccatttctgccgtggaggtgccgcagtccgctcccatgtaccagtacctggataggaaactgttcaaggaagcctaccagattgcttgcttgggtgtcacagacactgattggcgtgaactggccatggaagcgctagaaggtttagattttgaaacagcaaagaaggccttcatcagagtacaagacctccgatatttagagctcatcagcagcattgaggagaggaagaagcggggagagaccaacaatgacctgtttctggcagatgtgttttcctaccaggggaagttccatgaggccgccaaactgtacaagaggagtgggcacgagaacctcgcgcttgaaatgtacaccgacctctgcatgtttgagtatgccaaggatttccttggatctggagaccccaaagaaacaaagatgctaatcaccaaacaggctgactgggccagaaatatcaaggagcccaaagccgccgtggagatgtacatctcagcaggagagcacgtcaaggccatcgagatctgtggtgaccatggctgggttgacatgttgatcgacatcgcccgcaaactggacaaggctgagcgcgagcccctgctgctgtgcgctacctacctcaagaagctggacagccctggctatgctgctgagacctacctgaagatgggtgacctcaagtccctggtgcagctgcacgtggagacccagcgctgggatgaggcctttgctttgggtgagaagcatcctgagtttaaggatgacatctacatgccgtatgctcagtggctagcagagaacgatcgctttgaggaagcccagaaagcgttccacaaggctgggcgacagagagaagcggtccaggtgctggagcagctcacaaacaatgccgtggcggagagcaggtttaatgatgctgcctattattactggatgctgtccatgcagtgcctcgatatagctcaagcagatcctgcccagaaggacacaatgcttggcaagttctaccacttccagcgtttggcagagctgtaccatggttaccatgccatccatcgccacacggaagatccgttcagtgtccatcgtcctgaaactcttttcaacatctccaggttcctgctgcacagcctgcccaaggacaccccctcgggcatctctaaagtgaaaatactcttcaccttggccaagcagagcaaggccctcggtgcctacaggctggcccggcacgcctatgacaagctgcgtggcctgtacatccctgccagattccaaaagtccattgagctgggtaccctgaccatccgcgccaagcccttccacgacagtgaggagttggtgcccttgtgctaccgctgctccaccaacaacccgctgctcaacaacctgggcaacgtctgcatcaactgccgccagcccttcatcttctccgcctcttcctacgacgtgctacacctggttgagttctacctggaggaagggatcactgatgaagaagccatctccctcatcgacctggaggtgctgagacccaagcgggatgacagacagctagagattgcaaacaacagctcccagattctgcggctagtggagaccaaggactccatcggagatgaggacccgttcacagctaagctgagctttgagcaaggtggctcagagttcgtgccagtggtggtgagccggctggtgctgcgctccatgagccgccgggatgtcctcatcaagcgatggcccccacccctgaggtggcaatacttccgctcactgctgcctgacgcctccattaccatgtgcccctcctgcttccagatgttccattctgaggactatgagttgctggtgcttcagcatggctgctgcccctactgccgcaggtgcaaggatgaccctggcccatgaccagcatcctggggacggcctgcaccctctgcccgccttggggtctgctgggctgtgaaggagaataaagagttaaactgtcagaatgtgtttcttgcccagatgaagtttgtgttttgtggggggggccttgtgtaaccacggaattcctatttatggcatttcatgccttgtaaatagcaccaggagatgaggaagagaatgtacatatattttctaaggaaaaaaatctgttactttcaga

SEQ ID NO: 345 - protein, 1125 aa, Homo sapiens
MRAVLTWRDKAEHCINDIAFKPDGTQLILAAGSRLLVYDTSDGTLLQPLKGHKDTVYCVAYAKDGLWSPEQKSVSKHKSSSKIICCSWTNDGQYLALGMFNGIISIRNKNGEEKVKIERPGGSLSPIWSICWNPSREERNDILAVADWGQKVSFYQLSGKQIGKDRALNFDPCCISYFTKGEYILLGGSDKQVSLFTKDGVRLGTVGEQNSWVWTCQAKPDSNYVVVGCQDGTISFYQLIFSTVHGKDRYAYRDSMTDVIVQHLITEQKVRIKCKELVKKIAIYRNRLAIQLPEKILIYEKEDLSDMHYRVKEKIIKKFECNLLVVCANHIILCQEKRLQCLSFSGVKEREWQMESLIRYIKVIGGPPGREGLLVGLKNGQILKIFVDNLFAIVLLKQATAVRCLDMSASRKKLAVVDENDTCLVYDIDTKELLFQEPNANSVAWNTQCEDMLCFSGGGYLNIKASTFPVHRQKLQGFVVGYNGSKIFCLHVFSISAVEVPQSAPMYQYLDRKLFKEAYQIACLGVTDTDWRELAMEALEGLDFETAKKAFIRVQDLRYLELISSIEERKKRGETNNDLFLADVFSYQGKFHEAAKLYKRSGHENLALEMYTDLCMFEYAKDFLGSGDPKETKMLITKQADWARNIKEPKAAVEMYISAGEHVKAIEICGDHGWVDMLIDIARKLDKAEREPLLLCATYLKKLDSPGYAAETYLKMGDLKSLVQLHVETQRWDEAFALGEKHPEFKDDIYMPYAQWLAENDRFEEAQKAFHKAGRQREAVQVLEQLTNNAVAESRFNDAAYYYWMLSMQCLDIAQADPAQKDTMLGKFYHFQRLAELYHGYHAIHRHTEDPFSVHRPETLFNISRFLLHSLPKDTPSGISKVKILFTLAKQSKALGAYRLARHAYDKLRGIPARFQKSIELGTLTIRAKPFHDSEELVPLCYRCSTNNPLLNNLGNVCINCRQPFIFSASSYDVLHLVEFYLEEGITDEEAISLIDLEVLRPKRDDRQLEIANNSSQILRLVETKDSIGDEDPFTAKLSFEQGGSEFVPVVVSRLVLRSMSRRDVLIKRWPPPLRWQYFRSLLPDASITMCPSCFQMFHSEDYELLVLQHGCCPYCRRCKDDPGP

SEQ ID NO: 346 - DNA, 3999 bp, Homo sapiens
attgcttttgctgcttttctggctttccctttcggacatgcgcgctcggagcaaggcgccctcgcactcagcttaccgcgcatgtacgttgccaggggtaacgcaggtagccaaagtggcttgtggagtggcgaccgttagtgaggcggttgctgagacagacgctgaggcgggtaggaggagcccgagccgtaagggaagccgtgatgagggccgtgttgacgtggagagataaagccgagcactgtataaatgacatcgcatttaagcctgatggaactcaactgattttggctgccggaagcagattactggtttatgacacctctgatggcaccttacttcagcccctcaagggacacaaagacactgtgtactgtgtggcatatgcgaaggatggcaagcgctttgcttctggatcagctgacaaaagcgttattatctggacatcaaaactggaaggcattctgaagtacacgcacaatgatgctatacaatgtgtctcctacaatcctattactcatcaactggcatcttgttcctccagtgactttgggttgtggtctcctgaacagaagtctgtctccaaacacaaatcaagcagcaagatcatctgctgcagctggacaaatgatggtcagtacctggcgctggggatgttcaatgggatcatcagcatacggaacaaaaatggcgaggagaaagtaaagatcgagcggccggggggctccctctcgccaatatggtccatctgctggaacccttcaagagaggaacgtaatgacatcctggctgtggctgactggggacagaaagtttccttctaccagctgagtggaaaacagattggaaaggatcgggcactgaactttgacccctgctgcatcagctactttactaaaggcgagtacattttgctggggggttcagacaagcaagtatctcttttcaccaaggatggagtgcggcttgggactgttggggagcagaactcctgggtgtggacgtgtcaagcgaaaccggattccaactatgtggtggtcggctgccaggacggcaccatttccttctaccagcttattttcagcacagtccatgggctttacaaggaccgctatgcctacagggatagcatgactgacgtcattgtgcagcacctgatcactgagcagaaagttcggattaaatgcaaagagcttgtcaagaagattgccatctacagaaatcgattggctatccaactgccagagaaaatcctcatctatgagttgtattcagaggacttatcagacatgcattaccgggtaaaggagaagattatcaagaagtttgagtgcaacctcctggtggtgtgtgccaatcacatcatcctgtgccaggagaaacggctgcagtgcctgtccttcagcggagtgaaggagcgggagtggcagatggagtctctcattcgttacatcaaggtgatcggtggccctcctggaagagaaggcctcttagtggggctgaagaatggacagatcctgaagatcttcgtggacaatctctttgctatcgtcctgctgaagcaggccacagctgtgcgctgcttggacatgagtgcctcccgtaagaagctggccgtggtagatgaaaatgacacttgcctggtgtatgacatcgacaccaaggagctgctttttcaggaaccaaacgccaacagtgtagcttggaacacccagtgtgaggacatgctctgcttctcgggaggaggctacctcaacatcaaagccagcaccttccctgtgcaccggcagaagctgcagggctttgtggtcggctacaatggctccaagatcttctgcctccatgtcttctccatttctgccgtggaggtgccgcagtccgctcccatgtaccagtacctggataggaaactgttcaaggaagcctaccagattgcttgcttgggtgtcacagacactgattggcgtgaactggccatggaagcgctagaaggtttagattttgaaacagcaaagaaggccttcatcagagtacaagacctccgatatttagagctcatcagcagcattgaggagaggaagaagcggggagagaccaacaatgacctgtttctggcagatgtgttttcctaccaggggaagttccatgaggccgccaaactgtacaagaggagtgggcacgagaacctcgcgcttgaaatgtacaccgacctctgcatgtttgagtatgccaaggatttccttggatctggagaccccaaagaaacaaagatgctaatcaccaaacaggctgactgggccagaaatatcaaggagcccaaagccgccgtggagatgtacatctcagcaggagagcacgtcaaggccatcgagatctgtggtgaccatggctgggttgacatgttgatcgacatcgcccgcaaactggacaaggctgagcgcgagcccctgctgctgtgcgctacctacctcaagaagctggacagccctggctatgctgctgagacctacctgaagatgggtgacctcaagtccctggtgcagctgcacgtggagacccagcgctgggatgaggcctttgctttgggtgagaagcatcctgagtttaaggatgacatctacatgccgtatgctcagtggctagcagagaacgatcgctttgaggaagcccagaaagcgttccacaaggctgggcgacagagagaagcggtccaggtgctggagcagctcacaaacaatgccgtggcggagagcaggtttaatgatgctgcctattattactggatgctgtccatgcagtgcctcgatatagctcaagatcctgcccagaaggacacaatgcttggcaagttctaccacttccagcgtttggcagagctgtaccatggttaccatgccatccatcgccacacggaagatccgttcagtgtccatcgtcctgaaactcttttcaacatctccaggttcctgctgcacagcctgcccaaggacaccccctcgggcatctctaaagtgaaaatactcttcaccttggccaagcagagcaaggccctcggtgcctacaggctggcccggcacgcctatgacaagctgcgtggcctgtacatccctgccagattccaaaagtccattgagctgggtaccctgaccatccgcgccaagcccttccacgacagtgaggagttggtgcccttgtgctaccgctgctccaccaacaacccgctgctcaacaacctgggcaacgtctgcatcaactgccgccagcccttcatcttctccgcctcttcctacgacgtgctacacctggttgagttctacctggaggaagggatcactgatgaagaagccatctccctcatcgacctggaggtgctgagacccaagcgggatgacagacagctagagattgcaaacaacagctcccagattctgcggctagtggagaccaaggactccatcggagatgaggacccgttcacagctaagctgagctttgagcaaggtggctcagagttcgtgccagtggtggtgagccggctggtgctgcgctccatgagccgccgggatgtcctcatcaagcgatggcccccacccctgaggtggcaatacttccgctcactgctgcctgacgcctccattaccatgtgcccctcctgcttccagatgttccattctgaggactatgagttgctggtgcttcagcatggctgctgcccctactgccgcaggtgcaaggatgaccctggcccatgaccagcatcctggggacggcctgcaccctctgcccgccttggggtctgctgggctgtgaaggagaataaagagttaaactgtcagaatgtgtttcttgcccagatgaagtttgtgttttgtggggggggccttgtgtaaccacggaattcctatttatggcatttcatgccttgtaaatagcaccaggagatgaggaagagaatgtacatatattttctaaggaaaaaaatctgttactttcaga

SEQ ID NO: 347 - protein, 1176 aa, Homo sapiens
MRAVLTWRDKAEHCINDIAFKPDGTQLILAAGSRLLVYDTSDGTLLQPLKGHKDTVYCVAYAKDGKRFASGSADKSVIIWTSKLEGILKYTHNDAIQCVSYNPITHQLASCSSSDFGLWSPEQKSVSKHKSSSKIICCSWTNDGQYLALGMFNGIISIRNKNGEEKVKIERPGGSLSPIWSICWNPSREERNDILAVADWGQKVSFYQLSGKQIGKDRALNFDPCCISYFTKGEYILLGGSDKQVSLFTKDGVRLGTVGEQNSWVWTCQAKPDSNYVVVGCQDGTISFYQLIFSTVHGKDRYAYRDSMTDVIVQHLITEQKVRIKCKELVKKIAIYRNRLAIQLPEKILIYEKEDLSDMHYRVKEKIIKKFECNLLVVCANHIILCQEKRLQCLSFSGVKEREWQMESLIRYIKVIGGPPGREGLLVGLKNGQILKIFVDNLFAIVLLKQATAVRCLDMSASRKKLAVVDENDTCLVYDIDTKELLFQEPNANSVAWNTQCEDMLCFSGGGYLNIKASTFPVHRQKLQGFVVGYNGSKIFCLHVFSISAVEVPQSAPMYQYLDRKLFKEAYQIACLGVTDTDWRELAMEALEGLDFETAKKAFIRVQDLRYLELISSIEERKKRGETNNDLFLADVFSYQGKFHEAAKLYKRSGHENLALEMYTDLCMFEYAKDFLGSGDPKETKMLITKQADWARNIKEPKAAVEMYISAGEHVKAIEICGDHGWVDMLIDIARKLDKAEREPLLLCATYLKKLDSPGYAAETYLKMGDLKSLVQLHVETQRWDEAFALGEKHPEFKDDIYMPYAQWLAENDRFEEAQKAFHKAGRQREAVQVLEQLTNNAVAESRFNDAAYYYWMLSMQCLDIAQDPAQKDTMLGKFYHFQRLAELYHGYHAIHRHTEDPFSVHRPETLFNISRFLLHSLPKDTPSGISKVKILFTLAKQSKALGAYRLARHAYDKLRGIPARFQKSIELGTLTIRAKPFHDSEELVPLCYRCSTNNPLLNNLGNVCINCRQPFIFSASSYDVLHLVEFYLEEGITDEEAISLIDLEVLRPKRDDRQLEIANNSSQILRLVETKDSIGDEDPFTAKLSFEQGGSEFVPVVVSRLVLRSMSRRDVLIKRWPPPLRWQYFRSLLPDASITMCPSCFQMFHSEDYELLVLQHGCCPYCRRCKDDPGP

SEQ ID NO: 348 - DNA, 3696 bp, Homo sapiens
attgcttttgctgcttttctggctttccctttcggacatgcgcgctcggagcaaggcgccctcgcactcagcttaccgcgcatgtacgttgccaggggtaacgcaggtagccaaagtggcttgtggagtggcgaccgttagtgaggcggttgctgagacagacgctgaggcgggtaggaggagcccgagccgtaagggaagccgtgatgagggccgtgttgacgtggagagataaagccgagcactgtataaatgacatcgcatttaagcctgatggaactcaactgattttggctgccggaagcagattactggtttatgacacctctgatggcaccttacttcagcccctcaagggacacaaagacactgtgtactgtgtggcatatgcgaaggatgggttgtggtctcctgaacagaagtctgtctccaaacacaaatcaagcagcaagatcatctgctgcagagaggaacgtaatgacatcctggctgtggctgactggggacagaaagtttccttctaccagctgagtggaaaacagattggaaaggatcgggcactgaactttgacccctgctgcatcagctactttactaaaggcgagtacattttgctggggggttcagacaagcaagtatctcttttcaccaaggatggagtgcggcttgggactgttggggagcagaactcctgggtgtggacgtgtcaagcgaaaccggattccaactatgtggtggtcggctgccaggacggcaccatttccttctaccagcttattttcagcacagtccatgggctttacaaggaccgctatgcctacagggatagcatgactgacgtcattgtgcagcacctgatcactgagcagaaagttcggattaaatgcaaagagcttgtcaagaagattgccatctacagaaatcgattggctatccaactgccagagaaaatcctcatctatgagttgtattcagaggacttatcagacatgcattaccgggtaaaggagaagattatcaagaagtttgagtgcaacctcctggtggtgtgtgccaatcacatcatcctgtgccaggagaaacggctgcagtgcctgtccttcagcggagtgaaggagcgggagtggcagatggagtctctcattcgttacatcaaggtgatcggtggccctcctggaagagaaggcctcttagtggggctgaagaatggacagatcctgaagatcttcgtggacaatctctttgctatcgtcctgctgaagcaggccacagctgtgcgctgcttggacatgagtgcctcccgtaagaagctggccgtggtagatgaaaatgacacttgcctggtgtatgacatcgacaccaaggagctgctttttcaggaaccaaacgccaacagtgtagcttggaacacccagtgtgaggacatgctctgcttctcgggaggaggctacctcaacatcaaagccagcaccttccctgtgcaccggcagaagctgcagggctttgtggtcggctacaatggctccaagatcttctgcctccatgtcttctccatttctgccgtggaggtgccgcagtccgctcccatgtaccagtacctggataggaaactgttcaaggaagcctaccagattgcttgcttgggtgtcacagacactgattggcgtgaactggccatggaagcgctagaaggtttagattttgaaacagcaaagaaggccttcatcagagtacaagacctccgatatttagagctcatcagcagcattgaggagaggaagaagcggggagagaccaacaatgacctgtttctggcagatgtgttttcctaccaggggaagttccatgaggccgccaaactgtacaagaggagtgggcacgagaacctcgcgcttgaaatgtacaccgacctctgcatgtttgagtatgccaaggatttccttggatctggagaccccaaagaaacaaagatgctaatcaccaaacaggctgactgggccagaaatatcaaggagcccaaagccgccgtggagatgtacatctcagcaggagagcacgtcaaggccatcgagatctgtggtgaccatggctgggttgacatgttgatcgacatcgcccgcaaactggacaaggctgagcgcgagcccctgctgctgtgcgctacctacctcaagaagctggacagccctggctatgctgctgagacctacctgaagatgggtgacctcaagtccctggtgcagctgcacgtggagacccagcgctgggatgaggcctttgctttgggtgagaagcatcctgagtttaaggatgacatctacatgccgtatgctcagtggctagcagagaacgatcgctttgaggaagcccagaaagcgttccacaaggctgggcgacagagagaagcggtccaggtgctggagcagctcacaaacaatgccgtggcggagagcaggtttaatgatgctgcctattattactggatgctgtccatgcagtgcctcgatatagctcaagatcctgcccagaaggacacaatgcttggcaagttctaccacttccagcgtttggcagagctgtaccatggttaccatgccatccatcgccacacggaagatccgttcagtgtccatcgtcctgaaactcttttcaacatctccaggttcctgctgcacagcctgcccaaggacaccccctcgggcatctctaaagtgaaaatactcttcaccttggccaagcagagcaaggccctcggtgcctacaggctggcccggcacgcctatgacaagctgcgtggcctgtacatccctgccagattccaaaagtccattgagctgggtaccctgaccatccgcgccaagcccttccacgacagtgaggagttggtgcccttgtgctaccgctgctccaccaacaacccgctgctcaacaacctgggcaacgtctgcatcaactgccgccagcccttcatcttctccgcctcttcctacgacgtgctacacctggttgagttctacctggaggaagggatcactgatgaagaagccatctccctcatcgacctggaggtgctgagacccaagcgggatgacagacagctagagattgcaaacaacagctcccagattctgcggctagtggagaccaaggactccatcggagatgaggacccgttcacagctaagctgagctttgagcaaggtggctcagagttcgtgccagtggtggtgagccggctggtgctgcgctccatgagccgccgggatgtcctcatcaagcgatggcccccacccctgaggtggcaatacttccgctcactgctgcctgacgcctccattaccatgtgcccctcctgcttccagatgttccattctgaggactatgagttgctggtgcttcagcatggctgctgcccctactgccgcaggtgcaaggatgaccctggcccatgaccagcatcctggggacggcctgcaccctctgcccgccttggggtctgctgggctgtgaaggagaataaagagttaaactgtcagaatgtgtttcttgcccagatgaagtttgtgttttgtggggggggccttgtgtaaccacggaattcctatttatggcatttcatgccttgtaaatagcaccaggagatgaggaagagaatgtacatatattttctaaggaaaaaaatctgttactttcaga

SEQ ID NO: 349 - protein, 1075 aa, Homo sapiens
MRAVLTWRDKAEHCINDIAFKPDGTQLILAAGSRLLVYDTSDGTLLQPLKGHKDTVYCVAYAKDGLWSPEQKSVSKHKSSSKIICCREERNDILAVADWGQKVSFYQLSGKQIGKDRALNFDPCCISYFTKGEYILLGGSDKQVSLFTKDGVRLGTVGEQNSWVWTCQAKPDSNYVVVGCQDGTISFYQLIFSTVHGKDRYAYRDSMTDVIVQHLITEQKVRIKCKELVKKIAIYRNRLAIQLPEKILIYEKEDLSDMHYRVKEKIIKKFECNLLVVCANHIILCQEKRLQCLSFSGVKEREWQMESLIRYIKVIGGPPGREGLLVGLKNGQILKIFVDNLFAIVLLKQATAVRCLDMSASRKKLAVVDENDTCLVYDIDTKELLFQEPNANSVAWNTQCEDMLCFSGGGYLNIKASTFPVHRQKLQGFVVGYNGSKIFCLHVFSISAVEVPQSAPMYQYLDRKLFKEAYQIACLGVTDTDWRELAMEALEGLDFETAKKAFIRVQDLRYLELISSIEERKKRGETNNDLFLADVFSYQGKFHEAAKLYKRSGHENLALEMYTDLCMFEYAKDFLGSGDPKETKMLITKQADWARNIKEPKAAVEMYISAGEHVKAIEICGDHGWVDMLIDIARKLDKAEREPLLLCATYLKKLDSPGYAAETYLKMGDLKSLVQLHVETQRWDEAFALGEKHPEFKDDIYMPYAQWLAENDRFEEAQKAFHKAGRQREAVQVLEQLTNNAVAESRFNDAAYYYWMLSMQCLDIAQDPAQKDTMLGKFYHFQRLAELYHGYHAIHRHTEDPFSVHRPETLFNISRFLLHSLPKDTPSGISKVKILFTLAKQSKALGAYRLARHAYDKLRGIPARFQKSIELGTLTIRAKPFHDSEELVPLCYRCSTNNPLLNNLGNVCINCRQPFIFSASSYDVLHLVEFYLEEGITDEEAISLIDLEVLRPKRDDRQLEIANNSSQILRLVETKDSIGDEDPFTAKLSFEQGGSEFVPVVVSRLVLRSMSRRDVLIKRWPPPLRWQYFRSLLPDASITMCPSCFQMFHSEDYELLVLQHGCCPYCRRCKDDPGP

SEQ ID NO: 350 - DNA, 4329 bp, Homo sapiens
attgcttttgctgcttttctggctttccctttcggacatgcgcgctcggagcaaggcgccctcgcactcagcttaccgcgcatgtacgttgccaggggtaacgcaggtagccaaagtggcttgtggagtggcgaccgttagtgaggcggttgctgagacagacgctgaggcgggtaggaggagcccgagccgtaagggaagccgtgatgagggccgtgttgacgtggagagataaagccgagcactgtataaatgacatcgcatttaagcctgatggaactcaactgattttggctgccggaagcagattactggtttatgacacctctgatggcaccttacttcagcccctcaagggacacaaagacactgtgtactgtgtggcatatgcgaaggatggcaagcgctttgcttctggatcagctgacaaaagcgttattatctggacatcaaaactggaaggcattctgaagtacacatcttggtctgtgatgtcttcattgcacctccatcttccatttctgggcctccacaaaacagtaagagtaacagccacagataaagcacctaaaggccaaggtgggaggattgattgcttgaggccaagcgttcaaaaccaacctggccaaaagcacaatgatgctatacaatgtgtctcctacaatcctattactcatcaactggcatcttgttcctccagtgactttgggttgtggtctcctgaacagaagtctgtctccaaacacaaatcaagcagcaagatcatctgctgcagctggacaaatgatggtcagtacctggcgctggggatgttcaatgggatcatcagcatacggaacaaaaatggcgaggagaaagtaaagatcgagcggccggggggctccctctcgccaatatggtccatctgctggaacccttcaagccgatgggagagtttctggatgaacagagagaatgaggatgccgaggatgtcattgtcaacagatatattcaggaaatcccttccactctgaagtcagcagtgtacagtagtcagggtagtgaggcagaggaggaagaaccagaggaagaggacgacagtcccagggacgacaacttagaggaacgtaatgacatcctggctgtggctgactggggacagaaagtttccttctaccagctgagtggaaaacagattggaaaggatcgggcactgaactttgacccctgctgcatcagctactttactaaaggcgagtacattttgctggggggttcagacaagcaagtatctcttttcaccaaggatggagtgcggcttgggactgttggggagcagaactcctgggtgtggacgtgtcaagcgaaaccggattccaactatgtggtggtcggctgccaggacggcaccatttccttctaccagcttattttcagcacagtccatgggctttacaaggaccgctatgcctacagggatagcatgactgacgtcattgtgcagcacctgatcactgagcagaaagttcggattaaatgcaaagagcttgtcaagaagattgccatctacagaaatcgattggctatccaactgccagagaaaatcctcatctatgagttgtattcagaggacttatcagacatgcattaccgggtaaaggagaagattatcaagaagtttgagtgcaacctcctggtggtgtgtgccaatcacatcatcctgtgccaggagaaacggctgcagtgcctgtccttcagcggagtgaaggagcgggagtggcagatggagtctctcattcgttacatcaaggtgatcggtggccctcctggaagagaaggcctcttagtggggctgaagaatggacagatcctgaagatcttcgtggacaatctctttgctatcgtcctgctgaagcaggccacagctgtgcgctgcttggacatgagtgcctcccgtaagaagctggccgtggtagatgaaaatgacacttgcctggtgtatgacatcgacaccaaggagctgctttttcaggaaccaaacgccaacagtgtagcttggaacacccagtgtgaggacatgctctgcttctcgggaggaggctacctcaacatcaaagccagcaccttccctgtgcaccggcagaagctgcagggctttgtggtcggctacaatggctccaagatcttctgcctccatgtcttctccatttctgccgtggaggtgccgcagtccgctcccatgtaccagtacctggataggaaactgttcaaggaagcctaccagattgcttgcttgggtgtcacagacactgattggcgtgaactggccatggaagcgctagaaggtttagattttgaaacagcaaagaaggccttcatcagagtacaagacctccgatatttagagctcatcagcagcattgaggagaggaagaagcggggagagaccaacaatgacctgtttctggcagatgtgttttcctaccaggggaagttccatgaggccgccaaactgtacaagaggagtgggcacgagaacctcgcgcttgaaatgtacaccgacctctgcatgtttgagtatgccaaggatttccttggatctggagaccccaaagaaacaaagatgctaatcaccaaacaggctgactgggccagaaatatcaaggagcccaaagccgccgtggagatgtacatctcagcaggagagcacgtcaaggccatcgagatctgtggtgaccatggctgggttgacatgttgatcgacatcgcccgcaaactggacaaggctgagcgcgagcccctgctgctgtgcgctacctacctcaagaagctggacagccctggctatgctgctgagacctacctgaagatgggtgacctcaagtccctggtgcagctgcacgtggagacccagcgctgggatgaggcctttgctttgggtgagaagcatcctgagtttaaggatgacatctacatgccgtatgctcagtggctagcagagaacgatcgctttgaggaagcccagaaagcgttccacaaggctgggcgacagagagaagcggtccaggtgctggagcagctcacaaacaatgccgtggcggagagcaggtttaatgatgctgcctattattactggatgctgtccatgcagtgcctcgatatagctcaagatcctgcccagaaggacacaatgcttggcaagttctaccacttccagcgtttggcagagctgtaccatggttaccatgccatccatcgccacacggaagatccgttcagtgtccatcgtcctgaaactcttttcaacatctccaggttcctgctgcacagcctgcccaaggacaccccctcgggcatctctaaagtgaaaatactcttcaccttggccaagcagagcaaggccctcggtgcctacaggctggcccggcacgcctatgacaagctgcgtggcctgtacatccctgccagattccaaaagtccattgagctgggtaccctgaccatccgcgccaagcccttccacgacagtgaggagttggtgcccttgtgctaccgctgctccaccaacaacccgctgctcaacaacctgggcaacgtctgcatcaactgccgccagcccttcatcttctccgcctcttcctacgacgtgctacacctggttgagttctacctggaggaagggatcactgatgaagaagccatctccctcatcgacctggaggtgctgagacccaagcgggatgacagacagctagagattgcaaacaacagctcccagattctgcggctagtggagaccaaggactccatcggagatgaggacccgttcacagctaagctgagctttgagcaaggtggctcagagttcgtgccagtggtggtgagccggctggtgctgcgctccatgagccgccgggatgtcctcatcaagcgatggcccccacccctgaggtggcaatacttccgctcactgctgcctgacgcctccattaccatgtgcccctcctgcttccagatgttccattctgaggactatgagttgctggtgcttcagcatggctgctgcccctactgccgcaggtgcaaggatgaccctggcccatgaccagcatcctggggacggcctgcaccctctgcccgccttggggtctgctgggctgtgaaggagaataaagagttaaactgtcagaatgtgtttcttgcccagatgaagtttgtgttttgtggggggggccttgtgtaaccacggaattcctatttatggcatttcatgccttgtaaatagcaccaggagatgaggaagagaatgtacatatattttctaaggaaaaaaatctgttactttcaga

SEQ ID NO: 351 - protein, 1286 aa, Homo sapiens
MRAVLTWRDKAEHCINDIAFKPDGTQLILAAGSRLLVYDTSDGTLLQPLKGHKDTVYCVAYAKDGKRFASGSADKSVIIWTSKLEGILKYTSWSVMSSLHLHLPFLGLHKTVRVTATDKAPKGQGGRIDCLRPSVQNQPGQKHNDAIQCVSYNPITHQLASCSSSDFGLWSPEQKSVSKHKSSSKIICCSWTNDGQYLALGMFNGIISIRNKNGEEKVKIERPGGSLSPIWSICWNPSSRWESFWMNRENEDAEDVIVNRYIQEIPSTLKSAVYSSQGSEAEEEEPEEEDDSPRDDNLEERNDILAVADWGQKVSFYQLSGKQIGKDRALNFDPCCISYFTKGEYILLGGSDKQVSLFTKDGVRLGTVGEQNSWVWTCQAKPDSNYVVVGCQDGTISFYQLIFSTVHGKDRYAYRDSMTDVIVQHLITEQKVRIKCKELVKKIAIYRNRLAIQLPEKILIYEKEDLSDMHYRVKEKIIKKFECNLLVVCANHIILCQEKRLQCLSFSGVKEREWQMESLIRYIKVIGGPPGREGLLVGLKNGQILKIFVDNLFAIVLLKQATAVRCLDMSASRKKLAVVDENDTCLVYDIDTKELLFQEPNANSVAWNTQCEDMLCFSGGGYLNIKASTFPVHRQKLQGFVVGYNGSKIFCLHVFSISAVEVPQSAPMYQYLDRKLFKEAYQIACLGVTDTDWRELAMEALEGLDFETAKKAFIRVQDLRYLELISSIEERKKRGETNNDLFLADVFSYQGKFHEAAKLYKRSGHENLALEMYTDLCMFEYAKDFLGSGDPKETKMLITKQADWARNIKEPKAAVEMYISAGEHVKAIEICGDHGWVDMLIDIARKLDKAEREPLLLCATYLKKLDSPGYAAETYLKMGDLKSLVQLHVETQRWDEAFALGEKHPEFKDDIYMPYAQWLAENDRFEEAQKAFHKAGRQREAVQVLEQLTNNAVAESRFNDAAYYYWMLSMQCLDIAQDPAQKDTMLGKFYHFQRLAELYHGYHAIHRHTEDPFSVHRPETLFNISRFLLHSLPKDTPSGISKVKILFTLAKQSKALGAYRLARHAYDKLRGIPARFQKSIELGTLTIRAKPFHDSEELVPLCYRCSTNNPLLNNLGNVCINCRQPFIFSASSYDVLHLVEFYLEEGITDEEAISLIDLEVLRPKRDDRQLEIANNSSQILRLVETKDSIGDEDPFTAKLSFEQGGSEFVPVVVSRLVLRSMSRRDVLIKRWPPPLRWQYFRSLLPDASITMCPSCFQMFHSEDYELLVLQHGCCPYCRRCKDDPGP

SEQ ID NO: 352 - DNA, 4176 bp, Homo sapiens
attgcttttgctgcttttctggctttccctttcggacatgcgcgctcggagcaaggcgccctcgcactcagcttaccgcgcatgtacgttgccaggggtaacgcaggtagccaaagtggcttgtggagtggcgaccgttagtgaggcggttgctgagacagacgctgaggcgggtaggaggagcccgagccgtaagggaagccgtgatgagggccgtgttgacgtggagagataaagccgagcactgtataaatgacatcgcatttaagcctgatggaactcaactgattttggctgccggaagcagattactggtttatgacacctctgatggcaccttacttcagcccctcaagggacacaaagacactgtgtactgtgtggcatatgcgaaggatggcaagcgctttgcttctggatcagctgacaaaagcgttattatctggacatcaaaactggaaggcattctgaagtacacgcacaatgatgctatacaatgtgtctcctacaatcctattactcatcaactggcatcttgttcctccagtgactttgggttgtggtctcctgaacagaagtctgtctccaaacacaaatcaagcagcaagatcatctgctgcagctggacaaatgatggtcagtacctggcgctggggatgttcaatgggatcatcagcatacggaacaaaaatggcgaggagaaagtaaagatcgagcggccggggggctccctctcgccaatatggtccatctgctggaacccttcaagccgatgggagagtttctggatgaacagagagaatgaggatgccgaggatgtcattgtcaacagatatattcaggaaatcccttccactctgaagtcagcagtgtacagtagtcagggtagtgaggcagaggaggaagaaccagaggaagaggacgacagtcccagggacgacaacttagaggaacgtaatgacatcctggctgtggctgactggggacagaaagtttccttctaccagctgagtggaaaacagattggaaaggatcgggcactgaactttgacccctgctgcatcagctactttactaaaggcgagtacattttgctggggggttcagacaagcaagtatctcttttcaccaaggatggagtgcggcttgggactgttggggagcagaactcctgggtgtggacgtgtcaagcgaaaccggattccaactatgtggtggtcggctgccaggacggcaccatttccttctaccagcttattttcagcacagtccatgggctttacaaggaccgctatgcctacagggatagcatgactgacgtcattgtgcagcacctgatcactgagcagaaagttcggattaaatgcaaagagcttgtcaagaagattgccatctacagaaatcgattggctatccaactgccagagaaaatcctcatctatgagttgtattcagaggacttatcagacatgcattaccgggtaaaggagaagattatcaagaagtttgagtgcaacctcctggtggtgtgtgccaatcacatcatcctgtgccaggagaaacggctgcagtgcctgtccttcagcggagtgaaggagcgggagtggcagatggagtctctcattcgttacatcaaggtgatcggtggccctcctggaagagaaggcctcttagtggggctgaagaatggacagatcctgaagatcttcgtggacaatctctttgctatcgtcctgctgaagcaggccacagctgtgcgctgcttggacatgagtgcctcccgtaagaagctggccgtggtagatgaaaatgacacttgcctggtgtatgacatcgacaccaaggagctgctttttcaggaaccaaacgccaacagtgtagcttggaacacccagtgtgaggacatgctctgcttctcgggaggaggctacctcaacatcaaagccagcaccttccctgtgcaccggcagaagctgcagggctttgtggtcggctacaatggctccaagatcttctgcctccatgtcttctccatttctgccgtggaggtgccgcagtccgctcccatgtaccagtacctggataggaaactgttcaaggaagcctaccagattgcttgcttgggtgtcacagacactgattggcgtgaactggccatggaagcgctagaaggtttagattttgaaacagcaaagaaggccttcatcagagtacaagacctccgatatttagagctcatcagcagcattgaggagaggaagaagcggggagagaccaacaatgacctgtttctggcagatgtgttttcctaccaggggaagttccatgaggccgccaaactgtacaagaggagtgggcacgagaacctcgcgcttgaaatgtacaccgacctctgcatgtttgagtatgccaaggatttccttggatctggagaccccaaagaaacaaagatgctaatcaccaaacaggctgactgggccagaaatatcaaggagcccaaagccgccgtggagatgtacatctcagcaggagagcacgtcaaggccatcgagatctgtggtgaccatggctgggttgacatgttgatcgacatcgcccgcaaactggacaaggctgagcgcgagcccctgctgctgtgcgctacctacctcaagaagctggacagccctggctatgctgctgagacctacctgaagatgggtgacctcaagtccctggtgcagctgcacgtggagacccagcgctgggatgaggcctttgctttgggtgagaagcatcctgagtttaaggatgacatctacatgccgtatgctcagtggctagcagagaacgatcgctttgaggaagcccagaaagcgttccacaaggctgggcgacagagagaagcggtccaggtgctggagcagctcacaaacaatgccgtggcggagagcaggtttaatgatgctgcctattattactggatgctgtccatgcagtgcctcgatatagctcaagatcctgcccagaaggacacaatgcttggcaagttctaccacttccagcgtttggcagagctgtaccatggttaccatgccatccatcgccacacggaagatccgttcagtgtccatcgtcctgaaactcttttcaacatctccaggttcctgctgcacagcctgcccaaggacaccccctcgggcatctctaaagtgaaaatactcttcaccttggccaagcagagcaaggccctcggtgcctacaggctggcccggcacgcctatgacaagctgcgtggcctgtacatccctgccagattccaaaagtccattgagctgggtaccctgaccatccgcgccaagcccttccacgacagtgaggagttggtgcccttgtgctaccgctgctccaccaacaacccgctgctcaacaacctgggcaacgtctgcatcaactgccgccagcccttcatcttctccgcctcttcctacgacgtgctacacctggttgagttctacctggaggaagggatcactgatgaagaagccatctccctcatcgacctggaggtgctgagacccaagcgggatgacagacagctagagattgcaaacaacagctcccagattctgcggctagtggagaccaaggactccatcggagatgaggacccgttcacagctaagctgagctttgagcaaggtggctcagagttcgtgccagtggtggtgagccggctggtgctgcgctccatgagccgccgggatgtcctcatcaagcgatggcccccacccctgaggtggcaatacttccgctcactgctgcctgacgcctccattaccatgtgcccctcctgcttccagatgttccattctgaggactatgagttgctggtgcttcagcatggctgctgcccctactgccgcaggtgcaaggatgaccctggcccatgaccagcatcctggggacggcctgcaccctctgcccgccttggggtctgctgggctgtgaaggagaataaagagttaaactgtcagaatgtgtttcttgcccagatgaagtttgtgttttgtggggggggccttgtgtaaccacggaattcctatttatggcatttcatgccttgtaaatagcaccaggagatgaggaagagaatgtacatatattttctaaggaaaaaaatctgttactttcaga

SEQ ID NO: 353 - protein, 1235 aa, Homo sapiens
MRAVLTWRDKAEHCINDIAFKPDGTQLILAAGSRLLVYDTSDGTLLQPLKGHKDTVYCVAYAKDGKRFASGSADKSVIIWTSKLEGILKYTHNDAIQCVSYNPITHQLASCSSSDFGLWSPEQKSVSKHKSSSKIICCSWTNDGQYLALGMFNGIISIRNKNGEEKVKIERPGGSLSPIWSICWNPSSRWESFWMNRENEDAEDVIVNRYIQEIPSTLKSAVYSSQGSEAEEEEPEEEDDSPRDDNLEERNDILAVADWGQKVSFYQLSGKQIGKDRALNFDPCCISYFTKGEYILLGGSDKQVSLFTKDGVRLGTVGEQNSWVWTCQAKPDSNYVVVGCQDGTISFYQLIFSTVHGKDRYAYRDSMTDVIVQHLITEQKVRIKCKELVKKIAIYRNRLAIQLPEKILIYEKEDLSDMHYRVKEKIIKKFECNLLVVCANHIILCQEKRLQCLSFSGVKEREWQMESLIRYIKVIGGPPGREGLLVGLKNGQILKIFVDNLFAIVLLKQATAVRCLDMSASRKKLAVVDENDTCLVYDIDTKELLFQEPNANSVAWNTQCEDMLCFSGGGYLNIKASTFPVHRQKLQGFVVGYNGSKIFCLHVFSISAVEVPQSAPMYQYLDRKLFKEAYQIACLGVTDTDWRELAMEALEGLDFETAKKAFIRVQDLRYLELISSIEERKKRGETNNDLFLADVFSYQGKFHEAAKLYKRSGHENLALEMYTDLCMFEYAKDFLGSGDPKETKMLITKQADWARNIKEPKAAVEMYISAGEHVKAIEICGDHGWVDMLIDIARKLDKAEREPLLLCATYLKKLDSPGYAAETYLKMGDLKSLVQLHVETQRWDEAFALGEKHPEFKDDIYMPYAQWLAENDRFEEAQKAFHKAGRQREAVQVLEQLTNNAVAESRFNDAAYYYWMLSMQCLDIAQDPAQKDTMLGKFYHFQRLAELYHGYHAIHRHTEDPFSVHRPETLFNISRFLLHSLPKDTPSGISKVKILFTLAKQSKALGAYRLARHAYDKLRGIPARFQKSIELGTLTIRAKPFHDSEELVPLCYRCSTNNPLLNNLGNVCINCRQPFIFSASSYDVLHLVEFYLEEGITDEEAISLIDLEVLRPKRDDRQLEIANNSSQILRLVETKDSIGDEDPFTAKLSFEQGGSEFVPVVVSRLVLRSMSRRDVLIKRWPPPLRWQYFRSLLPDASITMCPSCFQMFHSEDYELLVLQHGCCPYCRRCKDDPGP

SEQ ID NO: 354 - DNA, 1045 bp, Homo sapiens
actgcccctgcacacacacagattgctcctgcacacacacaacacacacacacacacacacacacagagactgctcctgcacacacatacagagactgcccctgctgcctcttcttgcttttggtgaagctgccagtgggttgagaagcaactctgtggtcaccccacctgcctggcggcaagtcctttgcaaggcctccagccccctcagccctttctctatgccctccagacgtgctacacctggttgagttctacctggaggaagggatcactgatgaagaagccatctccctcatcgacctggaggtgctgagacccaagcgggatgacagacagctagagattgcaaacaacagtatccatgcccttggccagagcctgtgtctcttccactcaagtcactttcgcatgcaagtgacagagtccaaaactgacaagctgaacaagcaaaggatccctccaggctcccagattctgcggctagtggagaccaaggactccatcggagatgaggacccgttcacagctaagctgagctttgagcaaggtggctcagagttcgtgccagtggtggtgagccggctggtgctgcgctccatgagccgccgggatgtcctcatcaagcgatggcccccacccctgaggtggcaatacttccgctcactgctgcctgacgcctccattaccatgtgcccctcctgcttccagatgttccattctgaggactatgagttgctggtgcttcagcatggctgctgcccctactgccgcaggtgcaaggatgaccctggcccatgaccagcatcctggggacggcctgcaccctctgcccgccttggggtctgctgggctgtgaaggagaataaagagttaaactgtcagaatgtgtttcttgcccagatgaagtttgtgttttgtggggggggccttgtgtaaccacggaattcctatttatggcatttcatgccttgtaaatagcaccaggagatgaggaagagaatgtacatatattttctaaggaaaaaaatctgttactttcaga

SEQ ID NO: 355 - protein, 129 aa, Homo sapiens
MQVTESKTDKLNKQRIPPGSQILRLVETKDSIGDEDPFTAKLSFEQGGSEFVPVVVSRLVLRSMSRRDVLIKRWPPPLRWQYFRSLLPDASITMCPSCFQMFHSEDYELLVLQHGCCPYCRRCKDDPGP

SEQ ID NO: 356 - DNA, 9680 bp, Mus musculus
atcctcgatgatgctcgggagtcctgcgttaccaggtgtgggttctacctacaagaggtgagcagagctgggctgccccaggggtgggcagcggtgtcctggtccaaactagggggcattaccactcggagccaggctccgaggctgggaaggctccttgcggctgcgatcccacgtgctagcagccacggtaacccccaaacccccagtaacaccccgtgcaccaggccaccctcacggagggccaggcccctgcagcagagcaaaccgcagctccgtagacaccctcctcttgcttgaccaagttctgacctgggtgggtccaatgatgatgttgctggacatcaggagaccatgagagaggctcctagaagagacccctaagagtactaaggtttccgctgcacagccctcccctctgcgacctagaaaccagtcagatttctgagaggacggtctggcaagggatactgggtagctgtaatgcacgcagtgagaagatgcacagaacctgagaacacccactccagaacttcagtattgaaataggttggtctgaggagatgggcatgtcagaactaccctaggcagaatctgcccctccctgaaaatatgaccatgcttcaggtgacttgcagtttctttcaccaaaaatgcctcatctctgagctagatacagcttttctttcttagaacaaactaggaaatcagcattgagtatttgcctagagtgaggtccttgtggtctttctctttattgccaagcttcattgtgagattggtattttatacaagggaacgagagcatttgggaccttacaatatgtatctagcaaacggtatcaactggttcagcattgggtctgctgacccggaagttctatgttaattctcactacactgccttgccaccttgtgaagtactcaaaacatccaaccaagctcttctgaaaggctctatggagcattttctccctgtagtctggaagtcggctctcctatcgtacatttcactcggtgtatgttccacgagttactcttcgttgttaagaccaaaatatcttgggtaatgagtttgtaaagagcaaagatttgtctgctcaaagttccatcgttttagtctgtcattacttgactcagttttggacctatgaaacagagtttggttcacctcatgtgggaaagacctggatcccaatatcactttaagggtgcatccccagtgacctacattcttcctactaggtcctacctcctaaggatttgacctccttacgtgagatcaaaactgtagcttgttggagatcattccaagttagtatatgcccagtctaatgctaagtaggaaaaaaaaagaatataaactgaagcttttcatcaaagaactcatgttcttggtgagcagattatatgtagccatcatacatatgatgattaatcttgactgataattgaactgagagattcctaggaattagtgaagcacacttcttcctgagtctctaaaggtgtttccagagagtattggatcactagggctctagcctctgggatgtttcattgtggattaaaaccttgagactagggctggtgagatggctcagtgggtaggagcaccctactgctcttccgaaggtccagagttcaaatcccagcaaccacatggtggctcacaaccatccgtaacgagatctgactccctctactggagtgtctgaagacagctacaatgtacttacatataataaataaataaatcttaaaaaaaaaaaaaaaaaaaaccttgagactagccgggtgtggtggcacacgcctttaatcccagcacttgggaggcagaggcaggcgaatttctgagttcgaggccagtatcctaattaacaaagtcagaaatgaaaagggagacataacaacagatcctgaagaaatccaaaacaccatcagatccttctgcaaaaggctatattcaacaaaactggaaaacctggatgaaatggacacatttctagacaggtaccaggtaccaaagttaaaccaggatcaagttaatgatctaaacatatcccctaaagaaatagaagctgtcattaatagtctcccaaccaaaaaaaaaaaaaaaaaaagcccaggaccagatgggtttagtgcagagttctatcagaccttcaaagaagatctaattccagttctgcacaaactattccacaaaagagaagtagaaggtactctacctaattcattactctgatacctaaacccacataaagatccaacaaagatagaggatttcagacaaatttcccttatgaatatcaatgcaaaaatactcaataaaatactctgtcctggtctacagagtgagttccaggacagccggggctatacagagaaaccctgtctcgaaaaaacaacaacaacaacaacaaaacccttgagactattggaaggtggtagaattgtgtggaaggtggagcctgggtggaggaagcaggtcactggcttgaagcacagccttgagagtcttaccttgacctggctctctcctactcttccaccctactttatgcctgccatcagctgaacagcatgtttctcacaatgccctaccacgatgggggtctagaattgtgactcaaatctctccttaaattgttcatttgggtatttggttgcagctacgcgaaagcaagtgtcatgtgtgttaacagtgatcattgttcgctgtgaaagtgaaggacatgaggaatttagttaaacagctgctcagtggccacaaagtcatgcctgaaaaggtgcatcaaaaccaggtggtggtttttaaaactcctgatccctagccctgctggaaagaacacacaactcctctctcattctcccgatctccatgcacccagtgttattgtgaaatatctccacatatgcttactgccggtgattctaatgggaggtaagatgagttgcctaattagatcttttatgctctgattgtcctgtcctctttcatcaacatgtctgcatatgtagttataataaaattttaaattgccaaacagttgccaggcggtggtggcacactgctttaatcccagcccttgggaggcttaggcaggcagatctctgagttcaggccagcctgttctagagagtgagttccatgctagacaggactacatagtgataccctagcttgagagacatgcaggcaggcaggcagacagacagacagacagacagacagacagacagacagtgatagtcttttcgacttcaggccttccccagctttccattttctccataaaaccacaggtagaaagtccctcaaggttgacgtccgggtggtggatggatcgttcctgctctgatgctggcatttcatgccactgcagaactgtgatgactaaggaagaactgtgactaagctgcagagaagggctgcagcggcagaagtgaaccttgtattttctagatccaggccgttcttcataagtaagtagtgcatccaggagtggtggcaaatgtctatcctcccagcactcagatgtcggcgtaatcacaagttcaaggccagcctgagctctataattaataagaccctatcatgaaagagagggaaggaggtcattatcccggatttaagctggatttcttctcttctccctcttcttaatgagatgatatcttgggaccctcaaactcatggattaaagttaacttcctgcctccacctcccaggtagctggaaatacaggtccacaccaccacacctcgtttgggctggatttaaagaagaaggggtgtttcttaacatctccagcagcaacgctctggtcttttttatttggcaaatccagtcctcccacagagaaagaaactcttcacccaaaggatggtgagctccctcaaggcactgagggattggaaaataataaggacttcacgaagacgaacaacgtgtgtaaggccctggttcagcacattcccttcccttcccatctgtcagtttcctggtggttatttattcaacattgacacagtttttggttgcaggcatagtagattcttgggtcctgaaagcaagctcagagagtacaaggcacttgccatgaagtttgatgacctgaattcagtctctgggacctactcccccaagttctcctctgaccttcacacagactccgtagcaagcatgtgctcaccaacacacaatgtgcgcacactcaatacatttcttttaatgtaagggcactatttttttttcttggtttcttttttgtttgattttcgagacagggtttctctgtataaccctggttgtcctgcaactcactttgtagaccaggctgcccttgaactcagaaatctgcctgcctctgcctcccaagtgctgggattaaaggcgtgcgccaccaccacctggctaccagtactcttctatgtaccagagtttgtccttgatttctgcttcattgtcctaaccttggtttcctcacctgtagaatgaggcattagctgttgggaattttaggttctctcttagttgtatcatctcattgtttaaactgagtctttgtcaactagattccaagtcagttgtgctaggtgctggagcacttaaagctcagatgagcatgtccctgtcatttagtgctgaacagtctgtcataataaaggtgtggcagaggaaggagaatgtccctgatgcatcctgatgcttgagaaagagactcgtgagctggagagatggctcagcggttaagagcaccgactacccttccaaagggcttgagttcaaatcccagcaaccacatggtggctcacaactacctgtaatgagatctgatgccctcttctggtgtgttggaagacagctttcgtgtacttacatataataaataaataaatctagaaaaggaaaggaaaggaaaggaaaggaaaggaaaggaaaggaaaggaaaggaaaggaaaggaaaggaaaggaaaggaaaggaaaggaaaggaaagaaaagagactcgtgagttgttctgaggctggaagttctaggatggatagaaatgaatgaatgggccgaagcagtgtggaaggaaatctgccatctgccatagtagactatgccatgtttagatgactccaggtatggcgtcatcaacgtctgcgttactgtgtcccacagtaagtgagccacatgtcctgcaggctgttctgtttccccagtctcctctgcctcgggtgaaggctgcctttgctaatccaggctataagacagtgctaccatctgaagagatggctactgagcacttccttgttgtataactgaactttggactctatttggctcctttcgttcttaacgtgttccatcacgccgactttgcaaattgggatttctttgctagtgtcagcccatgagcccaaaaggcctaagcaatagacactgagagcaagctcttaccctcttatgctcttgcctgtctcttgcctcttgcccccttactcccacttgcttccccccactcccacccatgtggccatggacggcctccattactctactctctccttttctttgcctttctctgcctctgttaccctcttaactcccctacccatcccctgaataaactctattctgtactaaaaaaaaaagaaattgagagcaaatgtttattaaacaacataaccacaggtagtttgagaaatactgctacatcagacaaaattctagagaggagacttgtgaagttaaatgaataaataactggacacctttcgtgtgccacaccctgctcgaggccttgagaaataatgtcggcctctgtatgaagaaaataaaaccagctgcatggtagtgagcgtgagatgatcagggaacatttctcctggttggaagggcagcttggctgagacctgatgctaaggagccaggagtgagaggtgggatgggcagcagctaagtctgcagaataagtttgatgtgactcaaggaccacagtctccaaggccaactgtcacagaggagtgactgaggttggggctcacacaccttcaaggtgaactactttcacttttcctaaatgggtcagtttctttctttattgtacctttcttctctatttttttttttttttcagaactctgaaggcatgacggtttgagctctcgtgcccgcagtctgcttccacagccggttggttggtgtacagtattttgtgttatgtgtgttcatagactttgatgcggtggtaccgttgttggtgtactaatctttcatcccatgcttgtcaggcaaaaagatttccattttgtatcttacagcactagcagttgttaaagtcacacaccgactaaagggacattgagcaaaaataaagtgaaatgcaatgtgtcgaggtccaagacccatggtctttacaatagtacaattttacatatatgtatatatatttttcagctctgcttaaaagcagagaagaaatgtctgtcttgtgaacacatgtttctcttttctgacaataacccaaaagatataaatacaagcacaaactaagggctgaggctatagtacaatgctagaatatttgagtagatccttggttcaatccatagcaccacaagaaaaggaaaagaaagggctggagagatggctcagtggttaagagtattgactgctgggctggtgagatggctcagtgggtaagagcacccgactgctcttccgaaggtccagagttcaaatcccagcaaccacatggtggctcacaaccatccgtaacaagatctgactccctcttctggtgtatctgaagacagctacagtgtacttacatataataataaataaatctttaaaaaaaaaaaaaaaaaaaaaaaaaaaaaagagtattgactgctcttccagaggtcctgagttcaattcccagcaaccacatggtggctcacaaccacctgtaatgggatctggtgccttcttctgatctatccgaagacagcaacagtgtagtcatatacataaaataactaaataaaaaagaaagaaaaggaaaaagaaagaaaggagggaagaagaagagaagaaaagaaagctaagttctgagttaccaagtgttcaggccttaggtactcctagtatagaatcctttgttcttatcattaaattctctgtttcctaggagagtcaaacacaaattctgtggagaatcttcaagagaaagaccttcaagagtctggagagatgactcagaaaccaagagcacccctagctcctgtaagttcagtccccagcacccacatggtggctcaccatccatcactccagttctaggagagccaaggacctctttcacctccatcaggaccatactggcatgtgctgcacaggcatccttgcaggcaaaacacttaacacgtgaaataaaaatctttaaagtgagagaaagagaaaagacttcaggatttttcctagtggctgattttgaaagaaatggccagtcagtagctggaagttgagtttatattgtgaatcttcaagaggtacacaccaatactgaagtagattgctgtcaaaagtggggagaagtgtcttgccatatttcccaaaaccacagatttcggtgactctttaaagttatttcaccaacattgaaagtggaaaaaaaattttttatctttgaaatcctaagccaaataaccagacaggtctcctctgaaatgtgtgtgtgtgtgtggggggggggagtctctctgcaactgaagaaagagggagagaaaaggaataagggagagtttcatcccacacaccactgttgagagactggtcaagtcaagcttccaggtgatgtgacagaactggcacctccaacattctctgctgagacaatgcgccaaaaatgtctcctttgactgtaacagtaaggacatttttatagggacgtcaccattagtcacttggagtcttcaaagagagacgacacagaggaatccggtgactggtgattcctaggagatgcttatcaccaacccagatggtcacctcttcaagaaaatccccacttcagaacaactgtgcacgcgtgatcggtgtagtgaggatttcattcagagctcagaactgatgagtcatcagagagaccacctgaaagaaaaagcctgcgggcgggagcattgtggcagggccttcactggccaatcaagtcccgtttccgcatcaggcagtccacatggctgagaaaccttacaaatgcgacaagtgcgggaagggtttcaccaggagctcgagtctgcttgtccatcattccgtccataccggtgagaaacctttcaagtgtgacaggtgtgggaagggcttcagccagagctcaaagctccacatccacaagagagtccacaccggtgagaagccgtatgcgtgcgaggagtgcggtatgagcttcagtcagcgatccaacctgcacatccaccaacgtgtccacaccggagagaggccctacaagtgtggggagtgcggaaaaggcttcagccagagctcgaacctccacatccaccggtgcacccacacgggagagaagccgtaccagtgttacgaatgtgggaaaggcttcagccagagttcagaccttcggatccacctccgagtacacaccggggaaaagccctaccactgcggcaagtgtgggcagggcttcagccagagctccaaactcctcatccatcagagagtccacacgggtgagaagccgtatgagtgcagcaagtgtggcaagggcttcagccagagctcgaacctccacatccaccagcgggttcaccgcaaggagcttcactaagtaacatgagcccactcagaagacttttattgtaaagataaatatttttcacgaccgagtgtgcatatcagaggtagcatgcttgcctagcatgtatcagtccctgagtttgagccctgatacgcccccacccacacacacacacacacggtttccagcttattaatactttgtgcatgttaggaatgtgtgttcatgcagagaggggtatgtgtgttgtgctggtgtgtgcatgtatgtgtgcacgcacgtgtgtggacgtctgaggatatctcagatactacattctgtatgtgagactaggcatctgtctgtcacacatggtgtgtaatgtcaccaagtaagccaggccagagtcccatggatctaactgtctccacttcccagctcaccgtggctagggttgcggatgtgtgccaccacatccaacctttttatgtggattctgtctcaagctttctagacaagagctttgctgcctaagctatgtcccagggctccagtttaatactttaaactcttacgtttgaattcctcaaaggaaagaaatagttaagggttattccgatatagcccctcacagaagaaatcaatccgagtactcagcacattttatgttatacagtgaatgggttactctggtttctcatatgggtagagtgtataatgcaattctgccagtgttgttagaattatattctacattttttaactgcaagaactctgtatttttccaagcacagcatggttcccttcattcatattctctgagaaattggaattcatgtttcctctgaaattatgtgccttgtttttcatattccatttaagtcctaaatagctctctttaaactgtg

SEQ ID NO: 357 - DNA, 2623 bp, Mus musculus
atcctcgatgatgctcgggagtcctgcgttaccaggtgtgggttctacctacaagagaactctgaaggcatgacggtttgagctctcgtgcccgcagtctgcttccacagccggagagtcaaacacaaattctgtggagaatcttcaagagaaagaccttcaagagtctggagagatgactcagaaaccaagagcacccctagctcctgtaagttcagtccccagcacccacatggtggctcaccatccatcactccagttctaggagagccaaggacctctttcacctccatcaggaccatactggcatgtgctgcacaggcatccttgcaggcaaaacacttaacacgtgaaataaaaatctttaaagtgagagaaagagaaaagacttcaggatttttcctagtggctgattttgaaagaaatggccagtcagtagctggaagttgagtttatattgtgaatcttcaagaggtacacaccaatactgaagtagattgctgtcaaaagtggggagaagtgtcttgccatatttcccaaaaccacagatttcggtgactctttaaagttatttcaccaacattgaaagtggaaaaaaaattttttatctttgaaatcctaagccaaataaccagacaggtctcctctgaaatgtgtgtgtgtgtgtggggggggggagtctctctgcaactgaagaaagagggagagaaaaggaataagggagagtttcatcccacacaccactgttgagagactggtcaagtcaagcttccaggtgatgtgacagaactggcacctccaacattctctgctgagacaatgcgccaaaaatgtctcctttgactgtaacagtaaggacatttttatagggacgtcaccattagtcacttggagtcttcaaagagagacgacacagaggaatccggtgactggtgattcctaggagatgcttatcaccaacccagatggtcacctcttcaagaaaatccccacttcagaacaactgtgcacgcgtgatcggtgtagtgaggatttcattcagagctcagaactgatgagtcatcagagagaccacctgaaagaaaaagcctgcgggcgggagcattgtggcagggccttcactggccaatcaagtcccgtttccgcatcaggcagtccacatggctgagaaaccttacaaatgcgacaagtgcgggaagggtttcaccaggagctcgagtctgcttgtccatcattccgtccataccggtgagaaacctttcaagtgtgacaggtgtgggaagggcttcagccagagctcaaagctccacatccacaagagagtccacaccggtgagaagccgtatgcgtgcgaggagtgcggtatgagcttcagtcagcgatccaacctgcacatccaccaacgtgtccacaccggagagaggccctacaagtgtggggagtgcggaaaaggcttcagccagagctcgaacctccacatccaccggtgcacccacacgggagagaagccgtaccagtgttacgaatgtgggaaaggcttcagccagagttcagaccttcggatccacctccgagtacacaccggggaaaagccctaccactgcggcaagtgtgggcagggcttcagccagagctccaaactcctcatccatcagagagtccacacgggtgagaagccgtatgagtgcagcaagtgtggcaagggcttcagccagagctcgaacctccacatccaccagcgggttcaccgcaaggagcttcactaagtaacatgagcccactcagaagacttttattgtaaagataaatatttttcacgaccgagtgtgcatatcagaggtagcatgcttgcctagcatgtatcagtccctgagtttgagccctgatacgcccccacccacacacacacacacacggtttccagcttattaatactttgtgcatgttaggaatgtgtgttcatgcagagaggggtatgtgtgttgtgctggtgtgtgcatgtatgtgtgcacgcacgtgtgtggacgtctgaggatatctcagatactacattctgtatgtgagactaggcatctgtctgtcacacatggtgtgtaatgtcaccaagtaagccaggccagagtcccatggatctaactgtctccacttcccagctcaccgtggctagggttgcggatgtgtgccaccacatccaacctttttatgtggattctgtctcaagctttctagacaagagctttgctgcctaagctatgtcccagggctccagtttaatactttaaactcttacgtttgaattcctcaaaggaaagaaatagttaagggttattccgatatagcccctcacagaagaaatcaatccgagtactcagcacattttatgttatacagtgaatgggttactctggtttctcatatgggtagagtgtataatgcaattctgccagtgttgttagaattatattctacattttttaactgcaagaactctgtatttttccaagcacagcatggttcccttcattcatattctctgagaaattggaattcatgtttcctctgaaattatgtgccttgtttttcatattccatttaagtcctaaatagctctctttaaactgtg

SEQ ID NO: 358 - protein, 201 aa, Mus musculus
MAEKPYKCDKCGKGFTRSSSLLVHHSVHTGEKPFKCDRCGKGFSQSSKLHIHKRVHTGEKPYACEECGMSFSQRSNLHIHQRVHTGERPYKCGECGKGFSQSSNLHIHRCTHTGEKPYQCYECGKGFSQSSDLRIHLRVHTGEKPYHCGKCGQGFSQSSKLLIHQRVHTGEKPYECSKCGKGFSQSSNLHIHQRVHRKELH

SEQ ID NO: 359 - DNA, 2669 bp, Mus musculus
atgctcgggagtcctgcgttaccaggtgtgggttctacctacaagaggtagaaagtccctcaaggttgacgtccgggtggtggatggatcgttcctgctctgatgctggcatttcatgccactgcagaactgtgatgactaaggaagaactgtgactaagctgcagagaagggctgcagcggcagaagtgaaccttgtattttctagatccaggccgttcttcataaaactctgaaggcatgacggtttgagctctcgtgcccgcagtctgcttccacagccggagagtcaaacacaaattctgtggagaatcttcaagagaaagaccttcaagagtctggagagatgactcagaaaccaagagcacccctagctcctgtaagttcagtccccagcacccacatggtggctcaccatccatcactccagttctaggagagccaaggacctctttcacctccatcaggaccatactggcatgtgctgcacaggcatccttgcaggcaaaacacttaacacgtgaaataaaaatctttaaagtgagagaaagagaaaagacttcaggatttttcctagtggctgattttgaaagaaatggccagtcagtagctggaagttgagtttatattgtgaatcttcaagaggtacacaccaatactgaagtagattgctgtcaaaagtggggagaagtgtcttgccatatttcccaaaaccacagatttcggtgactctttaaagttatttcaccaacattgaaagtggaaaaaaaattttttatctttgaaatcctaagccaaataaccagacaggtctcctctgaaatgtgtgtgtgtgtgtggggggggggagtctctctgcaactgaagaaagagggagagaaaaggaataagggagagtttcatcccacacaccactgttgagagactggtcaagtcaagcttccaggtgatgtgacagaactggcacctccaacattctctgctgagacaatgcgccaaaaatgtctcctttgactgtaacagtaaggacatttttatagggacgtcaccattagtcacttggagtcttcaaagagagacgacacagaggaatccggtgactggtgattcctaggagatgcttatcaccaacccagatggtcacctcttcaagaaaatccccacttcagaacaactgtgcacgcgtgatcggtgtagtgaggatttcattcagagctcagaactgatgagtcatcagagagaccacctgaaagaaaaagcctgcgggcgggagcattgtggcagggccttcactggccaatcaagtcccgtttccgcatcaggcagtccacatggctgagaaaccttacaaatgcgacaagtgcgggaagggtttcaccaggagctcgagtctgcttgtccatcattccgtccataccggtgagaaacctttcaagtgtgacaggtgtgggaagggcttcagccagagctcaaagctccacatccacaagagagtccacaccggtgagaagccgtatgcgtgcgaggagtgcggtatgagcttcagtcagcgatccaacctgcacatccaccaacgtgtccacaccggagagaggccctacaagtgtggggagtgcggaaaaggcttcagccagagctcgaacctccacatccaccggtgcacccacacgggagagaagccgtaccagtgttacgaatgtgggaaaggcttcagccagagttcagaccttcggatccacctccgagtacacaccggggaaaagccctaccactgcggcaagtgtgggcagggcttcagccagagctccaaactcctcatccatcagagagtccacacgggtgagaagccgtatgagtgcagcaagtgtggcaagggcttcagccagagctcgaacctccacatccaccagcgggttcaccgcaaggagcttcactaagtaacatgagcccactcagaagacttttattgtaaagataaatatttttcacgaccgagtgtgcatatcagaggtagcatgcttgcctagcatgtatcagtccctgagtttgagccctgatacgcccccacccacacacacacacacacggtttccagcttattaatactttgtgcatgttaggaatgtgtgttcatgcagagaggggtatgtgtgttgtgctggtgtgtgcatgtatgtgtgcacgcacgtgtgtggacgtctgaggatatctcagatactacattctgtatgtgagactaggcatctgtctgtcacacatggtgtgtaatgtcaccaagtaagccaggccagagtcccatggatctaactgtctccacttcccagctcaccgtggctagggttgcggatgtgtgccaccacatccaacctttttatgtggattctgtctcaagctttctagacaagagctttgctgcctaagctatgtcccagggctccagtttaatactttaaactcttacgtttgaattcctcaaaggaaagaaatagttaagggttattccgatatagcccctcacagaagaaatcaatccgagtactcagcacattttatgttatacagtgaatgggttactctggtttctcatatgggtagagtgtataatgcaattctgccagtgttgttagaattatattctacattttttaactgcaagaactctgtattttt

SEQ ID NO: 360 - protein, 201 aa, Mus musculus; identical to SEQ ID NO: 358

SEQ ID NO: 361 - DNA, 2361 bp, Mus musculus
atcctcgatgatgctcgggagtcctgcgttaccaggtgtgggttctacctacaagaggagagtcaaacacaaattctgtggagaatcttcaagagaaagaccttcaagagtctggagagatgactcagaaaccaagagcacccctagctcctgtaagttcagtccccagcacccacatggtggctcaccatccatcactccagttctaggagagccaaggacctctttcacctccatcaggaccatactggcatgtgctgcacaggcatccttgcaggcaaaacacttaacacgtgaaataaaaatctttaaagtgagagaaagagaaaagacttcaggatttttcctagtggctgattttgaaagaaatggccagtcagtagctggaagttgagtttatattgtgaatcttcaagaggtacacaccaatactgaagtagattgctgtcaaaagtggggagaagtgtcttgccatatttcccaaaaccacagatttcggtgactctttaaagttatttcaccaacattgaaagtggaaaaaaaattttttatctttgaaatcctaagccaaataaccagacaggtctcctctgaaatgtgtgtgtgtgtgtggggggggggagtctctctgcaactgaagaaagagggagagaaaaggaataagggagagtttcatcccacacaccactgttgagagactggtcaagtcaagcttccaggtgatgtgacagaactggcacctccaacattctctgctgagacaatgcgccaaaaatgtctcctttgactgtaacagtaaggacatttttatagggacgtcaccattagtcacttggagtcttcaaagagagacgacacagaggaatccggtgactggtgattcctaggagatgcttatcaccaacccagatggtcacctcttcaagaaaatccccacttcagaacaactgtgcacgcgtgatcggtgtagtgaggatttcattcagagctcagaactgatgagtcatcagagagaccacctgaaagaaaaagcctgcgggcgggagcattgtggcagggccttcactggccaatcaagtcccgtttccgcatcaggcagtccacatggctgagaaaccttacaaatgcgacaagtgcgggaagggtttcaccaggagctcgagtctgcttgtccatcattccgtccataccggtgagaaacctttcaagtgtgacaggtgtgggaagggcttcagccagagctcaaagctccacatccacaagagagtccacaccggtgagaagccgtatgcgtgcgaggagtgcggtatgagcttcagtcagcgatccaacctgcacatccaccaacgtgtccacaccggagagaggccctacaagtgtggggagtgcggaaaaggcttcagccagagctcgaacctccacatccaccggtgcacccacacgggagagaagccgtaccagtgttacgaatgtgggaaaggcttcagccagagttcagaccttcggatccacctccgagtacacaccggggaaaagccctaccactgcggcaagtgtgggcagggcttcagccagagctccaaactcctcatccatcagagagtccacacgggtgagaagccgtatgagtgcagcaagtgtggcaagggcttcagccagagctcgaacctccacatccaccagcgggttcaccgcaaggagcttcactaagtaacatgagcccactcagaagacttttattgtaaagataaatatttttcacgaccgagtgtgcatatcagaggtagcatgcttgcctagcatgtatcagtccctgagtttgagccctgatacgcccccacccacacacacacacacacggtttccagcttattaatactttgtgcatgttaggaatgtgtgttcatgcagagaggggtatgtgtgttgtgctggtgtgtgcatgtatgtgtgcacgcacgtgtgtggacgtctgaggatatctcagatactacattctgtatgtgagactaggcatctgtctgtcacacatggtgtgtaatgtcaccaagtaagccaggccagagtcccatggatctaactgtctccacttcccagctcaccgtggctagggttgcggatgtgtgccaccacatccaacctttttatgtggattctgtctcaagctttctagacaagagctttgctgcctaagctatgtcccagggctccagtttaatactttaaactcttacgtttgaattcctcaaaggaaagaaatagttaagggttattccgatatagcccctcacagaagaaatcaatccgagtactcagcacattttatgttatacagtgaatgggttactctggtttctcata

SEQ ID NO: 362 - protein, 201 aa, Mus musculus; identical to SEQ ID NO: 358

SEQ ID NO: 363 - DNA, 38231 bp, Homo sapiens
ctgggaccccagaaaaacattgtcagtaatgcatatcatggcaccctagcacacaacaaaggccaattatgcttactgaaatgccggtaaaccagattatgaaacaaaaacctgtaatcctgtaaacttcaccattctaaagccagacctacccatgtggactgcaggttgccccatacatgtctacatacacacatacccagcaacttacctatatgttatcaaaaaaggaacccggagccgtccagcccagcaacagttccaagtctttaagtcattctataagcatgtagaccaaaagttaccagagcctcctcctgtagccaaaaatctgtttgctcagttggctgaaaacattgctggcagcctaggcatttcctcatgttatgtttgtggaggaactaacatgggagaccagtggccttaggaagcaaaagagtcaatgccacaagataattttactctgactgacttttcccccaaaccaatgcccacaagttcaagcgtctggctcttaaaaacttctattaggccaggcgtggtggctcactttgggaggccaaggcgggcagatcatgtgagatcaggagtttgagaccagcctgaccaacatggagaaaccccatctctactaaaaacacaaaattagctgggcgtggtggtgcatgcctgtaatcccaacaactcgggaggctgaggcaggagaatcgcttgaacctgggaagctgaggttgcagtgagctgagattgcaccattgcactccagccagggcaacaagagtaaaactccatctcaaacaaacaaacaaacaaaaaagccacttctattatcaggagatactgtgttgcttactggggaaaagcttttacagaccgagtaagagaattaacatgcttaggacagcaatattataatgaaaacctaagaaaaactttgtggcgaggtaaaaatcgttccaaatcacctcatccaaatccattctcctgctttctcttctgtaaatcacacctggtatcagcctgaagctttttggatgtgaatccactgagctggtgagttccttaaataaacatcctcctgtattccccatatcggtctctctggtcctcagtttaccgcaacaggcatgatagatttgtcatgaacaataatagctatagcaacctgtcaagaggtaagtaatataaatatatgtaaattcagacaactaaaagtcaaaatggggggatagagttaaagtgtagaactggtctttttttccttttttgtttatcttcttttctttgtgatcaaagtttagttgtcatctgtttaaaataacttgttatatctgtaagatacattttttggtttcctcacaggaaccacaatgcaaaaaaaaagaaaatagattcactgcaagtaaaaaaaacaacgaattaaaacatactaccaaagaagatcacgtagccacaaaagaagacaacaagaaaggaagaaaggaagacaaaattacaaaataaccagaaaacaaacaagaaaatggcagtagtaagtcctttcttatcaataataaaacagaatgtaaatggactcaattctccaattaaaagggttagagtgactgagtagataaagaaataagacccaactatatgctactacaagaaacccacctcacctctgaagacacgcatagactgaaagtgaagggatggaaaaagatgcttcatgaaactggaaaccaaaagacagcaggactcactatacttagatcaaatagaatacaaaataagactgtagaaagacacaaaaggggtcactatataatgataaagggatcaattcagcaagtggatataataattataaatttgcatgcaacaccagagctcccaagtttaaaaagcaaacattaataggtctgaagggagagatggcatgcaatacaataatagtaggggactgtctcagtaatggataaatcatacagacaaaaaaaatcaatagagtaacatcacaattaaactgcacactatacttaataggcctaagtaacatctacataacatttgcccaaatgctgcataacacacattattttcatcagcacatggaacattttccataatagaccacaccttaggccacaaaacaaatctcaataatttttttttttttttttgagacagagtctcactctgttacccaggccagagtgcagtggcctgatgttggctcactacagcctctgtctcccaggttcaaccaattctcctgcctcagcctcctgagtagctgggattacaggttcctgccaccatgcccagctaatttttgtatttttagtagagacagggtttcaccatgttggccaggctggtctcgaactcctgacctcaagtgatccacatgtcttggcctcccaaagtgataggattataggcatggccactgtgcccagcctcagtaaattttaaaaagtagaaatcgggccaggcgtggtggtttacacctgtaatcccagtattttgggagactgaggcaagaggatcacttgaggccaggagtttgagacaagcctggcaacaaagtgaaactccaactctacaaaacattttaaaattagctgggcatggtggcacatacctgtagtcctagctactcaggttgttgagtggggaggatctcataagcccaggaggtcaaggctgcagtgagccatcatcatgccactgcactccagcctgggcaacaaagcaagaccctgtctcaaaaaaaaaaagaaaaaaaaagtaaaaatcatatcaagtatctttcctaactacaatggaataaaactagaaatcaagaagaaaagaaatgttagaaacttcacaaacacatggaaactatgcaacatgctcctgagtgaccaaagggtcaatgaagaaattaggaagaaaaatttaaaatttcttggacaaatgaacagggaaatacaacataccaaaatctattgaacacagaaaaagcagtactaagagggaagtttttagcaataaacaccttcaccaaaaaagcagaaagacaggccaggcacagtgactcatgcctgtaatcccggcactttgggaggccgaagtgggaagtctgcttgaggccaagagttcgatatcagcttggacaaacacagtgagacctcatctctacaaaaatttttaaaattagctgttgtagtggcacatacctgtagtcccagctactcgggaggctgaggtgggaggatcacttgagcctgggaagtcgaggctgcagagagacataattgcacccctgcactccagcctgggtgacagagcgagactctgtctcaaaaaacaaagaaaaaagaaagaaagagtagacagacttcaaataaaaaatctaacaatgtgccccaaggaactagaaaagcaagaacacacttaatccaaaattagaagggaagaaacaataagtatcagagcagaaataaatgaagttgaggtaaaatatatatatatatatacagaatatcaacaaaacaattagttttttgaaaagataaaatcgacaaacctttagcaagtctaaggaaaaaagagagaagacccaaatacataaaaccagaaacaacaaaaggagactaaataactgagaccacagaaatacaaagaaacattagagactataaacaactatacaacaacaaattggaaaacctagaataaatggataaattggacacatagaacctgccaagtctgaaccatgaaggaaagaaaacatcaacaagccaataacaagtaatgagatcaaagctgtaataaagtctcccatcaaagaaaagtccaggtggcttcactgctgaattctaccaaacatttaaagaactaataccaactctactcaaactcttcaaaaaaatgaaaaggagaaaatacttccaaactcattctatgaggccagcattaccctgatatcaaaccagacacacacaaaaaaaaagaaaatgagaagctaataacactgataaatgtagatgcaaaaatcctgaacaaaatactagcaaactgaattcaacaacagattaaaaagatcattcaccatggtcaagtgggattcatcccagaaatgcaaagatggttcaacatacataaatcaagaaatattaagcatttattgatttatgttatacattatttaataaacatttattgatttacatgatacattaatgtgatacattgcatttacagaaccaagaacagaagccatataatttcaatagatgctgagaaagcattcaataaaatttaacatccctttatgataaaaatgctcgacaaactgggggtatcccatacctcaaagtaatacaagccatatattagacaaacccaaagccaacatcatacttaatggggaaaaattgaaaatcctttctctaacatctggagccagacaaagatccccactttcaccacttttattcaatataattctggaagtcctggctagagcaattagctgagagaaaaaataaagggcatctgaactagaaaggaagaagtcaagttagacttgttggcagacaatgtgatcttatatttagaaaatcctaaaaactctaccaaaaaactctttgaactgacaaattcagtaaagttccaggatacaaaatcaacatacaaaaatcagtagcatttatatacatcaacagcaaacaatctgaaaaagaaatcaaaaagcatttttttatttacaatttgtccccatttacaatagctacaaagaatataaaatacataggaaccaatttaaccaaagaagtaaaagatcgatacaaggaaaactataaaacactgatgaaaaaaattgaagaggacaccaaaatatggaaagatagtccatgctcatggactggaagaactggtattgttaaaaagacaatactactggccgggtgtggttgctcacgcctgtaatcctagtactttgggaggccgaggcaggtggattgcctgagctcaggagttcaagaccagcctaggcaacacggtgaaactctgtctctactaaaatacaaaaaattagccaggtgtggcagcgggcgcctgtagcccctgctactcaggaggctgaggcaggagaatcacttgaacccaggaggcagaagttgcagtgagctgagatcacaccactgcactccagcttgggtgacaaagagagactctgtctcaaaaaaaaaaaaaaaaaaagacaatacaactcaaagcaatttgtacattcaatgcaattcctaacaaaataccaataacattcttcacagaaaacattcttcacagaaataggaaaaaaatcctaaaatttatgtggaaccacaaaagaccccaaatagccaatgcaatcctgagcaaaaagaacaaagctgaagatagcataatacctgatttcaaaatatagtatgaagctatagtaaccaaatcagtacgggactggcataaaaacagacaaacagtcgaatggaacagaatagagaacccagatacaaatccatgcacttacagccaactcattttcaacaaaggaaccaataacatacgttggagaaagggacagtcttttcaataaatgatgctgggaaactgaataaccatatgcagaagaatgaaacgagacccctatctctcaccataaacaaaaatcaaataaaatggattaaagacttaaatctaaatcctgaaactatgaatctactagaagaaaacattgaggaaacactctagggcattggtctgggcaaaaaattttttgtgtaagacctcaaaagcataggcaacaaaggcaaaaatagacaaatggaattacatcaaactaaaaagcttccgcacagcaaaggaaacaaccaacaaagtgaacagacaaccccacagaataggagaaaataccacaacctatccacctgacaagggattaataaccagaatatacaaggagctccaacaactttatagtaaaaacacaaataatccagtttaaaaatggacaaaagagatccgaataaacatttctcaaaagaagacataaaattgctaacaggtatataaaagaatgttaaacatcactaatcatgagaaaaatgcaaatcaaaagcacaatgagctatcttctcaccacagttaaaatgacttttatctgaaaaacagggaataacagatgctggcgaggatttggagaaaggggaatcattgtacactgttgatgggaatgtaaattagtacaaccactatggagaacagtatggaggctcctcagaaaactaaaaatagaattaccatatgatccagcaattccactactgggtatatatcccaaagaaaaggaatcaatatactaaagagctatctgcattcccatgtttactgcaacaatattcacaatatccaaaatatggaatcaacctaagtggccatcaatggatgaatggataaagaaatgtggtgtatgtacataacggaatattattcagtcataaacaagaatgaaatcctgtcatttgcagcaatatgggtggaactagaggccatgatgttaagtaaataagccaagcacaaaaagacaaatattgcatattctcactcatacgtgggagctaaacaaaaaaacaagtggatttcatgaagatagagagtagattggtggtaaccagagttcagaaagagtagaggtaggggtctgaatagaggctggttaaggggtatgtattagtcttttttcacactgctataaaaaaatgcctgagactgggtaatttataaagaaaagaggtttaattgactcacacttccacatggctggggaggcctcaggaaacttacaatcatgttggaagaagaagcagtcaccttcttcacaaggtggcaggagagagaagaacaaaggaggaacttccaaacatatctcacaaaccatcagatcttgtgagagctcactcactgtcatgagaacaccatgggggaaactgccccttgtgatccaatcacctccctccctccacttgtgggaattacaggtccctccctcaacacgtgggaattacaattcaagatgagatttgggtggggacacagagccaaaacataccaaggtgtaatacacagttagacagaaaaaataagacctggtgttcaataaaccagtaggttagctatggttaacattaacctactgtacatttcaaaatagccagaagagaatcatttgaatatttccggcatacagaaaagacaaatacttggcgatagatatcccaatttccctgctttgatctttacacataatattaatcaaattatcacatgtacccccaaaatatgtgcatctattatataccaatttttaaaattaagttaaaaattaaattttgggttttgcatgtgaaaaaagagagaatatgggagaaaagaaattggaaacatcccttagggacaatttttttaggagttttgctgtaaagcaaagcagagaaatgaggtagtggctggagagaaatagggtgcaaggtaaggggttttatttattttatggacaatattacagtgtattcattagtatgctgataattcagtacagaatgaaaatcttgaaatacagaagagagagaaggacctcattcatgagaaagcatttaacatccagggtgcaaaagaattttctcatataggaactagggccagtgactcagaatgaaaagtagagcatacagtttctaatgcagagaggagggcagatgtgcctgtgaggcggtatagaagttctctttactcagtaacagaaagcaaagtcatcagcactcagtgagatgggaggagttgttggcggcttgaaaagagagtagaagaccaggcatggtggctcagcctgtaatcccagcactttgggaggctgaggtgggaggatcgcttgatcccaggaggtggagaccagcccgaacaacatggtgaaacttcatctcttaaaaaaaaaaatacaaaaattagcctggtgtggtggcgcaagcctatagtcccagctacttaggaggctgaggtgggagggttgcttgtgcccaggaagcagagattgcagtcagccaagatcgcactactgaactccagcctggctcaaaaaaataaataaataaataatgaaaagagagtagaacctgtgaaatagtcatttaggagaatggatggactaagaaatgtagaaggatagccaggcagcgtgaagggcccacttgaacttaatggttataaactgaaaatgaaaccaatcatcccagccatgtggttttctcaaacaacctctgccgtacaggcgcaggccaggaactggattcaagcagatttgggtttccatcaagagaataaaaccaagaaagactgggacaagagagttaagggtaacggcacatacacaggactggccataaccatgctccatggcctcttaaattgagtgaggagagaagtgagcacatgaggaagtgaaggtcagggccagggtggtaaatctaaatagggaaaagctctgtggttttccaatgaagaatgaggagaggagtaaggtccaagggagacattttgtgttccccaggcaaaaggtaagacagcatctctgaggaggagaccgaaggggacgtgggcctctccaagcatcgcaggctgaaaataatagtcccccaaatatgtccatgtcctaacccccagaagctgtggatgttaatttctatggcaagagggattttttttgaaatgtgattaaattaaggatcttgacgtcaagagattatcccagattagccagctgggcctgatgtaatcacaacagtcgttattagaaggacccacgaggagccagtgcctgagcatgtgatgtgatgatgaaggcagaggttgcagtcatgcactttgaagataaaggagcgagccataagccaaggaatgcaaacagtcactgggaactggaaaaggcaaagaaatattctcatctagaacctccaggaggaactagccccaccaacactgactttataaagcccagtaaaacttgatttcagacttggcacctccagaagtttaagagaatacatgtttgttatactactaagtttgtgttaatttgttgtgacagcaattggaaactaatacaccaaggaagggggaggatgtagaagagaggtccaggcaacatctctttcctctccaaaataaatctgaaagaaaggaattgggaaaagaccaaacgggtagctctgtgtcactcggtgagaagtgaaataaacgtaaaatcctggtatcaacaacccttgtgtgcgtttaggagagttctgactgctgggagccacttgtctaattccctcacctcctgtgtttgttccaagatcccctatttaaaattgcaaagtacacccccagtcctacacacccacaaacgcacctcgccacaccccgcccagctctatgctttcagtaccacctcatgacacacacgacgccatatatttactatatttatggattgcttgtttccccaactagaatagggcagtgacttttgtgcaagcatcttgaacagctcctggtacacagttggctctcaattaatatctgttaaatggatgaacttcagaggtgagatggaagatgccgaatggcaaatattcacttcagaatgttttgaaaggtaaagatgaaattatgggtatttacatccttttcccccaatagtattttaacaaatgaaaatcaccttaacaggtattcctaaaataattcttatttgtttgtaataaaaaacgaggaggaggacttgaatacacgcgtcgctgactcaaagatggtcccctccgcccaagaatcccgctccgcacagcgcagagttcaggggcccgcgccggaagtgggcgtggttcgcccgcggcttgctgggacttgtatttcggggccctaggcgcgcgagcggtcagcatccggaatctggcccctgcaggcgtggggttccacgtgggaggtgagactggccgggcttccccagccgctggcagaggcgttcaggggtcaggaaatgggtgtgccgcgggtaaggcgctgggccgccgagctgcggaagccgggagggcggcgatggtagggcacgcgaccagcggaggcgcggcccgcggcggcacgtgtgtcccggcgccgcatttccgagctgctgcgcccccggggccgggctgcggccacaccgaagcctgtggggccctgcagctgagcggccgcgcctccgatggcccctcctccctcctggccgagctctggcctgggccggctgggggcttcgtggttggccacgccggccttttcctcgcctgtgacgggcgttattgcaggggggttttcggtggacgttaggcgacggacgggggctcctgtaagagactgaggtttctgtccgcagcactgccttcgctgaaaagagcttgcatctgagctcccgcaccgcaggaacgagccaggctcctgagaatgaggtcggggaaggcgtcttgggcaaccgaaatccatcccgagaagcttctcctcttaactagaactttaggacagagatcgggaaagtcagaggaaatgggcacggcttcgagctgccggcggctgcggaatttacctagcctcttggttttggggggaaaacttggcttgtttaatcgaaagccctgtggagagagatgaaggtggtgacagaaaatgcttcacctctcacctgatggagggagtgtgggtggaagtgactgaagaagcgtcagaggcaggagcggagtaactttttccccgcagtcttgctggacttgattttcatggctttttctctttccctaactctgcctttccaggaatccatcccctctgggagtaagaaatgaccagggtccgggtgagttggcgttccatttctcctaaaatgccatctccctgaaatgtccctgtgccatgtgttgttttctttattgtcaggcccccagtacggtattttatagctatggatgtagggacattaagatactaaggacatgtagctagcagatgatgtcaccagggtctgcacagagagttttcactggcccatcctgcctccaagaatttattccactcctcagagcagtgggctgtgccctcctggggagcctctcaaagcctgccttttcctgccagacatttcactcacattgaaagtcattccaagctattccatactcatcccagtgctaagtggtctcagcaaaacagatagaatgataaaccacggtgcttttcttcaaggagcttaccatcttgatgaacatattatattacctgtacacaaaaaaatgcatattaatagtgataatttattaactatgagtcaaaaacgaggaaattcgttaaatggcagcacagtggttacaaaatcactctagaaatgcttttcaactaggctatgcatcagaactctctgtggtgttttttaagaactaagcttccttctctcttccagacctagtgaaaggagagtttcactccttttttattctgttgatctttgtacatccaaaggtttattgtgaaatatctctctatacactataagtgtctctagggtaggtaaaatgagttattcatcctttatactcaggttgatttgttctctttcactagcatgtctacatatttaactgttccagtaaattttaaattaccaagtcgtacttttttaaagagagttttcagttgtccccataaaaccatctgtaggaggttacctcaaaattaacccttagactcccagggtatttgagatggtcagcccccacttagaatcccatggtgtttgagatggtcggccccctctttgccctgtcctggcgttttatggtggagagctctaactcggctaactctgagagagccgaaggaaagtgccttgtcctttgtttcagagagcagaaggccagaaataaaccccgtgttttcttccttcaggctgttctttctccattaactaaacaggtcatcacatcagaagttgtttgaataaaatatcagactgcgttttaagggaaaaaaaatgttttttaacactaccagcaaaggccatctttttgcttggcaaatacagccctcacacacatgagctcttagaaaaaatctgtttagaggacagtaagctgacttgaggtactgagagcatggcttctctgtgccctgaaaagtgattgaggacttcaagggagattaaccttagtagaatcaatacattttccttccttcgcttctgcctgctccctaatgattaagtattcactgccgctgcaactggggattgccagtttagtaaattttgagattctggtgtgtgttacacaacaacttttttaatttaaaggaaggacttcattccaagcattgtgtgttttctatgtaccacacattgtccttaggtctgctgaaaggcgggagtcttagttaaccctgcttttcctctgtgacattgggtaagtcacttcgcccttatgaactgtggtttttttctctgtaaactgagggtcttgggcttgactatctttatgttttcttttagttgtattattattcatttaaattgaatgtgaatttatatttatctttcagattccaagtcaattgtggtagttgctggggatttaaagatgagttgaggccagacatggtggctcacacctgtaatcccagtactttgggagactgagtggggaggatcacctgaggtcaggagttgagaccagcctggccaacatagtgaaacctcatctctactaaaaatacaaaaattagctggtcatgttgatgcctgttgtaatcccagctactcgggaggctgaggcaggagaatctcttgaacccgggaggtggaggttgtagtgagctgagatcatgccactgcactccagcctgggcaacagagtgagactctgtctcaaacaacaaagatgagttgagtgtagcccctatccttcagaatcttccagccaacttgggagagacttaatagctatagtagagggatgtgaaagatgctatgagatctcagaggaggagaattctaactcatcctcatgcttcagaaagaggctattgtcctgagactgaaagctccaaaatggatgggagaactcaataagttagggcttactatagaaaggactgtgctagactcaagtgtaatgtgttgaatgactccaggtaatctagtgtgcctcttcctgcttttccacttcaaagtaaattgttagatacagcagagatgggctctagaaagaagtggaaggccacatgatggcatgtatgtagttctgaggaggtcgacatttgtctgatagaaacaggaaacaattgaacttgtgaccttcctctttggttggcctttagaatatcaagtctgctctcccaactgtaagcaggagcacagccttggagtgactccttagtgccactgatacctgggaagactgttgattattcagtgtttcagtcccacctttgtcttgctttaacaggagcactaatttcctttccttttctcctttcccttgtcacaatgattcttttcatttggtctactcctgtcattttttttacctaccacaaagttagtagtccaccaacatatcctttcccttctcagaatggagtcccgcctgccattttatcttgaggaccttaaaaaattaataactctggttgtctaacctagggactggaagatgacaaaaattgtactacaaagaattggtaaggagttattgtagcctaggtaagaaaaaaaataagggtcttactaagactggcagtggaaatggaaaagaggtaacacattggagggaaatttaggaggcagaattgacaggatctgaaatggtttgaatattgttgaggtagagaaggaggattagacaatccagacaactgaatggaagacggataaaaaaataagggagagaaaagataattggtgggcttgcatctctgaagatagaagaagggatttgatctagaatgcacaggaagagattagccttaaacagaaagaaatttttttttctctgtggtctgaagagaaggtctggttgggaagagcagccagtccacttgcttttaatatgccatgggtcatgccttgctaaaggatgtggtgatggagcttgaaggcagcaacctttgcttctgtttgtttgtcccacctttactccggggcttgagcctccttttccagccctcttcctcagaatggagaccagtgaccttgaacagaaagcttgggagacagcacccatccttaccttcatctttaccctcatccttccccactggtgacaagttgggtaagtcatgtcactcctgcagggcaggcccaaggaaggagggagtggtgcctctttagcctcaggccaaagctggcttagctgatcaaatttatgagacagcctttatgactttttatatattctatcactttacttttgaaattgtgccttagagagtggtgccagcccatgcactgtgcagatataagtactgaaattgagagtttcaaaaacaaaaaaaaactggttcttcaccacaggtagtttaagaagcattgcttcatcagacagagccctgaagggaaccagatttgctgacattgactgagtaaatatttggactccctttatgtgccaggccctgcttgaggtcttggggatgcagtcatgaacaaatgaggcagcctctctattcttggggaatttaaatctcagcagggaaagacagtaaataagaaagcaagtgaataagaaaataaggtaaggcataagttataagaagaaattaattaaattaaaccaggaaaatgatatatacaggatgctccagtggattagatggtcagtgacatgctttctgaagaggcaacagttggactgagagctgaatcatgaggaatggagagggcagctagtgcagaagctacaatgagtttgatgcagttcaagggcctgctgggtcactggtgctgaatatgatcataagagaggcctaggttggggaggtgacaggagagcctcatgggccaggatgaagagtctggattttactggatggccactgaaaagcctttggagggtttcatgcttggccttgtttttgttttaaaagatcaccttggctgtcatgtggaaaactcacgtttgggggagcaggagtagagtcagaccaaccaggaggttgatgtgggtgagagcaagtgctgcctaggcctagagaggtgacagtgcagggcaggggagctgggtggatgccgatatgctttagcggtaaaggaggtgggtgataggtgagatgtgaggatgagaatgaaatgacatcggggattttggtttgagcaattgagtggttcatgtggctgtttactaaaatggggatgactggggaagagcagatgctgatggatattgctggagcaggagttctgttggggcctgttaagtgttttgttttgttttttgtttgtttgttcaactcactgcaacctccgcctcccgggttcaagagatccttccacctcagcctcctgagtagctgggactacaggcacacatcaccacgcctggctaatttttgtattttcagtagagacgaggtttcaccatgttggccaggctggtctcgaactcctgacctcaagtgatccgcccacctcggcctccccaaatgctgggattacagccgtgagccatcgtgcccagctagggcctgttaagttttaagcactttagacgtcccagtgtagatgttaaaaggtagaaaggtggagtctggaggtgaggtaagaggttagggctggaaataaatatttggcagtgaatggtattttaagtcaagggatccctcaggagagtgttttatggctgtgtgtatatgtgctattttattttcccagtaatgttcaattacttagtttagaagaggaagaacagaaagcataggaagtgatttttaacttgtaggatattagagagattcatattttaagagtagaggggtccaggtagtggactagtcccgattatggttattacagtttgatgaaatgtggctgagatcattggcactgtggagattaagaaatgtgaggtcagagtgttgggtaaattgttcctgcgagtgttaaggttgtcaggataatggtgggaatggggtgaagatgacaactcagcaatgacacaagaagagagtgacacagaaagattcagtagctgagaacttgagcgtagatatgttgtgggcaggagggaaatgatttggatggaagtagccaagtaagtgagaaaggaaagactttccaacaaaacttggcttagctcactcagatccctgagctgcaaacttcttctatacctttcttaccttttccagtgctgctgacttcaccccacttgcagggcatttgtgcagatggttgtttgttgaggaggaatgtgcttaatgttttaggaaccagttacattcaaggatgcctctgtggccttcaccgaggaggagtgaggtcacctggactctgctcccaggaagctgtgcggagctgtgatgctgggcaactacagaaacttggtcttggtgggtaaggacatgtgaacttggacacctgcccattggcttctttgtttcctacttcctttttgacacaaaaggatgttttctgactattctaagcagctaaagaacttggtaaaaattggagaatggtagttttactgggttgtctcaaaaaccataccttttccatcctttataagccagaggtgggactgattttgctttctgcacaatcacccaatccctgtgagtttctgaaatgtgatctctcagatggagcaagataaagatcattatataatagcaagtgaacctcaaagagcaccaggcatcatggcaagttataagccaggctaatccacagcagaggaatccctttttcaacgttccaggagttatctggtatcttgcagtctgtgtcgaaagcagggacttccaggatgtttcctatgtgctactgttttacctgatctattcacttactgcccttctacctctgcaggaggttgtggtctttcccagtaatggtcacttgcttctctgtactcctgcctttccccacatttccccaacattggtcatgtgccatctttgcttggactttatttttcattgaatgtcctccccctgcctggcaatatccagtttccattatttcttttcttacacattcaggaattcatccctctcccctcccaaaaataatcgaaattcatggtgagacactctcataccctacaaatagataaaacacttttttgttttctttttttgagacggagtctttttgttttgtttgtttgtttgttttgagacggagtctccctctttcatccaggctggagtctggagtgcagtggcacgatctcggctcactgcaacctccacctcccaggttcaagtgattctcctgcctcggcctctggagtggctgggattacaggcatgagccaccacacccggccagataaaacactttttgactacctgaatcaaggagccttaaacattttcaaatgcagtaattcattttttagatatctagtctaaggcaataattagtaattttaactgaaaattgtgaacaaagatattcattatagaattatttaaaatagtgaaaaaattatttacccactagatgtatcacaggggattggtcaggcaaattatcatggatcacagaaaagtatgtagccattaaaaaatatgttcatgaagaacttaaattagatggggaaatgaatgtatacctactaggttgaaccatatgaacttgccattttatagccaaaagcagccattctacaaaaaacactgaaaagtggctgggcacagtggctcatgcctataatcccagcactttgggaggctaaggcgggcagatggcttgagctcatgagtttgagaccagcctgggcaacacagcgaaaccctgtctctacaaaatatacaaaaattagcaggacatggcggcagttacatgtaatcccagctactcaggaggctgaggtgggaggaccccttgagccaggaaggcagagttgcagtgagccgagatgacactactgcactcctgccctggtgaccgtgagaccctgtcaaaaaaaaaaaacactgaaaaatgtgtcatcatgttagctttcagggtttttgcctccctcagtccacagtgggaccctggttctcttccctcagtaactgtggcctttcagtttctattttcagctaatcctggggagtaaagagaatgctacagggcaaagtggttacctccaggtagtgaaccaggcctttccacgttctttatataaacccagtgcctgtgctctgttcttgtaccaaaattgcccacttggaagtcactactgaacttttgtctctttcagagtttgttccttttttaatttttatttcagcatatttaccattatcagttttattgatggtttctatagtgttgaccttctcttgaaattctttgtcatgcatgaaatcatagtttttctgtttcctccagcttctctcttagtcctttgctctgcagattctctggcttctttttctttttttttttttttttttttttttttcttgagatggagtcttgttctgtcgcccaggctggagtgcagtggcgtgatctgggctcactgcaacctccgcctcctgggttcaagcaattctcctgcctcagactcctgagtagctgggactacaggcgcgtgccaccatgcccggctaatgttttgtatttttagtagagacagggtttcaccatgttagccaggctggtcttgatctcctggcttctgtcttttttctaacttgaaatctcaaagggctctttggttttaagttacatcatcagtgtttctcggcctttttctttatcattactctctccctgccaaaaggagacaaattaaatttctcctgtagaaaaattaagtatgaaggaataaggttttgtcaggtaggattgtttttatgagtcccaaaccagcataatatgtaagatttgtttggccaggtgtggtggctcacacctataatcccagcactttgggaggccgaggtgggcggatcacctgaggtcaggagttcgagaccagcctggccaacatggcaaaatcctgtctctactaaaaatacaaaaattagctgggcgtggtggcgggtgcctttaatcccagctgctcaggaggctgaggcaggagaattgcttaaacccggaaggtggaggttgcagtgagccgagatcgtgccactgcactccagcctggttgacagagtgagactctgtcccaaaaaataaaataaaataaaaagatttgttgtgtcccctatgaaccaattctcaccccttggggacattattgcccctgagaatgcatggtatgtccacttataggaggagctgttacacatttaatggtgttcaactctcctttctattttgataagcctaaaattattttcctttttaagttcccttcttatagtcccacttttgtcagtattaaagttgttccagtctcctagtttagaaataggccatgactatattcggtttctcttgggccaggcgtggtggctcatgcctgtaatcccagcactttgggaggcagaagcaggaggatcacttgagcccaggagttggagaccagcctgggcaacatggcaaaaccccttctacaaaaaatataaaaaattagccgggcctggtggcatacacctgtagtcccagctacttgggaggctgaggtgggaggatcacctaagccagagaggttgaggcttcagagagcaaaattctccagcctgggcaacagagtgagaccctgtctcaaaataaaaaaattttttaaaaaaaatttctctcttctcgtcctcagtatctaaaatctcccaccaattcttttttaactttaacttcttttaagtttattaacactcctagatcccacagatgttgccctaaagtcattctgtttaacgcttaaaatagggtaaaaattagtcagattgttgccatcgtttttcaagctcaagttagatgttgcaggtacacttgtctcctttaaacatcatttatgatgtcattctttggagtgttactatacggtcagtaagtcctgtgaagaatggaacaccgctctgagagaacaaagacgtgatgtaatgcgggttgtgtatgtgtcttacggagagcctctgaagtgacattaaactgggagctaagggatcaatagtttaaacaggtggctagggaggggaagaacattccaggcaaagagaaccatgcaagaagagacccaaagacctggaaggaggagtgtggtagaccacagggtgcatctaagaaggactgagaagaggtggtgaacatggcctggctcagttatggcgttgaaggccctggtaaaaagtagatttatgacaaaaaattagccaggcatggtggtacatgcctgtaatcccagcttcttgggaggctgaggtgggagaatcgcttgagcccaggaggtggaggttgcagtgagctgagatagtgccagtgcactccagcctgggagacactgtgtgaccccatctcaaaaaaaaaagtagatttatcttcagtgggcagccattgtatcaaggaatggtgtgctctgattgacccagtatcactgtgactgctctgtagagagtgatttacaagtagacaaaaatgaaataggagatgggcttccaatttcaagctctgctctaggttttcattgttattaacataaaatggaacatacttgttcaacatttttcttttatgcaagtaagacataaaagtctcaaaaactcaaacaacacagtataatatgaaatcaaatcactttctatggactctgtacttatgtatgtacattacaagtatatgtattaaaattttatgagattacactgtgtatttttaatgtgctgttttatgcagtatgtgttagagcttttttctgccatgttaaatccctataaaaggaccccttttctcatgtcagtattttctcctaatgttatacactcattcttcatatttttttttcttcttcttcttttagacgaaggctcactctgtcgcccaggctggagtgcagtggcacaatctcggctcactgtaagctccacctcccgggttcaagtgatttctcctgactcagcctcctgagtagctgggactacaggtgcccactaccacaccctgctattttttgtatattcagaggagactgggtttcaccgtgttggtcaggctgatctcgaactcctgacctcaagtaatccacccacctcggcctcccaaagtgctgggattacaggcatgagccaccgtgcccagcctcattcttcatattattttaaacatttttttaaaagctaacatcacactttcattaaaatgcacctttcataaaattcctcccccattcattttcatatacctataatttctataaccactagccatttccaagtattgtatgatatggctgttgaagcaatatcctttaaaatccatttaatcatttcagcccatttcatgatttaacgctacaaactgccctgtttttcttttgtcatttttctttttcatttttgccattacttttgaaatttataaataaagtgatacactcacctgggtaaaacaagttgtgtggacagctcatagtaaaaacattcctgtttcctgactctgctgctccatcagccacagtgtggcttccaaaggcactcagttttcacctttctagctgttccatattgggtttgtcttcctactccagacaatatgtttacatattgttatttttctctctcatgtaaacaataaatgcattcacatggttaaaaaataaatataaaacgtgcacagtgaaaagtttctttcatgtctgtagctcttgtctatccaggttctggtcattggcctttaaaaagtgagctgtctcatgtaaatgtcatttcacaaattatgcctgaaaatctgaagagtaaaactctaagttggaatgctgagtgcatatatttatgacattgattgataattgtcaaaatgtctgtccttcgtatcagtttacattcacaagtaatgtgtgtcttcagacttcgggtttgtgctagtgtaacaggtggaaaatggtacctcagtatcctttaaatttagtgtattgtgatatactgttatttctcagtttatcaatattttgtaatttctattgacttccctatattatagatgaggatgtagcttttttatattacctccccaaatgcctagcttcccaagaatttatgttagagtcatgtcagtgatgaatgcttacattgctttgactttgtaattagttgttcactgtagagtcaagtagtacagtatgattatagttctttttaatttttttatttttcctctgaagctaatacttgctttttaaaaatatattttatttggggggttttgactccgtgctgttattgtagagttttgtttatttttttcttttatttttcaactatggttttggggtttgggggtttttgttttgtattttgtagagagagttttgccgtgttgcacacactggtctcgaactcctgagctcaagcaatcacctcacctcaacctcccaaaatgctgggattacagacatgaaccaccatgcctggcctaattatgtattgtattgacttcttggcttactgctatttcttgcagcatgtatcctttttcttaaattttaaaaaattttgctatagtatattcctgaatgattgttttagtaattgaatcttttcgtgtctgaaagagtgtctattttttcctcccactgaaatggttaattggctgggtaaaaattataatttcacaatgacttttaacccaaaatttgaagatattgaagatttgcaatattgccaattagttgttcagtgtcaatataattctcatttatttgcacataacctggcttttctgtttggaagcttttagcattttctgtttctttgtttgtttgtttgtttgtttgtttgtttgttttttccttgaagtcctgaggtttaaaagagtatgtttagtttggggtctttttacataccattttttagcatttattgggccctgaatcttgaattctaggaaacatttttttgttattatttctttgatcattttctctccctgtgttccatcttcactgtcctcatgcagctccttgaagatgggcttttacttttatctttctatttgtctgtcttttcatttgcattcttggagaattcctcaatcttccatcttagccatgtgttcattttactatttaactcatctagattgcaggcgtttgactaaaacagcctgacacatatctaggaaacaagtgacataacctatcatcatcttcagtcattttatttagaattattatttttcatagcaatatgtttatattttattattagattgtgtttaaatgtgatatcctctccagtttttctgggattttaattatgtaccttttaaattctgttggtctccttatatattttttcaaaattcttgtgttctcagcatgatattggagtgtgtcctcaacccatgcttgacccactttggcatgcatatgtgttttactttaggggacacttctgctgattgggctagggagggaggtaataagaatccagatggtggatattataggcctttttttttttttttttttttttgacagttggcagagctagctgaggttttattttgggaaaaagaaaaaatttgaattgttttgtagctggatacatgggcaaggggactacccaggcagtaaactggccccacggatgggctaagggctaagggctagggctgagcctcaggtgggcctcctattccctgtactcccctgcacagtggtgtaggccattttttaagtccacctcttttgccactgagttatctggggcatgccctgcttctttatttccagcgctgggctatcttccttgtcagaactcccattaaaaagtttagcttgaagttttatcctgggcacttatgttgtcaattacttcttttttgtaccttaatccattggtcattgtgtacgttcaacattacctcaacctctgcttctctcttcagtccagttaatattattagcagtctttctttggcagatcatttattttattcttgaggctttatatgagggcactgctgctagccatccaatatttctatttctaagaggaagagggtgggctgggagagtgctgctaacagcaaaaactagcacagctgttaggaatgcctaagttgaattaggaaatgtcttactttatcattgtttattattttctgagacatagactccagagaaatggggtcagtgctcccttactttgtaattattgattctgagtttggtaattgaatttctatgatttcttaggatgttttacccacgaagaagccttctgttatacataatttgagctgtacatttttttcccctagttcctccatcactcctaatccatctgctccttatcatttaggagttcctcaatgtttttattctgatgatatcagcctttctgttttcccaagagtattatggatttcttgtcatttcagtgtaatattaggctattcactctaattgtttaagtctcggggagggttttgtttttgtttttgttttttaatataccagtaagtctaaactctgtattcctagcacagttctctcacaggagttccagacctatatatatctcacagcttactgaccagtactgcaagaatgttccaccaacaccacagattatacaaggcagttctgctgccttccctacttcagcctcttcctgttgcatttcctatctgattatatagcaccaccataccgtcactcaggcaggaatcccaaggaacaggcttggtgcctcctttctcttctaggtttagtttatcatcacatgatctagaatgaatttctcctattctctccacaactatcatccttaccgtttttcttctgatttgctatggcagccgtctcgctacctaaagtcttgctttccagtggtgtttattgtcacaaagtcagtcatttcactctgaattaaaattctttaatagttttcaatcccttcagggtttagccccagggtccttattattagacactaagccctttgctctgtcctcttacttcccctccgtggcacattcttcaccactcttactgtttttatctccttcgtaagaagccgcttgtagttttctttaacatgtcatattttctctccacatttcacttccttttttttgtttgttttttgtttttcctgtcattttctcccagaaatcttcctaaacaccagggtctgagttgagtgttcctctgctgtgctttcgtggctggttaggcatacatctcttgtactgtattgtactatacattcatctacaccactcacttagtattatcattatttggtgtatttgtcttcccaggaagctttagcttgttaagcaaaaggatttatattttcttccttgtattccccacacctatgaaagcagaataccaattaaatgcaaatttacttaaaggaaagtaggctgggtgtggtgactcatgcctgtaatcccagcactttgggaggctgacgcggatggatcacttgaggccaggagttggaggccagcctggtcaacatggaaaaaccacacctctactaaaaatacaaaaattagctgggcatgatggcatgtgcctataatcccagctacttgggaggctgaggtgggaaaattgcttgaacctgggaggtggaggctacagtgagaccagatcacaccacggcactccagcctgggcagcagagtgaaactccgtctcaaaaaaaaaaatgaagtgagatgagatgaaatgttattgttagcaaggatataggacttacagccttctataggattagttagggaagactttccttggctatgcttaaaagccaagagaaaatttctgtcttgtacccagatacaaatgtacctgaccttaacccaaaggacatgactataaagacaagctgaactttttcctagttactaagacttcaggccttaggcactctcactctgaaatcttgaagtctaccctttgttcttaccactgaattgtctttgttccctaggagacttgaatgaaaattctgtggagaatcttcaacagaaaacacttcaggatctgttacatgagctttcctcctggctagttttggaaggcatggccagtacaattactggaagtcaggattgtattgtgaatcatcgaggggaagtggatggggagcctgaactagatatttccccttgtcaacagtggggagaagcatcttctcctatttccagaaacagggacagtgtgatgactcttcaaagtggttgtttcgaaaacattgaaagtgaaacatatttgcctttgaaagtctcaagccaaatagacacacaagactcttcagtgaagttctgtaagaatgagcctcaggatcatcaggaaagcagacgtctctttgtaatggaagaaagcactgagagaaaagtgataaagggggaaagttgttcagagaaccttcaagttaaactggtgtctgatggacaagaactggcctcgccattgttaaatggtgaggcaacttgccagaatggccagttaaaagaatctttggatcccattgactgtaactgcaaagacattcatggatggaaatcacaggtggtcagttgtagtcagcagagaggtcatacagaggagaaaccctgtgaccataataactgtgggaaaatacttaacaccagcccagatggtcatccatatgagaaaatccacactgcagagaaacaatacgaaggtagtcagtgtggtaagaacttcagtcaaagctcagagctactacttcatcagagagaccacacagaagaaaaaccctacaaatgtgagcaatgtgggaagggcttcacaaggagctcgagtctgcttatccatcaggcagtccacacagatgagaagccttataagtgtgacaagtgtgggaagggcttcaccaggagctcaagtctgctcatccatcatgccgtccatacaggcgaaaaaccttataaatgtgacaagtgtgggaagggctttagtcagagctccaaactgcacatccaccagcgagtccacactggagagaagccctatgagtgtgaggagtgtggtatgagcttcagtcagcgctcaaacctgcacatccaccagcgagtacacacaggagagaggccctacaagtgtggtgagtgtgggaagggcttcagtcagagctcgaaccttcacattcaccggtgcatccacacaggagagaagccttaccaatgctatgagtgtgggaagggtttcagccagagctcggatcttcgcatccatctcagagtccacactggagagaagccctatcactgtggcaagtgtgggaagggatttagccagagttccaaactcctcatccaccagagagtacatactggagagaagccctatgagtgcagcaagtgtgggaagggcttcagccagagctccaaccttcacatccaccagcgggttcacaagaaagatcctcgctaactgacattagcccattcaggtcttcacagcgctcatactgtaaaaactgttaaatatttagtatcactcttactttatattctacaaaggagagagatgtaagggttatttagatatgttccctcactgaaaaatcactcattcaaaatatttaagtatcaagcactttgttatgctgtacaatgaatggattgttcttgtttctcagatgggtagagtaaaagtgtctgtactttacaattcaactacttgttctacccagcattttaacggcaagaactttatatttattctcaagcagggcatgtttccctttgttcacattctctgagaaattgaaactctggtttctcttcaaattttgtgccttgtgtttttcatacttctttccagtcctgattagccccctctaaactatgattgtacactgcgtccattttaggccaagagggcagttggaaatacaatggacatggaaattattgtgtttattgcaaaaagatataatagtttgtagccacacaacaaaaagctggaagagagttactcatgtagtacattcccatataccattttgataggaagttgaacagcccctcccaggcaactattcaggaacataagtagtcctttttggtgagtacagctagtttattgggatacttccagagtgaatgtgaggaagggtccaaagtaacatgcctggcactttgggaggctgaagagggtgcatcacttgagcctaggagttcgtgaccagcctgggcaacatggcaaaatcttgtctctataaaaaagtgcaaaaattagctggtgtgctggcacagacctgcagacccagctactcaggaggggtacctgagagcaggtgataataacaaataggttccagaggcagagctggaaaaatgaatacataaggagcagggggcagcttagaggctgcagaaatcatgttggggcttgataagctaaaaatggctagcacagaaagtattcgagaatgcacttttgttaaacatgtctcatcacattggacaacattaagatgcgaggaaaatttaatttatcaaactacagcaataaggagaataggagaaagactatcagcaaatgaaaatttgaaagatggaaagatagccagtagagcagaagcaggcacagttatgctgcttgcatatggggataaggaaaagaaggaaccaatttggcaccaggctcagaaatgcttagtaccttggaagatgggagtgagatgtgaagagaaagcaatgaaactaatggccatttgtatatggaacatacctcctcattacataaacacacactgctccccaactcctgtacgtggctgaccagaggtttaacgtccagcaagaaatgggaagtttcttctctgcagaagttgaatggccccaagggaaagacctctgtattatgggaattcgggaatcctacagcaaagctactttctagcttaagtacacataaacagagcttcaaaattcatgaaataaaaactggcaaaattgaaagaggcacaatttcaattataattagatagttaaataagtaattgatagcacaagtcacttaggaggtataagccttgaacagcactatcaactaacttgactaattggcatttgtagaacactcattagcatgatatattaatatatttttattttttagggacagtgtgtcactctttcacccaggctgaagtgcagtggtgcaatgagttaattgcaaccttgaattcctgggttcaatcaatcctcctgtctcagcctccagagtagctaggactataggcatgtgccaccacacccagctattttttatttttgtagggatggagtctagctctgttgcctaggctggtctcgaactcacaggctcaagcaatcctccctccaggacctcccaaagcactgggattacatatgtgagccactgtgcccaacctgtatacattcttttcaagtgtgcctactatggactgtaataaaacagtcttaaaattttttaaagaatgaaaaccatacaaggtatattctctcaccaggacagaattaagtaagagaccaataacaaagatgtctgaacaatctcttagtatttggaaattaaacaacatactcctaaatgagcaataaagagaaagtaagaaaaatttgaaaatattttgaactgaatgaatatgtcagaatttgtgaaatgtagctaaagcagtgcttagaggtgaaatcagagataaagatttcaattcgatagtctaaacttccaccttacgaaatgagaaaaagaacagaaatcatccaaagcaagtagaacaggagatgatacagagctaaaagtcacaaaaatcacaagtggacaaacaatagagaaaatttaatggaaccaaaacctaactctttgaaagggttgaaaggattcctgtatcaggaatgaaagagtaaatatcactataggtcctatacaccaagaaggtaatacaggaattttattagtaacttaattccaataaattcagcaacttaaatgaattggaaaattttatcctaaggactatagaaccaaagcccacttgagagaacttgaatagtcctattaaattgaatttttagctgataaccttcccccaaagaaaagtcatgagaccaacattacccagataccaaagccaaaaaggacatcataggaaaaactcatagatcaatatctcttaatatagatgtaaaaatcctttttaaaataccaagttgaacacagcaatctataaaaggaaacacatatggccaagtagggtttatcctagaaatgcaagctttaacattcaaaaagcaatgtttcatattaatattaaaaagaaaaaccacataatttttttaatgtaggaaaacatttgaaaaaatttaacacccattcatgataaaaccgctcagttgattaggaattaaattgagtttcaagaatctaagaaagagcatctatgggagaacctacatctgacatcgtacttactggtgaagtaaaaagcacttttctcctaagattggaaacaagagaaagatgtctagtcaccacttccagtcaaccttgtagtggatgtcctagccagtacaataagccaataaaaaagaggctgggtgtggtagctcatgcctaaaatcctggcatttttgggaggccaaggtgggaagattgcttgagcttaggagttcaagactaacctggacaatatagtgagacctcatttctaccaaaacttaaataaaaattagccaggcatagtggcatgtgcctgtagtgccacctactcaggaggctgaacaggaggatcactggaggcccaggagatcaaggctgcagggagctgtgatcgcaccactgcactccagcctgggcgacagagtgagaccctgtctcaaagaaaagggatacagaatgtgaaagaaggcatgagactgctgtgacatgattgtctatatggaaaagcataaagtgtctgaaaatgtttttaaaactagtaagtatgtttagcaaggtcacaggatacaagctcaatatttttaaaaagttgaaagtatgaaaacggcatcaaaattatgaaatgtagggacaaagttactagacctgtactaaagctacaaaacatgtactaatgctagaagaaagtaaataagtcctaaaaataaatagatacactgtatgcatgagttataaacctcaaggacctacaaagtcaaaacaattttttaagatttttttcttcttctttgagatggagtctccctctgtcacccaggctggagtgcagtggcacgatctcggctcactgcaacctctgcctcccgggttcaagtgattctcctccctcagcctcccaagtagctgggattacgggcgtgtgccaccacatccagctaatttttttttgtatttttagtagagacgaggtttcaccatgttgaccaggctgatcttgaactcctgacctcaggtgatccacctgccccagcctcccaaagtgctgggattacagacttttttcaaaactaaagatatagtgatcaagatagtatggtactggatctaggctacacatacaggtaaacagaattggactcacccatatattttcaagtggttttcaacaaagatgcaaagataaagggaaaagatagagttttcaacacagttctgtaacaattgaatctttgtataggggaaaaatgagtaatataagcatgaaaaccataaagtgcctagaagaaaatcttcattaaagaggacatgaaaaacgtaaatcttagaagaaaaaattaagttgggtttcatcagttttaaaacttatgttgtttgaaacttcatatcaagaaacgaaagttatggagtggggggaaatatttataggacaaatatgtgatgaagaaggacttatatacagaatatattaaagactcttacaacccagtaattcagaaaaacattcaaaactggacaaaaggccaggcacggtatctcacgcctgtaatcccagtactgtgggaggctgaggtgggcggatcacctgaggtcaagagtttgagaccagcctgatcaacatggtgaaaccccgtctctactaaaaatacaaaaaaaaaaaaaaaaaaaaaaaaaaaaaaaaaaaaaaaaaaaagctgggtgtggtggcggtcgtctgcaatctcagctactcaggaggctgaggcaggagaatcacttgaacccaggaggcagaggttgcagtgagccaagatcgcaccactgccctccagcctggacaacaagagcaaaattctgcctaaaaaaaaaaaaaaagaaaaagaaaaagaaaaaaaactagacaaaagaatgggcattttatgaaggaacatatgcaaatggtcagtaagcacctgaaaggatggtcaatatcattaatcatcagagaagtacaaattcattttatgatgccaatattttcctaataccaaagttgtcagacagtagtactaagaaaactgggattacagttttcattacattacattacataccatacccagcccaatatccttaatattgaaggatacaggatacagatcaatacccttcatatcctgcatacacaaagtcctcaaaaaacattagcaaattgaggctgggcatggtggctcatgcctgtaatcccagcactttgggaggccgaggtgggtggatcacctgaggtcaggagctcgagaccagcctggccaacatggagaaaccccatctcttttaaaaatacagaattaaccaggcatggtggcacatgcctgtaattccagctactcgggaggctgaggcaggagaatcgcttgaacgtgggacgtggaggttgcagtgagccgagatcgcaacattgcactccagcctgggcaacaagagcaaaactccatctcaaaaaaaaaaaaattagcaaactgaacccaaaaatatatcaacagaatcatgcactacaactaagtgaggcttattccacgaaggcaagaatagttcaatatattaatccaccatattaataggccaatgaagcaaaagcacatatcaaataatgtaggaaaaaatgtgacaaaattcaacacccattcatagtaacctcaccaagctaggaaaagagagaaacctcctcagctttacacagagcacctaaaaatatgtacagttactatcatacttaatggtaaaaaaaaaaaaaaaaaaaaaagcagtgctttcttcataagattgggaacaaggcagggattccactcccacagctcttattcagcatagtacacgaagtcctagtcagtgcaataaggcaataaaaaggaaaaagacatatagatttttaaaaactgtcactgtttgcaaatgacacaattatctacacagaaaattcaaagggatacatgcatacacacacgacgagaataaatgagttcatcaagatcacagaatacaagatcagcataccaatatcaactgcatttctgtgtgctagcaatgattatgtgaaaactgaggttaaaggctgaataccatttacaatcactcaacaataaaaaaattacttaggtataaatctaataaaacatgtataggacttgtatgctgaaaattacaaaacactaataaaagaaatcgaagaagatctaaataagtcgagacatacatattcattgatatttgagatgtcagttctcttcaaactgatctgtagttttaacataattcctatcaaaatctcagcaagatttttttgttgatgtatgcaggcttactctgaaatttatatggcagggcaaaggaactgcaaccactgaaaatgtttttgaaaaagaatacaatgaaagaaatcattctacctgactttaagacttccttatagttaaaaaacaatcaaacagtttggaattggcagagataaaacagtttaatggaacagaagagagaatccagaaatagacccacacaagtaaagaaaactagtttttgataaaagcgcaaaagcaattcaatggagaaaggacaatattttaaacagtgctggagcaaatagatagccataagtcagaaaaaaaaaaaacttcaacctaaacctcacacctaatacaaaaattaattcaaaatggatcctggttttaaatttaaaactataccacttgccgaagaaaacactggagaaaatctttagtacataagctaggcaaagagttcttgacatattaaaatcataatgcataaaacaataaatggaaaaaatagaattttatcaaaatttaaaacgtttgcactgtaaaagaccctttaagaagatgaaaagaaggccgaggtaggcggatcacctgaggtcaggagttcgagaccagcctggccaacatggtgaaactccgcctctacttaaaaaaaaaaaaaaaaattagctggacatggtggcaggtgcctgtaatcccagctacttgggtggctgaggcaggagactagcttgaacttgggaggtgcaggttgcagggaggcagaggttgcagtgagccgagatcgtgccactgtactccagcctgggtgacagagctagactctgtctcaagctacatactggaagaaaatgtttataaaccatatctgacaaaggattgtatcaagtaagaactttcaaaattcaacagtaagaaaacaaacaatccagttagagaatgaacaaaagatacaaagacacatttcactaaagtgaagatacaaatggcagataagcacataagaagacgtcaaacagccattagagaaatataaattcaaaccagaatgagttatcactacacacatattagaagagataaaatagtaaatataacaaatgcaggcaaggatatgaaaaagtggatctcagccaggtgtggtggctcacccctgtaatcctagcactttgggaggccaaggcaggcagattacctgagatcaggagtttgagaccagcctggccaacatagtgaaaccctgtctctactaaaaatacaaaaattagccgggtgtggtggggcatgcctgtagtcccagctactcgggaggctgaggcaggagaatcacttgaacccagaaggcagaggccacagtcagccgagatcgtgccactgcactccagcctgggtgacagagtaagactctgtctcaaaaaaaaaaaaaaagaaaagaaaagaaaagaaaaaagtgcatcttgagaaattaatggtaggaatgtagaatggcatcccactcccgaaattagtttggcagtttctttaaaatgtaaacaaacactatatgacccagcagttgtacccttgtgcctttttcccagagaaattaaacttatgttcacagaaaacctatacataaatgttcattacacctttcctcatagtagcccaaaactggagataacctaaatgtcctacattgtagagtttaaaatattgcagaacatgcaccaatagaacatgcaccaatagaacacacagatgaatcttgtaacgtgcataaacagaacacacagatgaatcttgtaacacgcataaatagaacacacagatgaatcttgtaacgtgcataaatagaacacacagatgaatcttgtaactgttatgctaagtaaaaaagccaggcaaaaaagaatacacactgcatgattacaattctacttttatgaaactgtagaaaagacaaaactagtgataagcagcagaccagttgttgccagtgggtgggggtgtgaaaaagaaataattacaaagtggcataaggacatttttgcagtgatggaaagattctatatcatgtcaacaaactacagtgcacaggcccaattcagcctgccacctggttttgtaagttttattggaataaggatttgttcatatatgtattttgcactacagttgcagagttgagtagttgtgacagagactggatgtcatgcaaaacttaaagcatttactatgtggccctttacagaaaacgtttgccaaccgctgcaatatatgtttgcggtggtggtaacacagatgtatatatttgtcaaaaattccttaaattgtccatttaatgacattggcagatattattgttcataaattttaattcaataaagctaattttaatacctagtacttgcatgacactttttaaatccatttagcctgtataaaaacttgcagagaaaaaaaaatcagtctaacagccacattcataatatttaaatatgtataataaactggacatttttaatcaaactttttttaggcaggagatttttattcatactctatgactttaatttctaagtaaataaaaatgcaactgaaaaaaaggaccagttctgctgaagaggtaacacacttcaacccgtctgtgccacaagctcaatggatttgtctagtaaataaatgcataggaaagtttcttcttaaaagccctttggagccaggcatggtggctcacacctgtaatcccagtactttgggaagctgaggcagatggatcacttgaggcaaggagtttgagaccagcctagccaacatgacaaaaccccatctctacttaaaaaaatttttttttttttttttttttttttgtgagacagagtcttgctctgtcgccaagctggcgtgaagtgatgtgatctcagctcactgcagcctccacctcctgagttcaagcgattctcctgcctcagcctcccaagtagctgggattacaggcacgtgccaccacaaccagataattttttttttagtagacatggggtttcaccatgttggccaagctggtcttgatctcctgacctcgtgatccacctgtcttggcctcccaaagtgctggaatcacagatgtgagccactgcgcctggccaaaaatattttaaacattagccaggtgtaatcccagctcctcaggaggctgaggcacgagaatcgcttgagcctgggaggcagaggttgcagtcagccaagattgtgccactgcactccaacctggataacagagtgagactctgtctcaagaggaaaaaaaaaaaaaagccctttggggccaggctcagtggctcatgcctgtaattccagcacttttggaggctgaggcaggaggatcaccagagcctggaacttcaaagtgggcagcaaagtgaaaccctatctctacaaaaataaaaataaattagccaggcgtggtggtgctcacctgtagtctcagctactcagaaggctgaggtgggaggatcgctcaggcctggcaggttgaggctacagtgagctatgattgcgccactgcactccagcacgggcaacagagtaagaccctgactcacaaaaaaaaaaagaaatgcatgatttccttccacctctgcatccaatatgcctagatgtagtattagtttaaatctattatcagaactttgctgaatgcagcaaaaagaaaccaatattcaattttcaaattttcctaccatttcagtggtgtttgcctaagttttcaagatttcagtatctgtatccttccttccaaagccctaactccaataataagccaattatttggaggacctcacttttttggggggggcggggggaaggagtctcgctctgtcgcccaggctggagtgcagtggtgtgacctctgctccctgcaagctctgcctcctgggttcacaccattctcctgcctcagcctcccgagtagctgggactacaggcacccgccaccatgcccagctaattttttgtattttttagtagaaacggagtttcaccatgttagccaggttggtctcgatctcctgacctcgtgatc

SEQ ID NO: 364 - DNA, 1987 bp, Homo sapiens
atctggcccctgcaggcgtggggttccacgtgggaggaaccagttacattcaaggatgcctctgtggccttcaccgaggaggagtgaggtcacctggactctgctcccaggaagctgtgcggagctgtgatgctgggcaactacagaaacttggtcttggagacttgaatgaaaattctgtggagaatcttcaacagaaaacacttcaggatctgttacatgagctttcctcctggctagttttggaaggcatggccagtacaattactggaagtcaggattgtattgtgaatcatcgaggggaagtggatggggagcctgaactagatatttccccttgtcaacagtggggagaagcatcttctcctatttccagaaacagggacagtgtgatgactcttcaaagtggttgtttcgaaaacattgaaagtgaaacatatttgcctttgaaagtctcaagccaaatagacacacaagactcttcagtgaagttctgtaagaatgagcctcaggatcatcaggaaagcagacgtctctttgtaatggaagaaagcactgagagaaaagtgataaagggggaaagttgttcagagaaccttcaagttaaactggtgtctgatggacaagaactggcctcgccattgttaaatggtgaggcaacttgccagaatggccagttaaaagaatctttggatcccattgactgtaactgcaaagacattcatggatggaaatcacaggtggtcagttgtagtcagcagagaggtcatacagaggagaaaccctgtgaccataataactgtgggaaaatacttaacaccagcccagatggtcatccatatgagaaaatccacactgcagagaaacaatacgaaggtagtcagtgtggtaagaacttcagtcaaagctcagagctactacttcatcagagagaccacacagaagaaaaaccctacaaatgtgagcaatgtgggaagggcttcacaaggagctcgagtctgcttatccatcaggcagtccacacagatgagaagccttataagtgtgacaagtgtgggaagggcttcaccaggagctcaagtctgctcatccatcatgccgtccatacaggcgaaaaaccttataaatgtgacaagtgtgggaagggctttagtcagagctccaaactgcacatccaccagcgagtccacactggagagaagccctatgagtgtgaggagtgtggtatgagcttcagtcagcgctcaaacctgcacatccaccagcgagtacacacaggagagaggccctacaagtgtggtgagtgtgggaagggcttcagtcagagctcgaaccttcacattcaccggtgcatccacacaggagagaagccttaccaatgctatgagtgtgggaagggtttcagccagagctcggatcttcgcatccatctcagagtccacactggagagaagccctatcactgtggcaagtgtgggaagggatttagccagagttccaaactcctcatccaccagagagtacatactggagagaagccctatgagtgcagcaagtgtgggaagggcttcagccagagctccaaccttcacatccaccagcgggttcacaagaaagatcctcgctaactgacattagcccattcaggtcttcacagcgctcatactgtaaaaactgttaaatatttagtatcactcttactttatattctacaaaggagagagatgtaagggttatttagatatgttccctcactgaaaaatcactcattcaaaatatttaagtatcaagcactttgttatgctgtacaatgaatggattgttcttgtttctcagatgggtagagtaaaagtgtctgtactttacaattcaactacttgttctacccagcattttaacggcaagaactttatatttattctcaagcagggcatgtttccctttgttcacattctctgagaaattgaaactctggtttctcttcaaa

SEQ ID NO: 365 - protein, 456 aa, Homo sapiens
MASTITGSQDCIVNHRGEVDGEPELDISPCQQWGEASSPISRNRDSVMTLQSGCFENIESETYLPLKVSSQIDTQDSSVKFCKNEPQDHQESRRLFVMEESTERKVIKGESCSENLQVKLVSDGQELDLLNGEATCQNGQLKESLDPIDCNCKDIHGWKSQVVSCSQQRGHTEEKPCDHNNCGKILNTSPDGHPYEKIHTAEKQYEGSQCGKNFSQSSELLLHQRDHTEEKPYKCEQCGKGFTRSSSLLIHQAVHTDEKPYKCDKCGKGFTRSSSLLIHHAVHTGEKPYKCDKCGKGFSQSSKLHIHQRVHTGEKPYECEECGMSFSQRSNLHIHQRVHTGERPYKCGECGKGFSQSSNLHIHRCIHTGEKPYQCYECGKGFSQSSDLRIHLRVHTGEKPYHCGKCGKGFSQSSKLLIHQRVHTGEKPYECSKCGKGFSQSSNLHIHQRVHKKDPR

SEQ ID NO: 366 - DNA, 2389 bp, Homo sapiens
ctagtcccgattatggttattacagtttgatgaaatgtggctgagatcattggcactgtggagattaagaaatgtgaggtcagagtgttgggtaaattgttcctgcgagtgttaaggttgtcaggataatggtgggaatggggtgaagatgacaactcagcaatgacacaagaagagagtgacacagaaagattcagtagctgagaacttgagcgtagatatgttgtgggcaggagggaaatgatttggatggaagtagccaagtaagtgagaaaggaaagactttccaacaaaacttggcttagctcactcagatccctgagctgcaaacttcttctatacctttcttaccttttccagtgctgctgacttcaccccacttgcagggcatttgtgcagatggttgtttgttgaggaggaatgtgcttaatgttttaggaaccagttacattcaaggatgcctctgtggccttcaccgaggaggagtgaggtcacctggactctgctcccaggaagctgtgcggagctgtgatgctgggcaactacagaaacttggtcttggagacttgaatgaaaattctgtggagaatcttcaacagaaaacacttcaggatctgttacatgagctttcctcctggctagttttggaaggcatggccagtacaattactggaagtcaggattgtattgtgaatcatcgaggggaagtggatggggagcctgaactagatatttccccttgtcaacagtggggagaagcatcttctcctatttccagaaacagggacagtgtgatgactcttcaaagtggttgtttcgaaaacattgaaagtgaaacatatttgcctttgaaagtctcaagccaaatagacacacaagactcttcagtgaagttctgtaagaatgagcctcaggatcatcaggaaagcagacgtctctttgtaatggaagaaagcactgagagaaaagtgataaagggggaaagttgttcagagaaccttcaagttaaactggtgtctgatggacaagaactggcctcgccattgttaaatggtgaggcaacttgccagaatggccagttaaaagaatctttggatcccattgactgtaactgcaaagacattcatggatggaaatcacaggtggtcagttgtagtcagcagagaggtcatacagaggagaaaccctgtgaccataataactgtgggaaaatacttaacaccagcccagatggtcatccatatgagaaaatccacactgcagagaaacaatacgaaggtagtcagtgtggtaagaacttcagtcaaagctcagagctactacttcatcagagagaccacacagaagaaaaaccctacaaatgtgagcaatgtgggaagggcttcacaaggagctcgagtctgcttatccatcaggcagtccacacagatgagaagccttataagtgtgacaagtgtgggaagggcttcaccaggagctcaagtctgctcatccatcatgccgtccatacaggcgaaaaaccttataaatgtgacaagtgtgggaagggctttagtcagagctccaaactgcacatccaccagcgagtccacactggagagaagccctatgagtgtgaggagtgtggtatgagcttcagtcagcgctcaaacctgcacatccaccagcgagtacacacaggagagaggccctacaagtgtggtgagtgtgggaagggcttcagtcagagctcgaaccttcacattcaccggtgcatccacacaggagagaagccttaccaatgctatgagtgtgggaagggtttcagccagagctcggatcttcgcatccatctcagagtccacactggagagaagccctatcactgtggcaagtgtgggaagggatttagccagagttccaaactcctcatccaccagagagtacatactggagagaagccctatgagtgcagcaagtgtgggaagggcttcagccagagctccaaccttcacatccaccagcgggttcacaagaaagatcctcgctaactgacattagcccattcaggtcttcacagcgctcatactgtaaaaactgttaaatatttagtatcactcttactttatattctacaaaggagagagatgtaagggttatttagatatgttccctcactgaaaaatcactcattcaaaatatttaagtatcaagcactttgttatgctgtacaatgaatggattgttcttgtttctcagatgggtagagtaaaagtgtctgtactttacaattcaactacttgttctacccagcattttaacggcaagaactttatatttattctcaagcagggcatgtttccctttgttcacattctctgagaaattgaaactctggtttctcttcaaa

SEQ ID NO: 367 - protein, 456 aa, Homo sapiens; identical to SEQ ID NO: 365

SEQ ID NO: 368 - DNA, 18229 bp, Mus musculus
tccgggtgcctcggccggtcggacggtgcggcccgcgacggcgagcattggagcctgggggcgcggggtcgaggcccgtaagtccccgccgctgcggtggcctcgtgggacggggtcgaggctggggcgacggggctgggggcgcggggcgctgggcggggacgggcgcggccggggagggggctcaggtgacacgagctgggatcgggacccgcagctggcgcctgaccgggggtgtgggtcccggtgtacggtggaaggcgtccccgctgtccctcgtcaggttagagttcgggtctagccgtgtttatgatgcgctccccgtgctccccaggggtccaggcccttttgtagagctgctgttggcgggtggtgtctgagctgccgtccgctggaggggaagcccgagccgaaagcagcgtttcgagtgggaaggcaggacacagcctcctcttggactccagacacacctcggggggtggccccgggggcctggcccttgtggagccgtcgtgggcccatctgctctagatagggcctgaggcgtgcgttgggaaagtctggcttcccgaccacagttctaatcttctgtccatcagggaagctgctggtcaccatggcaatgcgggagctggtggagggcgaatgtgggggtgccaacccgctgatgaagctggccacccatttcacccaggacaaggcccttcggcaggagggactgaggcctggcccctggcctccgggagcctcagcagcagagaccgtgagtgttctaggagagcctatttcttccacctgacagctgctttctctgtgttaaagtaatagcagtcaccattcagtaacactggagtgagccttgtgcggctttacacagacaaggactactattttatagacaaagaagctgaggctttgtgaaggctcttgacttgcctcaggccacctaagcagtagagttagagttgggttgtagcctgctattgtctctttccttcttatcttaggtttccaagcctttgggagtaggaactgaagacgaggtaaacagagcaagtttcttttctgtctttttttttttttgggggggggggttgtggtgatttttttttttttttaaatcagtccactcatacttcagtctttgaactctctttaccaaatgagattgcctgccaatgttttcgtctactttttggggtatttttctggtttccaaatttacagatagatttttttttttctttatttatctccagttttcgtttctctgtccaacatcagtgggccctgcctctggctgaggccctctgatcctaatgttcatccgaccatctctctgtaatagttggtgtcagaattcctgcaggaccagaatgcaactcttgtatcccgagcccctcagaccttcaagatggatgacctcctggcagagatgcaggagattgaacagtcaaactttcgccaggctcctcagagaggtgggttcagggcctggtaagacgggaagaggccagagggcttccatccttgggttttgctggcatcgggggactgagatgctgaggagaaaaaggaggtgttgcccatgagtgagtgtgaaggaacctgttttctttttttcttagtcttctcttgtctcttttaagcccctggtgtggcagatttggccttgtctgagaattgggcccaggagtttcttgcagctggagatgctgtggatgtagctcaagattataatgagaccgactggtcccaagaattcatcgccgaagttacaggtgaggcttgtggggacatctgtagtagttgttagggagcatttacatgtcctgtgttgctgggcgtcctgattcctcttgggatggaaggtgattttcgctactaatgacttttctagtttcttgattcatttctgtaggatgttaaatgtgacttcttataacaattgtaggtaatcaaaacataataaagagaaaagtgggtttggttggaaaaaaaagagagggggtggagagggagagagagaatatgaatgagagattagatctgcctctttatcagtaacttgactgcttaagtctagtggagaggagctagagattggatgggtagcccaggaagagagcagtattcatctcggcacctaggactctggcaattcaaccatcttgagtaggactggggtctgagaaaattgattgtggagttcagaaccctgaagtctggctaggctgcctgtatatatattggcttttcatttgtagattgaacaaactgtggatagaaaatggaaaatgtatgtctgcactaaacgtatacatgctctttgagtttttagacaggatctctgtagtccagactgtcctccaaattccagtgtaactgagatcttcctgccctcgcctcctgaatgttgggactacaagtatgaaccactatgcctggccatgtgtgtgtgtgtgtgtgtgtgtgtgtgtgtgtgtgtgtgtattcactatttcctaattgatataattgctatatatgtaacatttacattatatagggtattataagtcatctagagatgtcagaataatgggaggatttttgtgggttatatgtaaatatatcatttcacgtaagagacttcagtcttcagaactttgtatctgtatgggttttagaaactaatttctttatggatggtctttgagggtaaagatcatctgtaacaatagaaataatatcagcttctctgtgttaagtgcattgaatgtgttgtttacttatctctgcaagatcccaagttctagctgttgtttttaggaccattttctagataagaatactgagtttatgacttgcttaagataaagcagcattgtgagtgacttggtttttggttttaatgttttttctttttaaagatttatttattttatttctgagtacactgttgctctcttcagacacaccagtagagggcatcagatcccattacaggtggttgtgagccactgtgtggttgctgggaattgaactcaggacctctggaagagcagtcagtgctcttaaccactaagtgatctctccagcccaatttttttttttctggtttttcgagacagggttcttctgtatagccctggctgtagaccaggctggcctcgagctcagaaatctgcctgcctctgcctcccaagtgctggataaaggtgtgcgacaccacacctggttcattttttttttttttaagtagaatatctttttatttttcttaggcattttatacatgttaacagtaagtctcacagcaccccactccagcctctggttcccacattctttccactcactcttctgagacatcccctttggcaaggtggggtgagcgagacgtcccgtttagtgctgagtgtgcgacggtcccttagtctcagcactctgacactgcagagaagtgcctctggcccgggttgggggcagcgctgatctacagataggagcacagtggacagtttgacagtctgttgtctaggtttctccttaggtgtcactgggaataactctgtggacggagctgttactctgttcagccaggccacacgcttaagagtcttagcccaatgtgtgtctttggggccatcctcggctactgcctccctgtgcgttgatttttcttccccaagcctatctaattagtgtaagaggggaggaccaagtcagcctccctcttcctgatgctcacagagcgaagcattgtttgcccctttccaagtatgagaagagacacatgtggagaaagttacaaaagttctaggccaggctgtcacacggtctgactagccaaggtctgagataatggacttaagatggtttctcctctcagccttttttctcctgcaggaggaactcctagcacccagtaacttagtataagccgttataggtgatttcacaaataccctttccttaagtaagaagggtggacagtgtttctagggtttgctattagtgctaagcgctttctgctgggctgcgctttgtacagggttataagccttctacagagagtgtccctaggagacgtgacattcaaaagtcatgcctgtttgtattcaggtgcttttcaaactattattctaaactctcaggtcctcccagtggaatgccttgtgctcaaatctgagctatccaaagaccctctgctggacagaacccttcaggtttccacacaaaccttaagcttaagtgattcgtcttagtccagagagacttctcttggaatgggtgggctttagttcattctccataatttaaagctaatagacaaaaacccaagtcctttatgcagctaagcagtgtgctaagctaacccctgattttattataattaattgtttcctgctggttaaatcttctctaactcacaaatgaataaatgtagctttagaaaaaaacatgtttgacctgcctcacctgtccggttgtctttggcgaacacattcttttgcaactatgcctgcttcacagagtcccggatgtgggtgcctggggctgagatgtgtgaaactgggctctgtaaagttgttctgttgtagtaggcctttggtagtgaataaaagaatgcattgagatttggggaacagagctaaagaaatagatttcctaggaatttgtgttttatttattaaaaggatttatttttattttatgtatattggtcttttgcctgcatgtgtgtctgtatcattatgtatgcattacttgcagaagaaaagggtgtcaaggttgagactgttgttagctgccagttggggttttggaattgaacccagggcacctggaagaacccttaaataagccagttcccctaatcactgaaccatctcagcaaccccagaatccatgttttagaaatagctttctcttagtgtttgtggctgttttagtacttgtttttttgggttttgtttttgtttttgtttttcgagacagggtttctctgtatagctctggctgtcctggaactcactctgtagaccaggctgtccttgaactcagaaatctgcctgcctctgcctcccaagtgctgggattaaaggcatgagccaccactggcccgcaactgttttttaattgataagtagatttgacaaaatatactttttaaggtcttattaattaattaagttttggtgtttgtgatatctcactacaaaatatactttttaaggttttattaattaattcaggctggcttgaatttgtggctgtttctgctgaatgttgggattactgatatgaatctttatgcctggtttgtttgtttgtttgttttgaaaaggtcttaatatgtaacctgggctggctttgaactcacagtcctgtctctgtatcccaagtgctgggattataggcatgctttgtagattcttcttatattttaaattcccatgtttaatattctagaattattcaagaggagccttgaagctcatctttttattttagttgtttttaatatggaaaaatttacagtcttactggtaagtgtgaaacaataaataaaaaggaagccgagaggaaagctgtgtgttactgtctcccggattctccccgtggtgatgaggagattcactctggtacagtctacagagctctccggcttctccaggtttctgtgccattatctgtatgtgaagagttttacgtaactttgatgtgtagaaagcaccatcccaagaattagtccatcaccatacaggacccagcccccctttttggtctgttgtacttctgatagaatcatctgttatgttttctggccagtctgcatcttgtgtttacctcgatcaggagatgaaactcagccctcaggtagcctgaatttagacagtttcagttgacgagagagaatgtgtgtctgtgtgtgtgtgtgtgtgtgtgtgtgtgtgagagagagagtatgtgtgtgtcagggggcggggagggggagagggagaggatttttttagagtggcttactggctgtggtccagctactccaccactggctgtctaccaacaggagatccgagaatccatggttgtttagttcatgagggtcgatgtctcagctggtattcagtatatgacgatcctaaagaagtagagtctgatgcctgtgtaggaatggacttgccagtgagatagagagcaaatggacaaagagcaagcttccttcttccatgtctggaatagactgactgctagccgtaacatataggctgccagccgaaggtgtggcccatctcaaaagatccagattaaaagtgggtcttcccacttcaaatgacttaattaagaaaataatctcttaccggtgcagccagctgcttgggttttagttaattccaaatgtagtaaagttgacaaccaggaattgcatcaccgtgtgaggttcataagcagctatggaatacaaacttggagtgttaaagttgtaggaagcagctgtagcggaaggtggttggtgctgacgtttccatgaacagaggaagaagaggtgtggatgaatacagagagtaccagtctcctatgatgtcctggaaggttggccctctgcagatggtgacggcagctgctcccttttgttgctatgttttatttttgcagaaactccatgaactgtctgctatggtctgttttataggtaaagaagtggaaaattacaagttaaaataactactctgaaatatacagtgaatgatgggtggcgttggggtttggatgtgggtgacactaggctcaggttaggctcagcctaggctcatcctagaaccttcttcattccatcccacagaactcatgcttagggtcgggagttctgagtcttcgacatttcaacttgtagtagatgtactcacatggcacagacaaggcacagtgtgaagtggtgtgatgtacacatgaatgggctgtcactggctctaactctgcttgttgtatgtgacctaagactttatctcctctggcttttattgcttcagctttaggcatgtctaaatcgatctggttttctgtagagatttctcaaaaaatgcgtgaagccatatgttctctgggttatttcatcagttcccttgtggaggcaggttcccagagccagaaaatgtcgggccttgagagcctgagccaaactgttaggttgttgttgctattactgttttgaggtgctggggactgaattcatgcccttgtcattgtgaggcagaaatgtaacactgatgctcatttctagccctgaattatagcaatttgaggataatgtttttcacctgtgtgtctttaccccctgatgtgtggcatgtatgtgtggtaatggtatatataaggtaatgatatgtatatggtaaaagtgtatatatggtaatagtgtgtgtgtggtaatggtgtgtatatggtagtggtgtggtaatggtctatttgtggtattggggtatgtgtgctaatggtgtgtgtatgtggtaatgatgtatatatggtattggggtgtgtgtggtaatggtgtatatgtgttaatggtatatatatatatgatattggggtgtgtggggtaatggtgtgtgtgtgtggtaatggtgtatgtgtggtaatggtgtatatatggtattggggtgtgtgtggtaatgctgtatatgtggtaatggtgtatatatggtaatggtgtgtggggggtaatgatgtgtgtggtaatggtgtgtatatggtaatggtgagtaggtatatgtggtaatagtgtgtgtggttatgtgtatatgtggtaatgataataatggtgtgtaggtatatgtggtaatggtatgtatgtggtaaagtgaagaaactttgtttttgttttttttcctattgttttttgttgttgatgagaacattctgtagacattgtttgtgtctttgtggccttgagctcatcatggcagagtgagagtaaggaggaagtagaggggaaataggaaggactggttattcttcaacagatctggactaaggagccaggagatgttattgaaatcaattttgatattaaacatttgtttttcaatcttcacatataagccacagtctggttagctagaggacctggagggcagaacctgtagttgagtgtccctgaattaaacacaggatttgtaaacccaaacaattgccaactgtatttttttattatgctaactatacatgacttattcataatcaggtgtgcatgttctgagacccttggttcttgttttatttttattttttttaggttttgacattattttctcagattttgagattgcttcattgaaattattcaggtcaagtcttgggtgcagtggggtgtacgttactagtaaggggtagcaatgtctcctcagtgacagtaggaccttccacttggggatgatgactgtcgacctctgggatgtagcgatggggacacagaggagaagagagctgggcttgggccttctctgctaccttggcagcactaatctgctcactgcttggtggacaaagtccccggtgttgagaaacagttcagcgcccttgcctggagtttggtcctgtgccctttatcacggcagttttgaagatatgtttagaatttgactgaaaaactcgattcttaaaatgaatcaaagcggtgaggagtcaggagctgtggctcctgctcagtcgctcagcgcttgggaagctatggaagaaggaagagcctgggttcaaggccagcttgggctgtgtactgagaccctggcttaaaaatcccggataccaacaacatagcgttgaaagccagcatagtgtttatctctgtgtgtagggcccgagggcacctgtgaggaggatgctggcaccatgactttgcccgggtggggatgtgagctctgtgcccaggtttgacacacactttatacttcatgcgtagttcttggcttcttaccgaggattgtagacttaaacaaaaaaggatccaggagaatgaaggctggaacaggggtaaggatgagagaagagggaaagtaggcaaacacaggtttggtgactcatgccttttatctcagctagaagcaggaggatgtctgtgaatttgaggccagcctggtttatatgagttccaggacagccagtgctacatagtgagacatctcaacccccacctcctgccagaagaggaagagggaattaatatggttaaaactcttataatatggatgtgtggctgatgtgtggaagcctcttactctgtacaacaaatatactctaataaaaattaaaaagaaaacttaatttatgtgtatattttcccactatgtgtgtctgtgcactacttgtgggcttggtacctttaaggtctgaagagaacattgggtctcctggaattaaaattacagtcaattggaccccggtcctctggaagaacaggcagtgctcttaactacaaagctatctcccgaccctactgtcttttaaagatagactctttttatagccttcaactttcaagccttctgtttcagcctaagttcttccctgagcctccttggtagggctcctgttctcagctctccataaacttctgtcccagcccctttgggaatagctcacagaagaggatattgggaatttattagaattctctttcaaggggggactctctagggttctgtttgctttggtttggttaagtgggtcaatgggtctgtattactttctctgaccttacattgaagctttgatgagttccacaactgctctctgcagacccactgtccgtgtcccctgcccgatgggctgaggagtatctggagcagtctgaggagaagctgtggttgggagaccaggaaggatcctctaccgctgatcgatggtgagtccagtgtcttccgtgggttgccatggagagagtacagttgtgggcacttccctacctcttccctctgcgtcctcactagcttgcaggtcgtctttgttctacttcgtttgttaacatttccactattgttactggtatttcacctatgagtagtaatcttacccattcccccagagattccccagagggagccctatttccttgagatgtttttcttctccctctctgcagagctatgtttggggaaggaaaagtataaagactgtctgtcccactgtcacaaagatagccttctttaatgtaacttagagctcgtagttcctcaaggtcttgaaggcagcattattgccccaccctgtaggagttctgtttgccatggacaggactggggatgagcatgggtagtgggtgggtgatttggtttttctttcttgccacaggtacgatgaatatcatcctgaggaggacctgcagcacacagccagtgactttgtgtccaaggtggacgaccccaaattggctaactctgaggtgagtcacctcctgctgccgcgctcagcagaactgggattgagggggaagctctccttccctcacgatactgtgctgtaaagaggggatgtgactctagaactgtctccctctggagagtggagactggatccggctgcgtcttccctgtgttccctgtttctttaggtacgaaccctttgtctttcctgtgccttctcagccctggagaggcagaaatcctcgtgtttgatctctgccttttcttctcagggcctttagcattttcttggtgcagctagagatgttcatagggaggggagagtgcagggtctccttgggcgtagttgagagtgcacacctggaagtcctgtcccaaggtgcctatgtgtgtctctgtgccccagttcctgaaattcgtgcggcagattggcgaggggcaggtgtccctggagtcggctgcagggtcgggcggagctcaggcagaacagtgggcagcagagtttatacagcagcaggtaggatattgccattccccagcccactctagactgctgccagaggccggatcagtgttcagtgggaagggattccgttgacagtttgccttgtagcacctagaccctgagtgggtgggcaagcgtctgagagcacctaggctggtggtgtttaacggggcttcatcagtctgtgttaatgggaagaaaggcggtggaggtggcacttatcatcgtttgtcacagggcacgtcagaggcctgggttgatcagtttacaagaccaggaaacaaaatagctgcccttcaggtggaatttgaacgagccaagtcagctatagaggtgagaagagctggtacgggtggggtgctccaggaccatgtcctactgtgggggagtatggctttattaatgtccgaggtgatgggcattgctgcatagtgtggttcattatccatagaaattgtataggtatgggatgagtgcttttataaaaatgaaaactcttgggggatggagagatggctcagtggttaagagcactgactgctcttccagaggtcctgagttcaattcccagcaaccacgtggtggctcacaaccatctgtaatgggatctggtgccctctcctggtgtgtctgaagagagcaacagtatactcatacataaaataaataaatctttaaaaaaaaagaaaacccttggacattcttccagattcccacatcagaatctggggtagagtcaggggatttgcattttgcaaaagcttctctgatgttggctaaacacactgaagtttgcagctcattgttctaacaattatatccctgtggggcgagggtggggaagggtgggctgggctggactggggatggagtatctcctttctcttacctgctttcccttcctcgcagtctgatgtcgatttctgggacaagttacaggcagagttggaggagatggccaagcgggatgccgaggcgcacccctggctttctgactatgatgacctcacatccgcttcctatgacaaggtaggaggccctggagaatttgaagtttccacactgaaactattactgttcttgagcctcttaaactgaaaagaagtctggttgatacctgttgtccagtaactggtatagtgtgttcttgagattaaataccttttcagatcacacagtgacataatgcccacgagggaggcttacacaggatgcactaagagcacatgagtcgctcctcgttggaggttgccctggggcagctcgtctgttgctgactcctgctggacagtggtagctggtgaaccatcctctgtcctcactgtgccatgtatcttttctttttagctcatgagttcaaacccctcgctttatcttgggggtcaaagcagtgtgggcatgtgctaaggaaggtctgactatccacggagctgcaccccagctcacataagttctgatatcttcttgtaggaatcaggctcttgtcccgattcaggattttaaagaattacatcaagtaacttaaacagtaggaaaacttcccagtggtctgtggtgaaaggtggttggtttgcatgtactgtgagcttttgacttaggtgctgtgactcttcagcagtgtctgtcactgagtaaatctgctgaggatgtggctggtgattgagcttttgagttgaagcctgagagggaaggaaaagatgtgcttgctttccaggaaggcagaatagaaacccttcgtggtgccgatgttggggaggaagaaccagcccctgagacgtgaagctcggtggtggaggtggatgtagacacagggagtggtgcagggacaggagagtgaagttccggggactgtaaagaggttagggcttgagagcctcaagaagaacctaggacaagaggaaatgtggctgttgattccatcagatctggcttgtctgagaatgggcttgtgtgggacattgacgggatgctaacttcttgggaccttgccttgtattttgccccagtataagttccttatagaatagcacttttgatcgattctcagtcttttggctaagatcaagtgtagaatagcacttttgttattctacattagctgttaatttataattggcatttccatacatttgataaatggagacataagtactattttcatagggcagtattttgttagtgtttattattcctgtatttatgacatgctatgcagaataactttttatgttagaagcttaatttagcacatattattctcatatttatgacatgttaggccaaatacacctttaaattaaaaacttagaaatatgaggaagctaggcatgatggtgcacacacataaccctatcacttgggaggcaggaggattgtaacttaggctaagttgggttagtgggattgtgtttcaaaacaaaaactgtaatttagttattagatccacgaaccctaattgatgtcattgataccttgaaatattgtgccctaggctgagacacacttgcactaatgcttctcagaaatgttctactccattattcactagcagtgaagtgttaagctctggccttacactaagttgtgctgaagtgtatggaattttatgagtcaattatcaaatgaagttacgaccttctgtgctgtttattgttgcatttgtctgtggtgtgcatgtgtgcactgtggtcagaggatgacacgggtccttccttaattccttcccctttgctacaggggcagattctctcactgaacccagagctcactgacacacagcctgccccggggccccctttccagctgcactgccatgcctgcctgggttttattggggtgttggggatctaacctctggtcctcaggcttgcctggcaagtgcttcattcactgagccgtctcctcttcccttttccctcttcccttttttaaaaaattaaattaattttattgataacttttagatttttcagacattgtaaaccactatcaaaagtgtttctgtgatgggagagtttgatgtagtgctctctctacagtgtgatctataagattttgaaatagcgcaaggcagtggaagagacaagatgacgccagagttagtgctttgaggatgggaagcagtgctcagctcagtcagctccatgtagccagggcacagtcccttcagggcattacttttccatctgtgcaagtattttgtctttgcatagcggaataatatttaataattctttgagcaggaattgataaaaccttaaataaagaccataggtaatggcgtctagaggaagcatgtttgaaggacggtgacagtcgtttgttacattgtctgctgatgacatgtgaagaacattcgtctctgctgactgttgtacacagcagtgtgccttaaggaagtagctgcagtctccattagtgaacactgtttgaagcttcgtagtaaggctctcagtagctttgaggcataaattacacctgttaggaaattacattatatctgataacgttctctgattcccactgagtggctcaaaggatggattgatgatggacagcagttgaggttgagtggaggagagcactcattgtgctcagcgggctgctgagaggcatgtgctgtccaaggggagaagctgaggctatggcagtgcgggcttgcgaggacttcctacaatgactttatgatcccagcacagatgctcacaagcctctgtgtagactcacccagcttctcggccattggcactcagctttgccttgtcctggaggagctttatcgtgtggagggtttgctacacctgtgtggaaggacgccctcactgcctccacctgccttggttgctgttctcttgccctgctaccctggctgccgcgattcccttggagttcccctcacttttcttccttgtagggttaccagtttgaggaggagaatcccttgcgtgaccaccctcagccttttgaagaagggctgcatcgactggaggagggagacctgcccaatgctgtgttgctcttcgaggctgctgtgcagcaggatcctaagcacatggaagtgagtgaggccttgttctgatggcttcttccttttgtggaagggcccagagaggcatgcatgtgggtgtggtctcctggggtgggtggtgagtaagggaaggcagtggagggaggggcggatttgaactcagtgatggattgtcaacttccctttaggcttggcagtacctgggcaccacccaggccgagaatgagcaagagctcttggctatcagtgccctgcggaggtgagtgtgctgctgcgagggcaggcagacgtagccctttgcaagtaacctttagcctaatagaaccaggtctttgtccttctctctggccactagcacacagatgaacctgtgaggttgttccaagtcgtcgtggctcagaggagtgagtgtgagaggcttgattccgatccatcatcagcttgggtttatctgtgggatcctggttggtctttggctgctgaaactttgcccatctcagagtggaatttttaatatccagacccgaggttcctttctatgtagtgctgacagggcagaagtacggcctctatgactgtgcttcaaagcttggccgcacacccctggtgctgagggctgcaggtgtcatttacagatactcagtctgctctttgtcccatcaggtgtctggaactaaagccagataaccggacagcactgatggcgctggctgtgagctttaccaatgagtccctgcagcgccaggcctgtgagacgttgagggactggctgcgctactcaccggcctacgctcatctggtggctcctggggaagaaggggcgaccggggcaggccccagcaagcgcatcttgggatctctgttgtctgagtgagtgtgggacattcctggggtgaggcctgtaatgccagtcctagtaagaacatgaccttggtttgtcaagaaggggtatgctgtgattcaagagtgtgacttggtcagtgtgaaggggtcagcattctgccatgcagtgctctgatgaataaagcaggctggaaagtggatgtgggtaaaggagctgactgaaacacccctgaagcgtggggatatggttgacttaagagattggcggctaggaacacaggtgacccatttatttaccacctctgtgctttttcttctccttacttagctccctgtttcttgaagtaaaagatctcttcctggcggctgtgcgtctggaccctacatccattgaccctgatgtgcagtgtggcctgggagtcctcttcaacctgagcggggagtacgacaaggctgtggactgtttcacagctgccctcagtgttcgccccaatgtgagccgtggggaaagaaggtggaagagtcattagcatgtgggagattgcgttccagcgtgcatgccaggaaagccttgggaagcctgggacaaggcagggttgctggggagagcaggagcgtgtggtaccccagggaccacactgggagctgccgaggggaagagggtgggctagtaactacgttaaccaaacagtagcgaagcaggtggaggaatgggcagacgttggtccaagtttagctcatgttcccagacctctctgtccctctctgtctaggactatttgatgtggaacaagcttggggccaccctggccaatgggaaccagagtgaagaagcagtggctgcataccgccgagcccttgaactacagcctgggtatattcggtcccggtataacctaggcatcagctgcatcaacctgggagctcaccggtgagtgtgggtcctgctgtaagcagctgaacctgtttcttggcattggtctctgatgttctgtcccaccctccctccctccatccctccctccctccctgtgcccttctgcccttctgcccttcctagtgttgctctgctcaccggctctcattcctcttccctacagtgaggctgtggagcactttctggaggctctgaacatgcagaggaagagccggggccctcggggtgaggggggcgccatgtctgagaacatctggagtaccctgcgcttggcgttatccatgttaggccagagcgatgcctatggggcagccgatgctcgggatctgtctgccctcctagctatgtttggcctgccccagtgacagtgggatgggctgccctgtgagtgtctgcttggaggggtccgcgctctgggtgtgactccctctcctcaaacgggcctaccaagggggtgggctgatgaccacaagcggtacgacctctcaggagctgcctcagagtaggggtgcatagctgtgtcttaggtcctacttaattgtagggatgagctgtctctgtcccttggtaattcaagggctgtctacccagctacagatctctttctgttcatcaggccctttcttggtgctgcttcttgggtcggacccaatgacataggggagttgtcatctgccgtttctgatagggtctgccacatttgtaagtctctccttgccccatcttcctgggaattggtaacagtccagcttccttgggcagttgtgtgtaagaggctcccctgagcatctgtgcgacgccagctgggatggatgttaggagctgccctgctcgctgaaatggtgatgcggctccctagagccgaacttggaacaagtgctcgcagctcggtcactccgggagcgagcatggatcttctgtgggtggacactgaagcagcagatgctcatgtggttactgtactgtcctcagggccagggcttgtcactgcaggtggcctggcctatgggggagggaggttcatttgtggaatgagcccagagatgcgacagtagtgatacggtcagcactgcagtcctctcttcttgggagacttggaagtaggaactaaacaaactcttgtagcaacctggttcagaagttgcattcttgccaaattcccaaccaagggagggttcagtgttaccataagccttcttgaaacctttataggggatatcattgaaaacccccttcccctcgattacctccacaaggtgaagatgaagggattctgagggagcagctggagacgtctccactgtttctgtgtggggagatgcacagacccccataaatgactgctaagcctcttaccttgtcttcagtagctaatgatcagattttttttttttttaaactgccatggtcccaaaatcccatcctgaaatttatttttctttgtatgcatatgtgtaaatgatttaaaaataaaactgtaaaatatttgtatgaagaataaactggactgacgtggg

SEQ ID NO: 369 - DNA, 3161 bp, Mus musculus
tccgggtgcctcggccggtcggacggtgcggcccgcgacggcgagcattggagcctgggggcgcggggtcgaggcccctgctggtcaccatggcaatgcgggagctggtggagggcgaatgtgggggtgccaacccgctgatgaagctggccacccatttcacccaggacaaggcccttcggcaggagggactgaggcctggcccctggcctccgggagcctcagcagcagagaccgtttccaagcctttgggagtaggaactgaagacgagttggtgtcagaattcctgcaggaccagaatgcaactcttgtatcccgagcccctcagaccttcaagatggatgacctcctggcagagatgcaggagattgaacagtcaaactttcgccaggctcctcagagagcccctggtgtggcagatttggccttgtctgagaattgggcccaggagtttcttgcagctggagatgctgtggatgtagctcaagattataatgagaccgactggtcccaagaattcatcgccgaagttacagacccactgtccgtgtcccctgcccgatgggctgaggagtatctggagcagtctgaggagaagctgtggttgggagaccaggaaggatcctctaccgctgatcgatggtacgatgaatatcatcctgaggaggacctgcagcacacagccagtgactttgtgtccaaggtggacgaccccaaattggctaactctgagttcctgaaattcgtgcggcagattggcgaggggcaggtgtccctggagtcggctgcagggtcgggcggagctcaggcagaacagtgggcagcagagtttatacagcagcagggcacgtcagaggcctgggttgatcagtttacaagaccaggaaacaaaatagctgcccttcaggtggaatttgaacgagccaagtcagctatagagtctgatgtcgatttctgggacaagttacaggcagagttggaggagatggccaagcgggatgccgaggcgcacccctggctttctgactatgatgacctcacatccgcttcctatgacaagggttaccagtttgaggaggagaatcccttgcgtgaccaccctcagccttttgaagaagggctgcatcgactggaggagggagacctgcccaatgctgtgttgctcttcgaggctgctgtgcagcaggatcctaagcacatggaagcttggcagtacctgggcaccacccaggccgagaatgagcaagagctcttggctatcagtgccctgcggaggtgtctggaactaaagccagataaccggacagcactgatggcgctggctgtgagctttaccaatgagtccctgcagcgccaggcctgtgagacgttgagggactggctgcgctactcaccggcctacgctcatctggtggctcctggggaagaaggggcgaccggggcaggccccagcaagcgcatcttgggatctctgttgtctgactccctgtttcttgaagtaaaagatctcttcctggcggctgtgcgtctggaccctacatccattgaccctgatgtgcagtgtggcctgggagtcctcttcaacctgagcggggagtacgacaaggctgtggactgtttcacagctgccctcagtgttcgccccaatgactatttgatgtggaacaagcttggggccaccctggccaatgggaaccagagtgaagaagcagtggctgcataccgccgagcccttgaactacagcctgggtatattcggtcccggtataacctaggcatcagctgcatcaacctgggagctcaccgtgaggctgtggagcactttctggaggctctgaacatgcagaggaagagccggggccctcggggtgaggggggcgccatgtctgagaacatctggagtaccctgcgcttggcgttatccatgttaggccagagcgatgcctatggggcagccgatgctcgggatctgtctgccctcctagctatgtttggcctgccccagtgacagtgggatgggctgccctgtgagtgtctgcttggaggggtccgcgctctgggtgtgactccctctcctcaaacgggcctaccaagggggtgggctgatgaccacaagcggtacgacctctcaggagctgcctcagagtaggggtgcatagctgtgtcttaggtcctacttaattgtagggatgagctgtctctgtcccttggtaattcaagggctgtctacccagctacagatctctttctgttcatcaggccctttcttggtgctgcttcttgggtcggacccaatgacataggggagttgtcatctgccgtttctgatagggtctgccacatttgtaagtctctccttgccccatcttcctgggaattggtaacagtccagcttccttgggcagttgtgtgtaagaggctcccctgagcatctgtgcgacgccagctgggatggatgttaggagctgccctgctcgctgaaatggtgatgcggctccctagagccgaacttggaacaagtgctcgcagctcggtcactccgggagcgagcatggatcttctgtgggtggacactgaagcagcagatgctcatgtggttactgtactgtcctcagggccagggcttgtcactgcaggtggcctggcctatgggggagggaggttcatttgtggaatgagcccagagatgcgacagtagtgatacggtcagcactgcagtcctctcttcttgggagacttggaagtaggaactaaacaaactcttgtagcaacctggttcagaagttgcattcttgccaaattcccaaccaagggagggttcagtgttaccataagccttcttgaaacctttataggggatatcattgaaaacccccttcccctcgattacctccacaaggtgaagatgaagggattctgagggagcagctggagacgtctccactgtttctgtgtggggagatgcacagacccccataaatgactgctaagcctcttaccttgtcttcagtagctaatgatcagattttttttttttttaaactgccatggtcccaaaatcccatcctgaaatttatttttctttgtatgcatatgtgtaaatgatttaaaaataaaactgtaaaatatttgtatgaagaataaactggactgacgtggg

SEQ ID NO: 370 - protein, 635 aa, Mus musculus
MAMRELVEGECGGANPLMKLATHFTQDKALRQEGLRPGPWPPGASAAETVSKPLGVGTEDELVSEFLQDQNATLVSRAPQTFKMDDLLAEMQEIEQSNFRQAPQRAPGVADLALSENWAQEFLAAGDAVDVAQDYNETDWSQEFIAEVTDPLSVSPARWAEEYLEQSEEKLWLGDQEGSSTADRWYDEYHPEEDLQHTASDFVSKVDDPKLANSEFLKFVRQIGEGQVSLESAAGSGGAQAEQWAAEFIQQQGTSEAWVDQFWGNKIAALQVEFERAKSAIESDVDFWDKLQAELEEMAKRDAEAHPWLSDYDDLTSASYDKGYQFEEENPLRDHPQPFEEGLHRLEEGDLPNAVLLFEAAVQQDPKHMEAWQYLGTTQAENEQELLAISALRRCLELKPDNRTALMAVSFTNESLQRQACETLRDWLRYSPAYAHLVAPGEEGATGAGPSKRILGSLLSDSLFLEVKDLFLAAVRLDPTSIDPDVQCGLGVLFNLSGEYDKAVDCFTAALSVRPNDYLMWNKLGATLANGNQSEEAVAAYRRALELQPGYIRSRYNLGISCINLGAHREAVEHFLEALNMQRKSRGPRGEGGAMSENIWSTLRLALSMLGQSDAYGAADARDLSALLAMFGLPQ

SEQ ID NO: 371 - DNA, 3055 bp, Mus musculus
tccgggtgcctcggccggtcggacggtgcggcccgcgacggcgagcattggagcctgggggcgcggggtcgaggcccggaagctgctggtcaccatggcaatgcgggagctggtggagggcgaatgtgggggtgccaacccgctgatgaagctggccacccatttcacccaggacaaggcccttcggcaggagggactgaggcctggcccctggcctccgggagcctcagcagcagagaccgtttccaagcctttgggagtaggaactgaagacgagttggtgtcagaattcctgcaggaccagaatgcaactcttgtatcccgagcccctcagaccttcaagatggatgacctcctggcagagatgcaggagattgaacagtcaaactttcgccaggctcctcagagagcccctggtgtggcagatttggccttgtctgagaattgggcccaggagtttcttgcagctggagatgctgtggatgtagctcaagattataatgagaccgactggtcccaagaattcatcgccgaagttacagacccactgtccgtgtcccctgcccgatgggctgaggagtatctggagcagtctgaggagaagctgtggttgggagaccaggaaggatcctctaccgctgatcgatggtacgatgaatatcatcctgaggaggacctgcagcacacagccagtgactttgtgtccaaggtggacgaccccaaattggctaactctgagggcacgtcagaggcctgggttgatcagtttacaagaccaggaaacaaaatagctgcccttcaggtggaatttgaacgagccaagtcagctatagagtctgatgtcgatttctgggacaagttacaggcagagttggaggagatggccaagcgggatgccgaggcgcacccctggctttctgactatgatgacctcacatccgcttcctatgacaagggttaccagtttgaggaggagaatcccttgcgtgaccaccctcagccttttgaagaagggctgcatcgactggaggagggagacctgcccaatgctgtgttgctcttcgaggctgctgtgcagcaggatcctaagcacatggaagcttggcagtacctgggcaccacccaggccgagaatgagcaagagctcttggctatcagtgccctgcggaggtgtctggaactaaagccagataaccggacagcactgatggcgctggctgtgagctttaccaatgagtccctgcagcgccaggcctgtgagacgttgagggactggctgcgctactcaccggcctacgctcatctggtggctcctggggaagaaggggcgaccggggcaggccccagcaagcgcatcttgggatctctgttgtctgactccctgtttcttgaagtaaaagatctcttcctggcggctgtgcgtctggaccctacatccattgaccctgatgtgcagtgtggcctgggagtcctcttcaacctgagcggggagtacgacaaggctgtggactgtttcacagctgccctcagtgttcgccccaatgactatttgatgtggaacaagcttggggccaccctggccaatgggaaccagagtgaagaagcagtggctgcataccgccgagcccttgaactacagcctgggtatattcggtcccggtataacctaggcatcagctgcatcaacctgggagctcaccgtgaggctgtggagcactttctggaggctctgaacatgcagaggaagagccggggccctcggggtgaggggggcgccatgtctgagaacatctggagtaccctgcgcttggcgttatccatgttaggccagagcgatgcctatggggcagccgatgctcgggatctgtctgccctcctagctatgtttggcctgccccagtgacagtgggatgggctgccctgtgagtgtctgcttggaggggtccgcgctctgggtgtgactccctctcctcaaacgggcctaccaagggggtgggctgatgaccacaagcggtacgacctctcaggagctgcctcagagtaggggtgcatagctgtgtcttaggtcctacttaattgtagggatgagctgtctctgtcccttggtaattcaagggctgtctacccagctacagatctctttctgttcatcaggccctttcttggtgctgcttcttgggtcggacccaatgacataggggagttgtcatctgccgtttctgatagggtctgccacatttgtaagtctctccttgccccatcttcctgggaattggtaacagtccagcttccttgggcagttgtgtgtaagaggctcccctgagcatctgtgcgacgccagctgggatggatgttaggagctgccctgctcgctgaaatggtgatgcggctccctagagccgaacttggaacaagtgctcgcagctcggtcactccgggagcgagcatggatcttctgtgggtggacactgaagcagcagatgctcatgtggttactgtactgtcctcagggccagggcttgtcactgcaggtggcctggcctatgggggagggaggttcatttgtggaatgagcccagagatgcgacagtagtgatacggtcagcactgcagtcctctcttcttgggagacttggaagtaggaactaaacaaactcttgtagcaacctggttcagaagttgcattcttgccaaattcccaaccaagggagggttcagtgttaccataagccttcttgaaacctttataggggatatcattgaaaacccccttcccctcgattacctccacaaggtgaagatgaagggattctgagggagcagctggagacgtctccactgtttctgtgtggggagatgcacagacccccataaatgactgctaagcctcttaccttgtcttcagtagctaatgatcagattttttttttttttaaactgccatggtcccaaaatcccatcctgaaatttatttttctttgtatgcatatgtgtaaatgatttaaaaataaaactgtaaaatatttgtatgaagaataaactggactgacgtggg

SEQ ID NO: 372 - protein, 598 aa, Mus musculus
MAMRELVEGECGGANPLMKLATHFTQDKALRQEGLRPGPWPPGASAAETVSKPLGVGTEDELVSEFLQDQNATLVSRAPQTFKMDDLLAEMQEIEQSNFRQAPQRAPGVADLALSENWAQEFLAAGDAVDVAQDYNETDWSQEFIAEVTDPLSVSPARWAEEYLEQSEEKLWLGDQEGSSTADRWYDEYHPEEDLQHTASDFVSKVDDPKLANSEGTSEAWVDQFWGNKIAALQVEFERAKSAIESDVDFWDKLQAELEEMAKRDAEAHPWLSDYDDLTSASYDKGYQFEEENPLRDHPQPFEEGLHRLEEGDLPNAVLLFEAAVQQDPKHMEAWQYLGTTQAENEQELLAISALRRCLELKPDNRTALMAVSFTNESLQRQACETLRDWLRYSPAYAHLVAPGEEGATGAGPSKRILGSLLSDSLFLEVKDLFLAAVRLDPTSIDPDVQCGLGVLFNLSGEYDKAVDCFTAALSVRPNDYLMWNKLGATLANGNQSEEAVAAYRRALELQPGYIRSRYNLGISCINLGAHREAVEHFLEALNMQRKSRGPRGEGGAMSENIWSTLRLALSMLGQSDAYGAADARDLSALLAMFGLPQ

SEQ ID NO: 373 - DNA, 3130 bp, Mus musculus
ggccggtcggacggtgcggcccgcgacggcgagcattggagcctgggggcgcggggtcgaggcccggaagctgctggtcaccatggcaatgcgggagctggtggagggcgaatgtgggggtgccaacccgctgatgaagctggccacccatttcacccaggacaaggcccttcggcaggagggactgaggcctggcccctggcctccgggagcctcagcagcagagaccgtttccaagcctttgggagtaggaactgaagacgagttggtgtcagaattcctgcaggaccagaatgcaactcttgtatcccgagcccctcagaccttcaagatggatgacctcctggcagagatgcaggagattgaacagtcaaactttcgccaggctcctcagagagcccctggtgtggcagatttggccttgtctgagaattgggcccaggagtttcttgcagctggagatgctgtggatgtagctcaagattataatgagaccgactggtcccaagaattcatcgccgaagttacagacccactgtccgtgtcccctgcccgatgggctgaggagtatctggagcagtctgaggagaagctgtggttgggagaccaggaaggatcctctaccgctgatcgatggtacgatgaatatcatcctgaggaggacctgcagcacacagccagtgactttgtgtccaaggtggacgaccccaaattggctaactctgagttcctgaaattcgtgcggcagattggcgaggggcaggtgtccctggagtcggctgcagggtcgggcggagctcaggcagaacagtgggcagcagagtttatacagcagcagggcacgtcagaggcctgggttgatcagtttacaagaccaggaaacaaaatagctgcccttcaggtggaatttgaacgagccaagtcagctatagagtctgatgtcgatttctgggacaagttacaggcagagttggaggagatggccaagcgggatgccgaggcgcacccctggctttctgactatgatgacctcacatccgcttcctatgacaagggttaccagtttgaggaggagaatcccttgcgtgaccaccctcagccttttgaagaagggctgcatcgactggaggagggagacctgcccaatgctgtgttgctcttcgaggctgctgtgcagcaggatcctaagcacatggaagcttggcagtacctgggcaccacccaggccgagaatgagcaagagctcttggctatcagtgccctgcggaggtgtctggaactaaagccagataaccggacagcactgatggcgctggctgtgagctttaccaatgagtccctgcagcgccaggcctgtgagacgttgagggactggctgcgctactcaccggcctacgctcatctggtggctcctggggaagaaggggcgaccggggcaggccccagcaagcgcatcttgggatctctgttgtctgactccctgtttcttgaagtaaaagatctcttcctggcggctgtgcgtctggaccctacatccattgaccctgatgtgcagtgtggcctgggagtcctcttcaacctgagcggggagtacgacaaggctgtggactgtttcacagctgccctcagtgttcgccccaatgactatttgatgtggaacaagcttggggccaccctggccaatgggaaccagagtgaagaagcagtggctgcataccgccgagcccttgaactacagcctgggtatattcggtcccggtataacctaggcatcagctgcatcaacctgggagctcaccgtgaggctgtggagcactttctggaggctctgaacatgcagaggaagagccggggccctcggggtgaggggggcgccatgtctgagaacatctggagtaccctgcgcttggcgttatccatgttaggccagagcgatgcctatggggcagccgatgctcgggatctgtctgccctcctagctatgtttggcctgccccagtgacagtgggatgggctgccctgtgagtgtctgcttggaggggtccgcgctctgggtgtgactccctctcctcaaacgggcctaccaagggggtgggctgatgaccacaagcggtacgacctctcaggagctgcctcagagtaggggtgcatagctgtgtcttaggtcctacttaattgtagggatgagctgtctctgtcccttggtaattcaagggctgtctacccagctacagatctctttctgttcatcaggccctttcttggtgctgcttcttgggtcggacccaatgacataggggagttgtcatctgccgtttctgatagggtctgccacatttgtaagtctctccttgccccatcttcctgggaattggtaacagtccagcttccttgggcagttgtgtgtaagaggctcccctgagcatctgtgcgacgccagctgggatggatgttaggagctgccctgctcgctgaaatggtgatgcggctccctagagccgaacttggaacaagtgctcgcagctcggtcactccgggagcgagcatggatcttctgtgggtggacactgaagcagcagatgctcatgtggttactgtactgtcctcagggccagggcttgtcactgcaggtggcctggcctatgggggagggaggttcatttgtggaatgagcccagagatgcgacagtagtgatacggtcagcactgcagtcctctcttcttgggagacttggaagtaggaactaaacaaactcttgtagcaacctggttcagaagttgcattcttgccaaattcccaaccaagggagggttcagtgttaccataagccttcttgaaacctttataggggatatcattgaaaacccccttcccctcgattacctccacaaggtgaagatgaagggattctgagggagcagctggagacgtctccactgtttctgtgtggggagatgcacagacccccataaatgactgctaagcctcttaccttgtcttcagtagctaatgatcagattttttttttttttaaactgccatggtcccaaaatcccatcctgaaatttatttttctttgtatgcatatgtgtaaatgatttaaaaataaaactgtaaaatatttgtatg

SEQ ID NO: 374 - protein, 635 aa, Mus musculus; identical to SEQ ID NO: 370

SEQ ID NO: 375 - DNA, 49256 bp, Homo sapiens
agaaggcaccatttatgaggaagcaagaacctcaccagacactgaatctgtgggtgctttgatgggacttctcagcctgcagaactgtgagaagtaaatatttgttgtttataagccatccagtctaaggtttttttttttttcctttttttttttgttttttttttgacatagtcttgctctgtcacccaggctagaatgcaatggcacgatctcggctcactgcaacctccacttcctgggttcaagcgattctcctgcctcagcctcccaagtagctgggattacaggcacttgccaccatgcctggctaatttttgtagttttagagatggggtttcaccatcttggccaggctggtctcaaactcttgacctcaggtgatccacctgcctccgcctcccaaagtgctgggattacaggcatgagccacggtgccccagccctcagtctaaggtattttattatagcagccagaacagactaagacataggggtgaagacagtgtgtactacagtccttgcagctatctggcagcgttctctactgggtggccagggatggagttaagatactttgtacccaaacctaggtgcatagtgctgggtatacctcggtatatctagatatcactactttgaacacttttaaagcaaattaagatttcttcaggtctttttagatggtcctggcttcaagatttgctgcatttcatcacatatactgttttcatcctttgccaagttgtctctgccaatgatgactactagggctgcaaggagggatgggtaattataagcaacaagcccttccaaatgtacatgtgtaaagactgtaacttgatttgcaatttccagagcatggaaacttctattactctgcatctgatgtcattaaaaaactaaagaatcaaatcagatggggtcatcccccatttcctacctgtcttagtttgttttctgttgctataactgaatatcacagactgagtaatttgtgaaaaatagaggtttatttagatcatagttatggaggctggataatttataaggaatagaggtttatttagttcatggttcaagagtatggtgccaccatctaatgagggccttcttgctacatcataacatggtggagggcatcacatggtgaaagggcaagggcaagcaagacagagagagcttgcttttataacaaacccactcccatgatagcaacattaatccactcatgagggcagaggggttaagtttctagcacattagtattttggggacacattgaaaccatagtattacccctcctccaaacaagaggaatgtagacttgaacacttagaaaataaagaaattaggccaggtgcagtggttcacgcctataatcccagcacttttggaggccgaggcaggtggatcacctgaggtcaggagtttgagaccagcctgaccaacatggagaaaccctatctctactaaaaaatacaaaaattagcggggcatggtggtgcatgcctgtaatcccagctacttgggagtctagggcaggagaatcgcttgaacctggaaggtggaggttgtggtgagctgagattgtgccattgcactccagcctgggcaacaacaacgaaactctgtctcaaaaaaaaaaaaaaaaaaaaaagaaattcatttattcaaatgaatttattcaaagaaagtagctgtacctaaatgagatgatagctaggtaaacttgtaactcatggctgggcacagtggtttacacctgtaatcccagtactttgggaagccaaggtgggtggatcacttgaggccaaaagttcaaaccagcctggccaatatggtaaaaccctgttctttccttaaaaaaaaaaaaatacaaaaattagcctggtgtggtgtgcatgcctgtaatcccagctacttgggaggctgaggcactagaattgcttgaacctgggaggtggaggttgcagtgagctgagatcctgccactgcactccagcctgggagatggagtgaggctctgtctcaaaaaaaaaaagagttttaactcatgacttggatatcgttaccaagtggaggaaatggccttagggatccatgacacagcaggcagagctcagctctaaaacagtgctgagagtattcatttgtgactcagccttgtcttggggatatgtctatgtcttgagtcttggtctcaaatctctgacttttaagtatctacactgtagttctaaatttaacccagtaaacttgacttacctgagtcagtaaatttgccttgcagagatgtaaaagtgacattataagttaaaatgtttgatgttttagagaatctgatggattagcctttgatttggaaagtaaagttttagactttggcaaccccctttgggtcccctcccgttgtacaggagctctgttttcactctgttaaatcttggaactgcacactcttctggtccatgttttttctggctcaagctgagctttcgtctgccgtccaccattgctgatcaccactgttgtagacctgctgctgacttccacccctccggatctggcagggtgtccctgcgcttctgatccagtgaggtgcctgttgctactcccgatcgggctagaggctcgccattgttcctgcatggctaagtgtccagatttgtcctaatcaagctgaacactagttgctgtgttccatggttctcttccatgacccatggcttctaatagagctataacactcactgcatggctcaaggttcaattccttggaattcgtgaggccaagaaccccaggtcagggaacaaaaggcttgctgccatcttgggagtggcttgccaccatcttgggagctctaagaacaaagacccaccagtaagatttggtggcctatacggggattctccaaagcggtgagtaatattggaccacttttgcttgctgttctatcctatccttccttagaatcagaggaaaataccaggtacctgtcagctggttaaaaacgattagcgtggctgctggacttaagactcagatgtgaggctttctgggaaaaggctaacaactcccaacccttgtgggttgggagcattggtctgcctggaaccagcttccactttcacaatattcctgggggaagtcgagggctgactagaggcagaaagctgtcatcctgaactcctggcattggccagtcaagatcatggcacagccagaagtctctactcaacaatcgcccatgcatgtgcgactacctctccttctgacccatacctcctgagttctgatcacgactttcttgaaagtgtagcccccaaattctccttacctgtgaatctactgcctttgatccctgcctcctaggtacaaatgcttcagacttttacttcctttcccaagtattagagcaagttgtatctccaaagggatctaagggagctctatgctgcatccttaggcacctaggctatgaacccagggagtcttgcccctggtgtccctcccaatttaggtatacagctgtcaacataggcagttatgtgggacccattccccaccacccttgccagggccttaaaactgatgacccagtactttaacaactggaactcggtctacaacaatataatagatcaggatgaaaatgcattaagtaaattaagggaaggcacatattcctatagtggcaaatgggggcaatgagcaaacgtccttccgctgtgttcccaaaatccatctaccaagagagaaactatctctctcacagctttgcctagtgatcctatgtaagtcaatactactggaaagacaacatagcacccagaagtttatttactggactttagcatataaagccagcaagtccatccttttctccttgctccccttctcataggaaaaaggcacataggataaacaggatccatctgtcatattttgtacccaaaaagacttaatccgggacaacaaaaagtttaagatcaataattagggcatattcctacaaagaaaaagaaggacaaaggccccagtggtcaaaaactctatctcaatcctgactcaaaaggttacctacaccctctctgaaatgaatttgcataggaactgttatttatgggaatgcattttcatggggcaactgggttgttatgaaatactcaggaacacagcccagctctagaactcacccctgagtgcaaaggcaatgttgggcatgctagtaaaggacccctagaatccagcagccccgacccctttctttgtggtcaagaaaggtgggaaaacaggtgcaggactgctacattggtgagcataactaatccgataagcagaggtccatgggtggttacgcaccctggaaaggaataagcattaagaccaccgaggatgctctaaaactgatgcgatgcgcattggaaaatgactcggggtgctggcatccctatgttcttttttcagatgggaaatgttccccccaaggcaaaaatgcccctaagatgtattctggagaattgggaccaatttgaccctcaaacactaagaaagaaataacttatattcttctgcagtactgcctggccatgatatcctcttcaagagggagaaacctggcctcctgagggaagtataaattataacaccatcttatagctagacctcttttgtagaaaagagggcaaatggagtgaagtgccatatgtgcaaactttcttttcattaagagataacttgcagttacgtaaaaagtgtaatttatgccctataggaagctctcagaatctacctccctaccccagcattcccccggctctttccccaactaataaggaccccccttcacacaaacggtccaaaaggagatagacaaaggggtaaacaatgaaccaaagagtgccaatatttcccgattatgccccctccaggcagtgggaggagaatttggcccagtcagagtgcatgtacctttttccctctcagatttgaagcaaattaaaatagacctaggtaaattctcagataaccctgatggctatgttgatgttttacaagggttaggacaatcctttgatctgacatggagagatataatgttactgctagatcagacactaaccccaaacaagagaagtgccgccataactgtagcccgagagtttggcgatctctggtatctcaatcaggtcaatgatagtatgacaacagaggaaagagaacaattccccacaggccagtaggcagttcccagtgtagaccctcatcaggacgcagaatcagaacatggagattggtgctgcagacatttgctaacttgcgtgctagaaggactaaggaaaactaggaagaagctgatgaactattcaatgatgtctgctataacacagggaaaggaagaaaatcctactgtctttctggagagactaagggaggcattgagaaagcatacctctctgtcacctgactctgttgaaggccaactaatcttaaaggataagtttatcactcagtcagctgcagacattaggaaaaaaaacttcaaaatctgccttaggcccagagcaaacttagaaaccctattgaacttggcaaccttggtattttataatagagatcaggaggagcaggcggaatgggacaaacgggattaaaaaaaggccacagctttagtcatggccttcaagcaagcagactttggaggctctggaacagaaaggctgggtaaattgaatgcttgcttccaatgcggtctacaagggcactttaaaaaagattgtccgaatagaaataagccacccccttgtccatgccccttatgtcaagggaatgactggaagttctgctgccccagggaacgaaggtcctctgagtcagaagccactaaccagatagatgatccagcagcagaactgtgtgcccagggcaagcaccagcccatgccatcaccctcacagagccccgggtatgcttgaccattaagggccaggaggttaactgtctcctggacactggcacagccttctcaatcttactctcctgtctcggacaactgtcttccagatctgtcactatctgaggggtcctaggagaggcagtcactagatatttctcccagccactaagttgtgactggggaactttactcttttcacatgcctttctaattatgcctgaaagccccactcctttgttagggagagatattctagcaaaagcaggggccattatacacttgaatataggagaaggagcacccatttgttgtcccctacttgaggaaggaattaatcctgaagtctgggccacagaaggacaaatagacaagtgaagaatgcctgtcctgttcaacttaaactaaaggattctgcctccttcccctaccaaaggcagtaccctcttagatccacccagctctctgatggacagcccaacaagccccaacttggacttcaaaagatcgttaaggacctaaaagcccaaggcctagtaaaaccatgcaatagtccctgcaatactccaattttaggagtacagaaacccaatggacagtggaggttagtgcaagatctcaggattatcagtgaggccgttgtccctctatacccagctgtacctaacccttatactttgctttcacaaataccagaggaagcagagtggtttacagtcctggatcttaaggatgcctttttctgcatccccgtacatcccgactctcaattcttgtttgcctttgaagatcctttgaacccaacatctcaactcacctggactgctttaccccaagtgttcagggatagcccccatctatttgaccaggcattagcacaagacttgagccagttctcatacttggacactcttgccctttggtatgtggatgatttacttttagcagcccgttcagaaaccttgtgccatcgagttacccaagcgctcttaaacttcctcgccacctgtggctacaaggtttccaaaccaaaggctcagttctgcttacagcaggttaaatacttagggctaaaattatccaaaggcaccagggccctcagtgaggaacgtatccagccaatactggcttatctttatccccaaaccctactaactgttggatgtgcctccccctgcacttcaggccatacatttcaatccctgtatctttaacctccttgttaagtttgtctcttccagaatcaaagctgtaaaaactacaaatggctcttcaaatggagccccagatgcagtccatgactaagatctactacagacccctggacctgctaggccatgctctgatgttgatgacatcaaaggcacccctgctgaggaaatctcaactgcatgacctactatgccccaattcagcaggaagcagttaaagcagtcgttggccaacctccccaacagcacttgggttttcctgttgagaggggggactgagagacaggactagctggatttcctaggccaactaagcattcctaagcccagctggggaagatgactgtactcacatttaaacagggtgcttgtaactcagctcacacctgaccaatcaggtagtaaagagagctcactaaaacaccaattaggctaaaagcaggaggtaaagaaatagtcaatcatctattgcctgagagcacagggggagggacaatgatcgggatataaacccaggcatttgagctggcagtggcaaccccctttgggtcccctcccgttgtatgggagctctgttttcactctattaaatcttgcaacagcaaaaaaaaaaaaagaaaagaaaagagttttagacatatgactttaagaggattaagaaaattgaataaatgtttataagtttgatttattaaagggttgaataaaagttcagaaaggttttgcctagtagtgttgtttgccctgtcaggtatttaaaatatgaatattaaatgtcacatagttaaaaatattaggaaatttgtcttttatttctaaaaagcagaagtacagcacagtgtttaagagcatggactctggaataagactgtgtaggtcaaagatccacaaactatggcctggtccctgtttttccatagtctgcaagctaagaagtatttgacgttttttggctgggcacggtgggtcacatctgtaatcccagcacttcaggaggccaaggggggtggatcatctgaagtcaggtgtttgagaccagcctgaccaacatggtgaaaccccatctctactaaaaatacgaaaattagctgggcatggtggcatgtgcctgtagtcccagctactcgggaggctgaggcaggagaatcacttgaacctaggaggtagaggttgtagtgagccgagattgcgccactgcatgccggcctgggtgacagaacaagactgtctcaaaacaaataagtatttgacatttttaaatagttggaaaaacatcaaaagaagaagaatattttgtaacatgaaaattatataaaattcacatttcagtccccataaaaagcattactggaatacagccatgctcatttgtttaggtgtggcctatgtctgcttttgtgctccaacagcagggttgagtcactgtgacagagactgcatggactacaaagccaaaaatattgaccattgagccctttacagtttggtgaccgtggtctgggttcaaatcccagctctgctatttattagtatgaccttgtgcaagtcactcaacttctctgtgcctcagtttcctcttttgtaaaatgggggataatagttattattaataactattaggaggattaaataaatcaatagttgaaaagtgcttgaaacaatgcctggcacacagtcaatgcaatgtgtgtctaaacatctattgaacttgaattcgtcaaacattaaagaataagtaaaaattatttttattttataaaaattactacttttatgaatagaacaagaatttaaagttgaacctggattaacaaaatctagggtttcaaatctagagcttcagtaaattaaatattaaacaccaaagtcactctattagccctttcccagcacctctggctgggactgtggaccaagttctgtgaatgattctatggcctaggagatcaaagatctccatggtttatcagtaagtcttctctaagactgggaagtaggtgcctagagttatgcctggattaaattttgacttcctagccatctgattttgcacaagtcttatctgtaaagtgggtctactaatatctatttaataggggtattaagaagattaaaaacattgagatacataaagtgttttacacaacacctggattttagtaaacatcagttattattattagcattcttccaagatctgcacacaaagtgagttacggctaatcagttgataaactcctagcagagcagaaggttatgtgtgttgtgatgtttaagtggtactgggaaactctggttgccttgaggttctgaaattctactgtatcagatgggttcctttaaacattgctctctctagggggtcctctttttaaaagtatgcaccttctggagggcatctcttcatccttgtgtggtttagtttatcaggtattttcctcacgatggcagcctgagaacaggggacgcccaagggctgggatttgtgtgctccggaagaaaacggggtgtagaagtggggcctctgaaagagggcgaaaaggcaaggaaaaggagaaatgttgcacagtcttatggtctgtcccctgccattctgttcccctgaggtgtcagagcagcttctctgtcttcccagggatgagtttacacagacattccctgtggccccctgaggcctccacctctgaaatctgcagaacagccaggaaacaagcccggcccatggcgccacctgctgcctgcctgcctccgctcatgcaccctgggctgggatggtacttctgttcgtctggcattattgcccttggtcatttaccggcagccctgggcccctccttgctcttctccatgacactaggactcccttggtcttgaagctgggtgagattatcagggtttgtttctcaatgactttgaggtttgacagcagagcacactctttggcagatgagggggcttgaggcttagtcttattccgtgattaaaagcatttcttgtatgtttgtcctttcccagcctggagtggtgggaataaggccactatgttgacttagcggaaggaagggctgactcactgttcaccttccctgtacgttaccagctcgaggtctcaggatgcgttggaccctattttggtctccggaatttgtcatcatgcagtgctattttccccattatgcagaggtggagagggattaaggcgggggcgggcccctgtctccatggagacagtgacgctaccccgctaggggttatttggaagcggggcaggcctaggaggctgaagaaggcttcggactggactccccagcccctggtgttagggcttttctctttcttgggcttgggaacattagccagccccattttagaggggaaaactgaggctcagaaagggcactgaatccccttaggtcacaatgcgcccaagggaagaggcaggatcgactgagcctaggatctcgcgtcttcggctttcccccagagcctgggaagcccttcttagctccactcttctttgagctttccgtcaaacaaatcctagggcccgtggccttttcgagcgctcctaaaggcgactctccaagacccgctctctaaggtgctcttcccctttaagactcacggctcttcccgtcaggctgcgtcgcagtcttaaggccccgccttttcagacagcttccgctgggcctgggccgctgcggggcggtcacggcccctttaagcctgagccccgccccctggctccccgccccctcttctcccctcccccaagccagcacctggtgccccggcgggtcgtgcggcgcggcgctccgcggtgagcgcctgaccccgagggggcccggggccgcgtccctgggccctccccacccttgcggtggcctcgcgggtcccaggggcggggctggagcggcagcagggccggggagatgggcggtggggagcgcgggagggaccgggccgagccgggggaagggctccggtgacttaaggggagggaatgctcctctgccgtgctcaccgcgtgctggggctgcgcggggctaggtatggtcgggctgttttcccactgtcccttcttcgggcagtgtcgccgtccagcctggttgttgaagcgtccccgtggtcccccggggtccaggcccctttgtggaggcagctgctggcccccagcccatgggaccgtagtcgcggaggcctctgcagaggcgcaggctggaagcggtggcctttgaggggggcggcaggagagagtaccgacctccctcgaactcctggcagaggtgggggtcgcagcaaaagcactggggtggagggcggccagtgtggggcagacgcctgtgtgccttcctcagatacgggcagagttgtggatgtgagaagggtctggcttgggtacctcagttccaaacctcctgtgtccatcagagagctggcggtcaccatggcaatgcgggagctggtggaggccgaatgcgggggtgccaacccgctcatgaagctcgccgggcacttcacccaggacaaggcccttcggcaggagggattgaggcctggcccctggccccccggagccccggcctctgaggcagtgagtgttcttgaggtggaaagcccaggtgcagcctctgaggcagtgagtgttcttgaggtggaaagcccaggtggtggtggtctgaggtggaggggctgtttgcacatcttggtataactgctttctctattgtgttgcaaatcatagtagttaccacttactgagcgtttataaacactagaaaaccctgtgcacctttaaataaatgcaaccattttatagatgaagaagccgaggctcagatgcctatgggcttcatcaacccctgattttagaggaactgcgtcattgtacatctctgtctttctctcttaggcctccaagcctttgggagtagcttctgaagatgaggtaaatagaccagtctcttttctgtcccatttttctcttgcccactgtgtttttacctttaaacttagttcacccgtatttcaatttttgggctttcctgaccgaatgagaatgcctgcttgtttttaaatgtattttttcgtccttctaaatctatggaaagacagtttctctttatgtgtctccagtttctgtgttttcctttccttgtatctaacattgggatccccctccagtgggtcctgcctcttgctggggcctcccaagcctatgggttcatttcatcatttcccttctggcagttggtggctgaattcctgcaggaccagaatgcaccccttgtgtcccgtgcccctcagaccttcaagatggatgacctcctggctgagatgcagcagattgagcagtcaaacttccgccaggctccccagagaggtgagtccagagtctagtgggaggggagatcgttttccatgtagccagggccaaggaagggggttccattggatgctgctggcattggggacctgagatgcagaaggagacaaaagtaacagagtgttttcacgtggattcagggttctttaggcatgatggaatggtatgtatgtattctttcttagttttctctctctctcttttaaccccctggtgtggcagacttggccttgtctgagaactgggcccaggagtttcttgcagctggagatgctgtggatgtaactcaggattataatgagactgactggtcccaagaattcatctctgaagttacaggtgaaacttgttatgggaaaatctatattggcttctatgggacagaattctatacccttcccctgttcacgttatagtgtgattacgatttttctggtctcatgactcatttctagaggggtagggtactgaactcaatttcccttaggtgataacggaatgtaatgtatattaaagagaggactgggtttgtactggataagagattttggatagagagaacgaagagtttggttggcctttttactttatcactgtggtttagtggagaggatctacagattggatggatggcagtgttgccgaggaagagagtattcactacagcacctgggattctggccttaagttatttggaacagaattggggccttcagagtgttattgtgaagttccagtgcctgaagtgtatggctttagaaggtaaagaccataccatgatgatgataataaaaattaataacaatagttacgttctaggccttgtgttacatgctttgaatgcgttatctacttactctccatgagaaccctagaggtagttactgtttttagacctagtttaaagataagaaaattgaggcttagaggtgaagtgtgcccaaggttacacagctttgtcagtggtagagttgggatttgatcctggatttgaatgattcctgaccctgtggccttaactgtgatgctatactgtcaggcctgcaatttatcttctttcttgctttgctacagacttaaaggtttcagcctaatttttcctctttgaaagcatccattgctcctgcatcttttatgattgattcttcttgccctaagcctatctaatcaggtacatggtgggaagggcagtctcttcagctttcctcttcctgattgctctcaaaagttagcctttttcctgtttaagaaatcaagaataacaagagatacacatagagaaagttaccaagttccaggatctcggggagtcacatcatcatggttcctgaatttttctgagatgattaaagggactgaattggtttctacccccaccattttaatttatgttctttcttcgtttgctacagatttcaaggtctcaagtctaattttccttgagagcatccattgctcctcgcatcctttaggattgattcttcttacccgaagcctatctgatcagggacaaatgtgtgtgaaggaggcccatgtttaggatgggcttctccgcacacaagagaaaaatcccaaatctaaaaactaaaactcacctttaataagatctgtgggtctcttttatcacgtgtctctttcccacccataagttggagttaaggtagaacagtaggtgctcttggctttaagagtgctaatcactttatcttcttaagctcattagaacttcacagtaacagtaacacaaggtggatatcccacccccattttatagatgaggagactgagatttggaaaagttaaatactttgtgcaaaatcattgaataatagagatgatattcaaactcatgtctgtgtggctcttgagattcttttttttttttttttttgagacagggtcttgctctcacccagggtggagtgcagcggtgcaatctgtacgcactgcaacctctgcctcctggcttcaagggattctcccgtttcagcctcctgagtagctgggactacaggcgtgtgccaccatgcccggctaattttggtatttttagtagagacagggtttcaccatgttggccaggctggtcttgaactcctgaccttaagtaatccaccacagcctcccaaagtgctgggattacaagcgtgagccaccgcacgcgccctcacgttgagattctttgtgaaattgccgcaagttaaaatctgaaccatagcaaagaccctctccaagacagaaactcagtttttcacataaaccttagacttaagtgctatctcttatcacagagaggcttctgttgtaatgtgggcattagtcatttttgataattcagaaaaatcattgctactatgagcgttgagatggatgaaatttttgctgtaattacctgaattgcatgcagccattgaaatcttccttaacttgaaatgaaaaagaactttagaaaaacatgttttatctgtctcaccagttaaatgctcttagtagagctcttctagtattttgtagattcttttggaatcgtgcctgtttcacagaggcagagacatgcaaaccttagaatggaagttgagctgtttgaagtctgccttcataaaaatgtcttattgcagcagtatattgctttgcatgtagtaggcctctggtattgaatgaatgaattgagatctgggagaaaaagctaaaggaaaggagttcattttgtcgtaactgacttttttttattatccttcatttttaattacagcatttgtggttgatacaattgtatgggttagctatggctttatagataagtagattttgagatgaaagaaggttatactttttaagttcttattttaaaatctccactgttaagagtcaaaatcaagtttaaaaagaatgttgcagctcaattatttaaatttaaattttttatttggaagtacttagtttcactggaagttgaaaaaaaaaatgtataggaaggttctgtatacccttcacccagtctcctccagtggtaacattttacatagcagttatgcagagatcaaaaatcaagaagttgcccttgtttcaatcctcagagtttattaggtttcaccagttttacatgcccttatttgtgtgtgtgtgttttttgcaattttattaaatgtgtagatttgtgtaagcaccatcatgatcaagatacagaactattctctcaccacatgaagttcatttttttagcttaccttattttgtaatggaatccccccgtcttaaatcttctgggtcaaataattctccatcttgtgtttgctcagatctagagataaaacacatcgtcagggttcttaaatttagacagcttcggttgacatggtatgtgaggttcatatgataatcgtgagagataaacctgcactttcatgggaaaagccatggatagcagtagcagaagataattggcaacagatcttttctggatgttggaggagaggctttggaataacagtctcattgtgatgttttctgcttttgttataggtttgccatgagcagactaatgataatagctaacatttgttactgtattcattggttttcaccgcagcccctactgttatctctgctttaaagataaggacatggaaacttaagaaggttgagtaactagtctgaagatgcacagtgaataagtgatggagttaggatttaaatgtgggtagactgaccctacaacttgtattcttctccacagtgctgctatttagcagacacagaaactttcatgagtaagagtagcaagttctgagtttttgacttttgagcttggggaagatgtgcctagaaggaatgagtaaacaacgagaaattatatgaggtgcacattttgagtggggtatttggtgtctaggttattctcactctactaatctgtatgacctcaggcagtgcatcccctctgtagaccttagttgccttgatctcagatgtatccacatggatctgattttctgtaggaatttctcaaagattgtgaaggcagtgtgttactcttttgattctttcggttatttgactcttgttggagtaggttcccaatgccaagaaattctgggtcttgtggcgatttaatctggccaactaccaaattataggtatttgaggatagtttttctcagctctgggattttttttcttaaactgcctcatatctattgttaagtcctcatgtctgttgtaaaaattcaaaggtgctttgtgttttttctgtttttttttttttgtccttgagaggaccatttcataggaatttgaaatgttttctgtgaatttgaggagcacttatggccagaatatgcttttgcaaaatactctagttgagagttagaagtgtttggagagttgaggaggtagtagttatttttcaacagaatggagctaagaatttcaactaagaatggaactaaggaactaggagatcttaaagtctctttgagtattaagcatctcctttctgtctccacacttgaggcaacagtctaattggggcaaatggaagagaaatgcttcctgtaagagctagtgagcagaatctgtatttaatttttgagagtccttgaaattaacagatggatctatggtcaaaaaaaattgccaaccatatttcttattacattatacattatatattatataatatatatattatatatacattttacattacatataatgtatatataatgtatttcttatgttataacgtatttcttattacattatgttatatataatgtttcttattacatatgttacatataatgtatttattacattatatattatatataatgtaatatatgttatgtaataattatatatgtcatatataatttaattatatgtcatatataatttaattatatatgtcataatttatatatgtcatatataatttaattatatatgacatatataatgtaataattatgtgtcatacatatatgtgtcatatataatgtaataattatatgtgccatatataatgtaataattatgtgtcatatataatgtaataattacatcatatataatgtaataattatatatgtcatatataatgtaattatatatgtcatatataatgtaattatatatgtcatatataatgtaattatatatgtcatacataatgtaattatatatgtcatatataatgtaattatatatgtcatatataatgtaataattatatatgtcatatgtaataattatatgtcatatataatgtaataattatatatgtcatatataatgtaataattatatatgtcatatataatgtaatcatatgtcatatacaatgtaataattatatatgtcatatacaatgtaataattatatatgtcatatacaatgtaatacttatatatatgtcatatacaatgtaatatatgtcatatacaatgtaattatgttatatataatgtaattatatatgttatatataatataataattatatatgttatatataatgtaataattatatgttatatataatgtaataattatatatgttatatataatataataagtagtaattacttattatttataattaggtgtattctgagagtcttgatcctttgtttttcacattttgacatttcatgctcagattttgagactactttgttgacattattcaggcaaagtctcagttaaaatggagtagaagtttttgtactttaataccgaaggggtagtaaaagcaagggtggtcagatcttgaaactggggacaaagactgctagtatcagctaatattttcacacccctgcccaaatgtccctctttaatgcaaattggagttagtaggttctcaacaagagagtggagttcccccttgggaactgtccttgtcatgggccaggagtggggaatagcaggggaaggtggtggcagactaactagtaagattagttctggacacagggcagaaggaaagaacaccgtaggcttgtgccttctctttgtttccttgttctttagtgcccgcagtcagtctccttgttttttttttctggccacaggatagtaaagggcaaagtcctggaggatgaaaaacagttcagcaccctcattgagtttgttgccttgataggtttattctgatgttgcagcagtcccctttgtcactagagcttctgagacagtttctagaattagactgaaaaaacatagctactcaaagataatcaaaagtgagaaaagtcagaatagtgtttacttctgggggctgggagactgagggagcctgtgagggaactgtaaacgttctgtatcttgatccgggtggtggttatgtgagtgtatcaaatgtggaagttaatttagctgtacacttaagtttggtagacattatatggtttcatatttgtatattacatttcaattaaaaaatgaaaaaacccaccaaacatccatagggaagagcagacctatgtatctttaattctagcctagcattccacttctctgattctcttggtaggcaaattacaatgaaataaggctcctttggccgggattgtgtgaactctgggtagagggagaacagaccagtgccttggttaaggaacaggagcccttctgtgctcccttcactccttactggctccctgctgtacttctgaggaaagtgaaagcccttccgcttcctatttcttattgaaatatcttgcacttcaagaaaaagagtttggttcttaatcctttcctgagattccttatttgatctcccgttcccaactctcagtaaatttctgccccaggctccttgagaatgggttggatattgaggatgttgaaaatttagtactatattcttttgaccaggggtttctgagggagtcagcagagttttgtctgctttggtgtggctaagagggtcagttgaatatgggcatctctttccctttccttgatcccacactgaatgaacctgtgtgatttccccacttctctgctccttgcagaccccttgtctgtgtcccctgcccgctgggctgaggaatatttggagcaatcagaggagaagctgtggctgggagaacctgagggaacagccaccgatcgctggtgagttcagatacctctttccgaatcccgtgaaaggagtatggacagttttcccagcctcctccatccacgttctcgaaccaacttactttattcttttttttttttttttttttatcattcttgggtgtttctcgcagagggggatttggcagggtcataggacaatagtggagggaaggtcagcacataagcaagtgaacaaaggtctctggttttcctaggcagaggaccctgcggccttccgcagtgtttgtgtccctgggtacttgagattagggagtggtgatgactcttaacgagcatgctgccttcaagcatctgtttaacaaagcacatcttgcaccgcccttaatccatttaaccctgagtgaacacagcacatgtttcagagagcacagggttgggggtaaggtcatagatcaacaggatcccaaggcagaagaatttttcttagtacagaacaaaatgaaaagtctcccatgtctacttctttctacacagacacagcaaccatcggatttctcaatcttttccccacctttcccccttttctattccacaaaaccgccattgtcatcatggcccgttctcaatgagctgttgggtacacctcccagacggggtggtggccaggcagaggggctcctcacttcccagtaggggcggccgggcagaggcgcccctcaccttctggacggggcggctggccgggcggggggctgacccccacctccctcctggacggggcggctggccgggcggggggctgaccccccgcctccctcctggacggggcggctggccaggcggggggctgacccccacctccctcccggatggggtggctgccgggcggagacgctcctcacttcccagacggggcagctgccgggcagagggtctcctcacttctcagacggggcggctgggcagagacgctcctcacctcccagatggggtcgcggccaggcagaggcgctcctcacatcccagacggggcggcggggcagaggcgctcctcacatctcagacgatgggtggtcgggcagaggcgctcctcacttcctcgatgggatggcggctgggaagaggcgctcctcacttcctagatgggatggcggccgggcagagacgctcctcactttccagactgggcagccaggcagaggggctcctcacatcccagacgatgggcggccaggcagagacgctcctcacttcccagatggggtggcggccaggcagaggctgcaatctcggcactttgggaggccaaggcaggcggctgggaggtggaggttgtagcgagccgagatcacgccactgcaccccagcctgggcaccattgagcactgagtgaacgagactccgtctgcaatcccggcacctcgggaggccgaggctggcggatcactcgcggttaggagctggagaccagcccggccaacacagcgaaaccccgtctccaccaaaaaaatacgaaaaccagtcaggcatggaggcgcgtgcctgcaattgcaggcactcggcaggctgaagcaggagaatcaggcagggaggttgcagggagccgagatggcagcagtacagtccagcttcggctcggcatcagagggagaccgtggaaagagagggggagagagaccgtagggagagggagagagagagggagagggcttactttattctttaagatttccccttgggttattactcctgtgaatttatggttgaaatgtagtcaaggacacggtggttgtgtgcctgtactcaggaagctgaggtgggaggattgcttgggcccaggaggtcaagtctagcccgaggaacacagtaagaccttgtctttaaaaaaacaaaagcgcatgcatgtgtgcgtgcacacacacacacactgtacacacgcatacatacacatacatgtgcacatacatgtatatacacacgtatacatatgtaaacatgtagatacatgcgtacacatgtatacacacacatagacatacatgtatacacacatacacatgtatatacatacacacatatacacacgtatatatacatacatatcagctatatttgggaggaagggagttttcagacttttaaaatatatgtatataggtaaatatatatatatttttcaagaatcctaactatcctatatgacgttcataacttcatcttaaagttcataattttaccttgttcccttcttaattttgagcctgctactatcccatctgtatgcaaagatatgtttgggaaagggagagctagaaggatgtagctagtactttcacactcctgcccaaatgtccttctataatgcaaattggagtttgtaggttctcaacaggagaatggagttccctcacaggaactgtcattgtcatgggctaggagtggggagtagcatggggagggtgatggcagactaatgtgtaaaattagttcttacccgttccaggtatgatgaatatcatcctgaggaggatctgcagcacacggccagtgactttgtggccaaagtggatgaccccaaattggctaattctgaggtgagccacatccctctgctgctttgcccagcagagctggttttggaaggcaagaatcttgcttttcttaccccagtttagtttaaagagaaggagaagagatcttaggtctcttcgttcctgtctatagaacagagacttaagatcctgcctcttccttctagtgttcattccctcatctccttgcctactaactcttttttctgatgcctttgcaagtctttagagccagaaatccctttctttttgctctctacctcttttagggtctttagcatatcttgtctgcagctagagatggtcaggggaggggtgagtacagggtcctcttgggcatggttgagagtgcacacctggaagtcctttcccaagtggcctgtgtgtgtctctgtgccccagttcctgaaattcgtgcggcagattggcgaagggcaggtgtccctggagtccggtgcagggtcgggccgagctcaggcagaacagtgggcagcagagtttatacagcagcaggtaggacattgtcactttccagtcccacttcagagccagctgatgccccaggccatgggttcagtggtcagtggtcccagatggggaaggataagaccagcttgtcttgatagcatccaggtcccaagtgggtgggaaagagattctgagaatgattttctcagaagtacccaggttggtggtggttagtgggtatttagtgtgcgtctgatggatagaaagttggtggtagtggtactgaccatccttttttgtcgcagggtacatcagatgcctgggttgaccagttcacaagaccagtaaacacatctgcccttgatatggagtttgaacgagccaagtcagctatagaggtgagagcagatagtgcaggagcagacaccccaaaagaaaacactccttggagtgagtgggtgtatgaacatcaaagatgatgcaaattgtatttcatagtggacctggatcatctgtgtcagagttgcttggggatggggtgggtgctgttgaaaaatgcagatttctgggccaggcatggtggctcatgcctgtaatctcagcactttgggagcccgaggtgggtggatcacctgaggttaggagttcgagaccagtctgaacaacatggagaaaccccacgtctctactaaaaatacaaaattagcgtggtgtggtggcgcatgcctgtaatcccagctacttgggaggctgaggcaggagaaatgtttgaaactgggaggtggaggttgcaacgagatgagatcacgccattgcactctagcctgggcaacgagagtgaaactctgtctcaaacaaaaaactaaactggactggactggactggactggactggactggactggactggactagactagactagacgactagactagactctagactagacactagactagactagacactagactagactagacactagactagactagacactagactagactatagactagacactagactagacactagactagactatagactagacactagactagactatagactagacactagactagacactagactagactatagactagacactagactagactatagactagactatagactagactatactacactacactacactacactacactacactacactaactaaacacacaacactaaacactacagatttctggccatcaccccagactactaaatcagtatctggggatagcatctggccatttgcattttaaaaaagttattcagatgattcttaaacatattgaaattcaagaactgctgccttagagaatcccagcagagctgagtgtggggtggggtggtcatgatggatctcctttttctatctgctttcccttccttacagtctgatgtcgatttctgggacaagttgcaggcagagttggaggagatggcaaaacgggatgctgaggcccacccctggctttctgactatgatgaccttacgtcagctacctatgataaggtgaggtaaaaactcttagtttttcaggttccagaacttccttctttttaacgtctttcctttaatcctgaatttgaagggtgcttttaagtattttcttgagtccctttccacgaaaagaagtctgaataattcccttgcccttcctcttcagtgattgagtataaactttattcttgggatatagatgttaatgagactatctttgtcaataatgacagtccagtacataacacctgtgaaggaggtttgcacatgcttgctgcattaaaagcacagaggaagtagctctgcttggaggtcagattgggagctttttgagaagactgctaactcctttggtgggcagtgttagtggacagactatccctttgcctccacatcttaatatctgtttactttttaaactcacatattcattttaagttcttttataggtagtagccacttgccctaatttagggttttcaaagaatttatattagataacttaaatattagggaaatttcttagtagtatgaaagatgattgcattttgcctatagcatgtgctgttgacttagaagcatatgttacttctggggtcttactgaaaaacaaatctacctgtgggttgtaggatatttggggatgtgtttaataactgagctcctgagttgaaacatgaagaggggaaagaatcacttggttttgaaaaaaggcaaaacaggaactggggatgtgagtagtgatgtctttttctcagttcagatctggttgggaaagtattgtggggctggaaccagggcctgagatgcaaaccagggtgctggagatggatcttgatgtaataagggagctatgcaaagatgggaagatgcagttcagaaaaaggctagagtttgagagccagtgaagaacagtattaggaaaaatatgattttgcttattattccagtctgatctggatttttctaactatcctgtgtgatataagggaaaagacagctgggaccttgccatgtatttcactagactatgagttcattgtatataattttgataaggaagaactgaaggaaatatagataacacttttgttattattttgtattaacaatttgataagtcacataggccccatcaacttataaatggaaagttgtacatttatgtaaaaatgtccatgcttttcatacatatagacataatactagttttgtatgagcagcattttcttttatcatttattactctcgtatttatgacatgctggccagaatacatttttttttttcagacacatagaacaatgtgacaaattagaaagcaaatttttttttagaaaaaaaatcacatttgatcaggttccaagaatagaaatgtggaaaggatagtcttttcgataaatggtattggagaaactgcatatccatgtgcaaaagagtgaaactgaaccgttacctcacactatgtacaaaacttaatccaaaatggcttaaagacccaaatgcagtacccaaaaccgtaaaatgcctagaagaaaacatagggagaaagtttcttgacattagtctttgcaatgatttttgggatatgagcttttggtgtcacatccagaatacattttttaattaaaaactttaaaagtatgtttgtagattcttgagccctacttgatatcattgatactttgggatattgcaaaattaggactagaaatacttgcattaatgttcctcaaaaagtgatgtagtaagcaattagtatctggctttaagctaatattgaattccatgtcaatagaactttttaaaaacaaaggacttgactcttgattgttacataaattcatggatctctttgaatgcactgtttgtttattgatagcccttatattttcagagacaatttacattgcagctcaggcagatattaatatactattatgataaaagagaagtatgtgatgggacaaactctttgtagtgatcatttctgcagtttgatcctatgagattttggagcagaccagaccgtgtatcagataaaattaatgacttgggtttggcttttcaggatgtaacagtgaagccaagcttatcctgtgttctgtgggttgttgagggatcccccagagtactctttttccatcatctatgcaaatattctaattttggaaaattcctctttgatcagcaattgatgagacttcaaggagggtagataatatggatgagaggaaacttagagaatcctgtggttgcaagatggtggcattgagttgttgtattatctaatgaagacacctgaagagcattcgcatcacttctggctgtcatatacaggccatcatatcttaaggaagtatccagagcagtgaggataatagctatttacagatagtatcttaagctttttggtaaggcgttggtgaagattcccatttgatgttctcaatggctctgagaggcaggaattacttttattaggaaactgcattatagatgacagtaatctctgttttctgtagagtggcttaaaacacgtattaatgatgaacaatagttgaggttgaatgcagaaggatttattttattgaactgtaatagtctagggcaagggccagcaaactggcttgtgggataaatctttatgtttttagtgatccactagctgaggatggttttaacatttttaaatggttggagaaaatcaaaagagtaatactttgtgacaagtgaaaattatataaaattcaaattttagtgtccataaataaaatgttattggaagacagccgtgctcatttgtttacttatgtctggctgctttcgcactacaacagtagaggtgagtagttgcagcagatccacgaagcctgaaatatttattatctggcccttcgcagaaaaagtttgctgatcactggactagcgtcattttctgccttctgagtttttatattatgcagagatgtccaaaaacacacttgttttcaatataaatatactttctatacatttatctcaaatctacaatatgtctttcttcttaaaccccccattgtaattatttaattttcatttgtgacaaataatttgcatctgatcatgacttagaattttgctggtaagatttaagtgtttttgattctttatcattttcacaataataatgaaaaagggcctcatgtctttattttgtacagttttatctgaatttattcttaactgcatttagaaagacctccacctgttgttttgcatcttgttttcgttctggtgtattattttatgatggtaactactctccaaaaacggactttttatttgcatgtcccaaattttgcagcttactagtgacttcccctttacctcatttcttctctgcctagtgtaaaatgccagttgacaaagctttgcagatagtatcgtaactcttctctaaagtgagaaatcctcagctggaagagaatggtgtctttctgaagtattctctgccatctggattttgggatccagcttttgcttactgtcagatacagattaatattcatgattattaagaatgaaatcggggaataaattaacattttcaaaatgcttgaaaatgttttatctagttgacatgtggaatgactctgagctaagtaagagttatatttgaatagcaggactccaaacaacatttcctttatacatcatcacattattgaaggataacaagaaatgcactttgcatagctagggacactttgtctcattactataagcagatcctgttgagacattctgccccgtggtgagaagtcaaggtgtgggaatacaagcctgtgatgacttcctaaaataagcttatttccagcgcagatgaatttgtagactttcctagcttcccaggtatcatgaacaggagatgggagcacaaacctgataccaaatgattttacttgtgtcatacatgatctttataatatggagaatttgccagcaattaattcaggaacctgtttggaggccctcagcttctctgcctgctggttgtcatcctcacatccctgctgttctgacggtgccacctctcagtccatctctcacgtgcttttcttgtaggggtaccagtttgaggaggagaaccccttgcgtgatcaccctcagccttttgaagaagggctgcggcgccttcaggagggggacctgccaaatgctgtgctgctttttgaggcagctgtgcagcaggatcctaagcacatggaagtgagtgactccatagtctcatttctggctagagactgcttcctccatcttgagaaaggccccaaggagagtagtgcagatgggttagggcctgggtgatggcctaggataggggcttgagagcgagatggtgagtgggagaagccagggggaagggcgaatggagaggtgaatatggggtgatggaatctgtcaacttccctctaggcttggcagtatctgggtaccacccaggcagagaatgaacaagaactattagccatcagtgcattgcggaggtgagtacactgaaaggtgtgggtgaggtgcttccaaggctctgcatataaccttttgaatgacagaagcccagacctggatccttgtcttctttctgagtgctatcaagagtgttttctcatgctgaaactctgagggttggagtgaattccattccttcatcggcttttgattttatttgcggctttggttggctccttgcctgctaaaaccttccccttagatctgtaactttattattaactcatgtcagaggagtcacaggtgaggccattgtgactctgcatttcaaagcttggcttggatcccagggtgctcacatgtgccagtgtcagtcattgcagatatcaagtctgcccatccctgatcaaacaggtgtctggagctaaagccagataaccagacagcactgatggcgctggctgtgagcttcaccaacgagtccctgcagcgacaggcctgtgaaaccctacgagactggctgcggtacacaccagcctatgcccatctggtgacacctgctgaagaaggggctggtggggcaggactgggccccagcaagcgtatcctgggatctctcttgtctgagtgagtatgaggggttcctaggatgaggaattacagtaacctaagtcccagtaggagggtgaccttggttttggaagtttggatggattgagactgaagggtcctgagaatgggatgggaaacctaggatcaagttgaaggaggtctgcattctacagttcagtgctaggatgaaatagaaaaacaggcttctatattggactttgagagtagaagagatgactgatagattgatgaatgttggggatatggttgatcaatgaagaaattaatttggggggatgggaatagagacattcatctacctactttgtgtttttttccttttcatccagctccctgtttcttgaagtgaaagagctcttcctggcagctgtgcggctggaccctacctccattgaccctgatgtgcagtgtggcttgggagtccttttcaacctgagtggggagtatgacaaggccgtggactgcttcacagctgccctcagcgttcgtcccaatgtgagcccaggggaggaatggaaatgggacatgactgtgtaccttattgaagagccatttgttgggaagctgggtttgatggtgcatgcctgtagtcccagctacttgggaggctgaagtgggaggatcacttgagcctgggagttcaaatccagcctgggcaacatagcaagaccctgcccacccccacaaaaaagaataatttgttcagacttttggagtcttggggtatttcattccagtgttccatgtactgactgccttgggaggactgggaaaagaaggctgggagtgtagggtcatctggacataagagagtctgcatagggtgagaggggctacattgtagccacacaccgaactgttgagaatggaatgggacgaaacatgttagctaacagagtagtgaaacagctggagtaatgtgcagagtttgatctgagtcggtggagtaatgtgcagagtttgagctgagtcaagctgttcccatccgttctgcatccctatcccaggactatttgctgtggaataagctaggcgccaccctggccaatggaaaccagagtgaagaagcagtagctgcgtaccgccgggccctcgagctccagcctggctatatccggtcccgctataacctgggcatcagctgcatcaacctcggggctcaccggtgagagtatctattgagaaatgaatgaatgagctttttctccctgcctttggccctagctccttattcttagatcctgtttgactaaccagccctagctttctccctcccactgctagctgacctgcttccttccattgttgttcagcttaacagctctcattcctcttcttccttacagggaggctgtggagcactttctggaggccctgaacatgcagaggaaaagccggggcccccggggtgaaggaggtgccatgtcggagaacatctggagcaccctgcgtttggcattgtctatgttaggccagagcgatgcctatggggcagccgacgcgcgggatctgtccaccctcctaactatgtttggcctgccccagtgacagtgggacgggctgccctgtgagtgtccacctggagggatccccgctttggatgtgattccctctccccaaatgggcctaccaagggggcgggctgatgaccataagcggtacggcctttcaggagctgcctcaacgtaggggtgggtagtctgtgttctagttcctacataattgtaggaaaatgagctgtgtcatctctgagtcccttggtaattcaagggctgtacatccagctacagatctctctgctcatcatgccctttcttggtgctgctttttgggtaggaccccacgatttagggtaactgttatcatcagctgccatttctgatagggtctaccacatctgtaatgtctgtcctttcccccacttttactgggaattgatagtccagcttccttgggcagtgtaagtaggaggttcatctgctgtgcgcctctaatgtctgtctggatgggatgtgttaggagttggcctgttgggttgaattgttgatttggctgagcagagctgagttttggtaggagtgctcatggttctgtcattcttggacctctcctggctgagctctgattccctgtgagcacgatgctgatgcaatagtcctgtgtcatcactgcagcggtcctcaggagctgccagggccaattgctacagagtgtctgggtgtgtggcataggaggaaggtttgcttgtgaaatgaggctgggtgggagcggggagggactagatcagaagagatcaagggctgtattcaggaacgttggtgggaggacagagcaagtgggaagggggtatggtgagtgcggcaatccctcatcctcttagaagcacctgtgaatgggaattgagccaactgttatagaaaattggttcagaaagtgcaatcttgccagatttctagcaaataggttcagtgttaccataagcctttgctgtacttcttgaaatgtttctaggggagagcattggaaaatccccttcccccatctagatcgaaggaagatgagggagcagcttggattcttctcagttgtcccctgcatggggagatacactaacccccagaaatgactgctaagcctcttgccttgtctttagtagctaatgatcagagagattttttttttaaactaccatggtcccaggattccatcctgaaatttatttttctttgtatgaatatgtgtaaatgatttaaaaataaaactgtaaaatatttgtacgaagaataaatggaactgatgtgggtatgagttctgctggtcatgaagctgggatggcagaaggtgagttggcgtttggaggactgggattcaacagtttctgcctttcaaattctcactggtatattggttacctgctcatccctctaaaaatgatagagcacaggagacagggtccctgttctctgggcctctgggctagcaggagaaagagatgtcgataatcatgaatttttactcctgttactactacaaaggaaagtgtgcagtgccatataattgttaggttgttttgtattatgaattacatggaaggattttgatagtttttcagtgcttagggtttctaaagcttttcatctggctctgcctgcctttatcgggaactgtattaagtgccatatcaagatgggtatttatcctgaggaaaaatttaaaaatatacacaaatatttatacttggagatagatgtttgtgggcacattagacttggaaaaaaattttttttttttgtttttttttttaaggcagcgtttcactctttttgcccaggctggagtgcaatggcatgatctcagctcactgcagcctccgcctcctgggttcaagcgattctcctgcctcagcttcctaagtagatgagattacaggcatgtgccaccacgcccagctaattttgtatttttattagagacagggtttcatcatgttggtcaggctggtctcgaacgcccaacctcaggcaatccgcccacctcggcctcccaaagtgctgggattacagacgtgagccaccgtgcccagccaaaaaaaagtctaacttttaaatttatttaaaaagtttttcaaatagagactagatctcactatgttgaccaggctggtcttgaactcctggcctcaaggaatcctgcctcagcctcccaaagttctgggatcacagggaggagcaccatacctggccaaagtctaattttttttttccggtgagctcaaaagctgccagaaaaaaaaaaaaaaaaaaaaaaaacccaaaaaacaaaaaaaacaggtctaaaagacaactgggtaagtaaattgtccagacagtgaaatatagctattgctatttaatcatttatggaataatttccagtgacaatagatgctaacaatatagtgagaaaaatggttggtcaattatttacagattgtcttaagaaaaaaatgcattgaaaagacaatagggaactatcccaatgtgctaaaagtggggagatcatacttctctgtaattctcaaattttcttggtgcatgtttgatacttttctagaggagaaaattaaacacctgggggaggaaaacaggaagctgttgtggcacctgtcaccacctgggggatcacgaggcagctggtgtcttgggctctgcaggttggtggtgcaaagacccaggcgggaagtgggctgggcaggtggaggagcagtttccacactacataggtgcaggacatgacaaagtctggctgtgtaaatgacttaagaattaagctataaaatacctaggaatccaacttacaagggatgtgaaggacctcttcaaggagaactacaaaccagtgctcaaggaaataaaagaggatacaaacaaatggaagaacattccatgctcatgggtagaaagaatcaatattgtgaaaatggccatactgcccaaggtaatttacagattcaatgccatccccatcaagctaccaatgactttcttcacagaattggaaaaaactactttaaagtccatatggaaccaaaaaagagcccacatcaccaagtcaatcctaagccaaaagaacaaagctggaggcatcacactacctgacttcttcaaactatactacaaggctacagtaaccaaaacagcatggtactggtaccaaaacagagatatagatcaatggaacagaacagagccctcagaaataacaccgcatatctacaactatctgatctttgacaaacctgacaaaaacaagcaatggggaaaggattccctatttaataaatggtgcagggaaaactggctagccatatgtagaaagctgaaactggatcccttccttacaccttatacaaaaatcaattcaagatggattaaagacttacatgttagacctaaaaccataaaaaccctagaagaaaacctaggcattaccattcaggacataggcatgggcaaggacttcatgtctaaaacaccaaaagcaatggcaacaaaagacaaaattgacaaatgggatctaattaaactaaagagcttctgcacagcaaaagaaactaccaacagagtgaacaggcaacctacaaaatgggagaaaattttcgcaacctactcatctgacaaagggctaatatccagaatctacaatgaactcaaacaaatttacaagaaaaaaacaaccccatcaaaaagtgggcgaaggacatgaacagacacttttcaaaagaagacatttatgcagccaaaaaacacatgaaaaaatgctcaccatcacgccatcagagaaatgcaaatcaaaaccacaatgagataccatctcacaccagttagaatggcagtcattaaaaagtcaggaaacaacaggtgctggacaggatgtggagaaataggaacacttttacactgttggtgggactgtaaactagttcaaccattgtggaagtcagtgtggtgattcctcagggatctagaactagaaataccatttgacccagccatcccattactgggtatattcccaaaggactacaaatcatgctgctataaagacgcacacgtatgtttattgcggcactattcacaatagcaaagacttggaaccaacccaaatgtccaacaacgatagactggattaagaaaatgtggcacatacacaccatggaatactatgcagccgtaaaaaatgatgagttcatgtcctttgtagggacatggatgaaattggaaatcattctcagtaaactatcacaagaacaaaaaaccaaacactgcatgttctcactcataggtgggaattgaacaataagaacacatggacacaggaaggggaacatcacactctggggactgttgtggggtggggggaggggggagggatagcattaggagatatacctaatgctaaatgacgagttaatgggtgcagcacaccagcatggcacatgtatacatatgtaactaacctgcacattgtgcacatgtaccctaaaacttaaagtataataataataaaataaaaaaagaattattctcttaaaaaattgtgaatgttacattattcatgtttttacattaaaaacatgaatagatgttgaaactaatttctttggaaatcttcggatatagactattacctattaatataatactgataatgatatcagtattatattagtcaaaagttctaaattcatcttgggattttagaaattatattgaagctagcatcaatgagcaatacaattattgttgataacccaaatttatcagagacgtggcatcttaaaattttactcagattatgcatttgggtgactttgtagtccgcaaaatttgcagtcactaaggctaaggttaagaaaactattttataaatggacaaaggacatgaacagacacttttcaaaataagacattcatttggtcaacaaataaatgaaaaaatgctcaacattactaatgaaatgcaaatcaaaaccacaatgagataccatctcacaccagtcagaatgactattattaaaaagtcaaaaaagtaacatgttagtgaggttgcagagagaaggggacttatactctgttggtgggagtgtaaattagttcagccactgtgggaagcagtttggaaatttctcaaagaacttagaactaccatttgaccaagtagtcccattacagagtatatacccaaaggagaataaatcactacccaaaagacacatgcactcatatgttcattgcagcagtattcatgatagcaacgacgtggaatcaacctggatgcccatcaatggtggactggataaagcaaatgtgatacatatgcaatatagaatactatgcatccgcgaaaaagaacaaaatcacgacctttgcagcagcatggttgccgctggaggccattatcctaagcaaattaacacgggaacagaaaaccaaataccacagattctcacttataagtgacagctaaacatttagtacacatgaacataaagataggaacggcagacactgcagactaccagagaggtggagggggatgaaggttgaaaaactgttgggtactatgctcactcttctgggtgacgggatcatttgtacaccaaacctcagcgacatgcagtttatccatgtaacaaacctgcatgtgtacttcagaacctggaataaaagtcaaaaacaaaacaaaagccattttacaaagacgcgatttaaattatttgtaatcaatttaaatatattaattaaattaaaaaaaaatttttttttgagatggagtttcactcttgttgcccaggctggagtgcaatggcacgatctcggctcactgcaacctctgcctccccggttcaagcgattctcctgcctcagcctcccgagtagctgctattacaggcgcctgccaccatgccaggctaatttttgtatttttagtagagacaaggtttcaccacattggccaggctggtcttgaactcctgacgtcaggtgatccacccgccttagcttcccaaagtgctgggattacaggcgtgagccaccgtgcccggcccaaattccttaaacactcacacccatatatacattacctactcttaaataatgacaaaggtaataacaacttactttatctccagggcaagtgtaagtgatttaaatttcatttaatctagtattttagaaaggaaaatccaaactcttgcataagctgtaataccatgtttgcatttttattttacactgtgggaaaaatgggagagaatatttatatagaactattgtatgtccaaagttcacaaattgatttactttggagtaaaattgaattatcatatttattttacgatcataacttctatttttttgtttttaagatcttaggacaaaaaggtttgtaaataaaatatctttcaatctgtaactatatatttgaatgaaatttagacccagaacctggaataaaagtcaaaaacaaaacaacttttagaaacttagacccaaaactttctgtattatttttattttctctttagtctttacgtgactattaatcactagcctattgcccatttgtatttcttttgtattttttcttgtaacacagcagggaccctgaagtcattaaaccaaagtaagatttcctttatttccatccaacaactttttaaaggagataaagtgtttgtgttagagaataggaatgtttaatcttttgttaataaattattactttattcacactaattcatacgtgtttattttttttcttcacatcaatgtagtagttacttttaaccatgactttataattcaaagtaatccagtgtttcatttgaaaaaacctttcccaagtagaaaaccttcattttaagatttagttctatgaactatcagcccatggggaatattaacatatttagtagatttgggcaaattaaggtggtgacaattaagaatgtgttctcattttccaagtaggaaagtttttcgtaaagggcaagtgcatttaaagcattcagagtttggtttgggatttaccttttcttgggaagtatattagttatatcttgctgcataaaaaccactccaaaatttagtggcttaaaacaacaataattaattatctctgactattctgtggattggcaatctgggcgcttcttcgctgtactcaccggggaacattcatggggccacctgccgtcatttgatgcctcaactagggctgggatgttccaaggtggaggagaattcctcagtaggtgagacggcctcgttacagcatggtggtctcagggtgtcaaaatgacagagcaggaactgcaaagcctctcaaaagcaagtctctggatctcacacaatctcactcctgtcacctttcattggtcaaaacaaattatttattttacaaggctctgcctttggtcccacaggcaggaggtcagactgctgcatcagggcaggcataactggggccgcctgtccctgtggagaatgacccttggtggcctgggctggctgcaggggctttgcagcctccacccatacacccaagctggaaatgacttagggggccaacagggacactataggccctgctgcatagcgagtgtcctgcatgtgcacctgtacattcctcccctccctgagttgtacgggctgcactgtgcctttaccctaagtcccttcacagtcagtccctggctgttgtccctttgtggtggtcagcaagagacgtgcagtttcagttccatgcagagtgggatggcaacttcagggaggggagttagttagtctaactaatatcagttagacgttattttacttataagttcaaccctgaatcaagggtgtgaagaaatagactccatctcttgatggggagatggagagagaagaaatgacacactgcaaagagatgtggatacagggaggtatgatttattgacgattattatgatagtgacctatcaccagtagcctttaagagtccttccaggattcatatagatgcttaatggtctttcttatatcaactaaagtaggaattcattgcaattgagacactttctggtctttaaatataagaatattctagagacgggcaaactattctaggtcaaagtttcctcaagtggaaactgtacgactgggttttattcaatttacccatttgtttttctttagaaatatacagcctctgcagacactgcttctgaatgaacgggctggagtttccttgggatcctgaactcatattggattctctacctaccatcttggacaattcatgtaggaaaacaaatcctcatttgttcaaacaatagatgaaaattattaaagttttgacacatattaaatggcggccttgtgtttcaaagaaaaggaaagagatagttgaatcagggtaaaacaacccactcacaaccttaggctaagacactcacacagcttgtcttctagcaaactgcgtatttaatctgctaaggcaatggggaccttgtcttgagataggactgccactcagggtcatatcttttgttctcctctaaactctactctagttgaagttttctaacaatctgggaacccttatcccccaatccctgcagaatggcttaatctaacacgtcgtaaagaaggaaacttcttgtcttaacttggtttaaaaaatctttctaacgacacaattttcaaaggcttcatcagtttaaaaagattattgtgctgactccattagcaatatctggcagccgctactaggcagcaaaacctaccatgactaccactattatatatttgcagttctcttactttttggtgtttttttgaaaaaatttttttaatttttgtaggtacatagtaggtatatatatttatgggctacatgagatattttgatacaggaatgcaatatgtaataaacacagggtaaatagggtatccattacccaagcatttatcctttgtgttacagacactccagtgatattcttttagttatttataatgtataattaattatttttgactatagtcaccatgttgtgttagagaatactaggtcttattcattctttataattattcttttgtacccattaaccatcctcactcccccccacccaccccactacccttcctagcctctggtaaccatccttctactctatctccgtgagttcagttgttttaatttttacttcccacaaataagtgagaacatgtgacgtttatctttctttgcctggttaatttcacttaacataatgacctccagttccaaccatgttgttgcaaatgacaggatctcattcttctttatggtgttctcaaagccaaaatatcttcaattgtttggaccatactagaagcaggcacaaagtcagacagccttcaacattcaaacagaaatggacaccaacactcttctggcccgtatttgggctcacttaggaagttaaaatgagatctataatctcaatgtttttgtttgaatagctgacctaacagtggaagaagacaacatgataggcatatgtgttccaggtaagagaaagaaaaaagcatcaatcataggagtccaaactatttggaattgccaactctggcactaaacagcagatggcgccaaaggaccttagtagcaaccaagagatttgctgccatctctctttctgctttctcctccatctacccaagattgctaggcctcaaggtctggagttaagagcataggttcaggagtctgactgcccaccttcacagtaccacatttgctacttgggtgaccttagatgactgacttaacttggttttcctctttgcagaataggaatgttaagaaaaaccctacctcccagggttattggtaagattagaataattattacatatcatcataaggaatagttcctgccatataagtttaaaaaatgttagctattactcactgaaacgcattcctttctatattttaacatcttcagtggcatctaatcttgatgcattgccacctctcctttaatccccacctaggctccgtggggaacttcctatgacaaattgactaggaaaaaaattcaggtctgatttacagatggttctgatgatatgctggtacctcctaaaagtggatgaccacggcattatagaattccccaagggtgatcctgaaaggcagttaggaagaaatatcttcttaatggtcagaactttgagcagtgcacttagctgtccattttacctggaaggagaaaggccagaagttatggatctaagctgattcacgggtagtggcggatggtttggctctatgttcagggacttagggaggactgactatgaattagagaagaagcatgtagatcaatcttttgtaagggcacaggtgtggagatattcgtgttccatgtgaatgctcactaaatgtcatctgttatagaggtggtgctcaaaagtcatcttggcaagatgaccttttttgtgaatggcaaccagctgctttcccaagccacttcagtgctgctcattggaccaatgaacagggtgatgatattagatctcttccatcatggataaggacaagattattttcctcactagaatagatacttacttgatatggatttgtctttcttgtgcatgacatttctgctgccactatgattcttggatgtattgaattcttatccaccatgatggtatcctatgtaatactgcttctgtactacgaattcattgtacagcaaaaaacccaggcaatatgttcatacccatgttattcaacaatcttacgtatatcatttcatcactcagaagtaactggcctgatagaattatgaaatagtttgttgacaactcaattatggcatcagctgagtgacaatgccatgaggggttagggttctgtcctataagatgtagtgtctgatcagaatcagtgaccaatatatggtagtttctctcccatagtcagaaaatataggtctaggaacaaacgggtggaaggagaagtggctttcttcattgttatctattatccacacacaaaatgtgtgctttttgttcctgcaactttggaaactttgatttagattcttagttctcaagggatgaatacgtctaccagggtacataattatgattccattgaactggaagttgagacatcacctgattattttgggcttcttgtttattctgttgtctctacagcatccttcaagatcagctcatgaggactctcctttcacagtggtgaaaggctaattaagctgttttctcaagcaaaacaactctttttacacctcatctctatccttatgtcatgtagacagtgctgcagttctttttttcatagcaaatttttcttcttgttttacttctatgtggttttaattgaaaagcagccaaatgataaatacacatataaacatcctgcctcctctgttatgtctgattaagacttagtaagaggcctcagggtctccacctgttagtatgttgtggtttgtcttgtgtatctttggagacaggagagatgtgtggcttgtatacgtttgttggaaataaactgcttctgtttttgaaaattggaatttgctttatttattgctgaaaacttatgcctttgaaatgaaaatataaattgcctaagtaatgttctgaaaaccaattcttacataagataatttctcttaaatgtctagcacagtgccattcaagcattcaataaacattagttgagtatcgtttaagttatagacattggaaatacagagtcactcccctcaaaatctagcctagaagagtaagtggccagaaataaataagttaacaatttcaggcaccagagtagcagtagctgtgaggtaaaatgggggcataagggaggtaagtagatataggctttcccccagtcttgggccctatcagagccccagcagatgcctgtggcctgcagaggccttagcatgcccagatgaggaaggattcaataaggaaagaaagaatctgtttgcagacttggagtctcactctttttgcccaggctggagtgcagtggctcaatctcagcttgctgcaaactctgcctcccaggttcaagcaattctcctgcctcagcctcccgagtagctgggattgcaggcgcacactaccatgcctgactaatttttgtatttgtagtagagacggggtttcaccatgttggccaggctggtctccaactcctgacctcaagtgatccacccaccttggcttcccaaagtgctgagattataggcgtgaaccaccacgcccggccacaggcaggacttcaaagtgcaccgaagctgcatgtgtaggacagatcacctgtgtgggagcatgtggctttgaactctgagtaccagccagagatggacaatcttggatcagatgcccaaattctgttcctcctctgtcttctggcttaaagatagaactgtggtgtcattaaccttggattcaattaccttaagaatctccactcacaagagctcaaattgctttggagttgttaattacaccagcttctgaacagaggtggattaattgtgaagctaatgaagtttaagcttcaggacctaaatttccctgcaccagctacttccaaggttctgggaggggccctgacactgtgtttgcaagggcacatgcttctgtaaactttgcaaaagtaaactattttcaatgcagttagttaagatgactctttccactccaaccccctctctgccatacttctccttgaactggagagggctgaagtaggaccatggaatttcatattggtaattttgtattcttttacttatagagggttcctcgaactgcacaaactttagtctcctccctggatccatccctggttctgatcatgactacgatttcccccaagttgccatttagattgtattaatattaaaatgagataaaacagtccttattattaaaagaatgtattgtcttttttaagaaaagaagcaattcagtgaaattattattattattatttttgagacagagtctcactctcacccaggctggagtgcagtggcgcgatctcgactcaactgcaacctccaccgtgccaggctcaagcaattctcctgcttcagccccccaagtagctgggactacaggcacatgccaccatgcctggctagtttttgtatttgtggtagagatggggtttgccatcttggctaggctggtcttgaactcctgacctcaggtgatccaccctcctcggcctctcagaatgctgggattacaggcttgagccactgtgccaggcccagtgaaattatttcttacccaagaaggcaattaaaggagcctgtgcatggagcactaaatctggggatcagatttgccaaaaaaatcaagaagaaactgaagaggtttaaaatgcatatattgctttttcattagtataggaatggtggaagaataaaaataaaatcaaagatgatggattgattcacctggaggaaaggagagatgattaagattaagggtcatggatcagggacagaggggaagaaatgggaagatgactgtcagtagagacagacataaaaagaaaaaggagatgaatgcacgtaggtccagctgctttcaaaaagagttttaaatctagatgccagtaaatcagaaataaattgtgactggaagccaacaaagtccaatagaagaagcaaggcgagatctaagagagctgcttggaatgaatatgaagaaggaagcctggatccaggaaactactgagaagcaccttaatgcaaaagattccatcttcttttcaagtattctttctgtattatattcatcagaatgggctaggttatgctgctggaacaagttaacccccaaatctccacagctcacacacacaccatttatttatcaccatgttacaaacctgctgtggttggtggaggacttggctccacatagtaactcagggacccaggttgacctgggctccaccatcttgtagatgcaccatctggaacatgtagttgctagggcagcggaagagagagactggagcatcttacttggacttttcactgcctccacatggaagtgacacacatgacatccattcacactttattggccagaacttgtcattggggatttggaaaataaatatttaatgagtattcctgtgtatgctgcctcctatctgaatcttgatagtgatgctgtcagttttttcttgccttggagaggcttctgaggtgtagtttcatgcagaaattggatgcagtctgagcctccccagagtgggatttgaatacattttgtatttgattgctttgaccggtagggtctccagtttagtcggtgctgagggtgattactcgaattttgtgtctccctccttccctacctccaatgtcccctgagggtcattaactttaggattattttcattctatgttcatgcattcatttctttatttatccaacatttattaagctcttactgtgtgttatggctttacttggccctgcagattcaacgaagactaagacacagttcttattctcaagaagctcccactttggagacagtaagcaagttaatacagattacatagacatgccagcaatttctagctggaaggatcgggaaggactccatgtaggtgacagctcagtggattcataaacttggggagatttaggaatttatcatctgtaggaggcttaaaaatgtatacacaagaacttggatatgcataaatgtagtgttctctactttttttcttttctctttttttttttgtatatttttattttacatttgaaaaagactcagaggtgtgaagaaacttgtcaagatccttcctatatattggtttaggtgaggcctggttttaaatccaacccaactttgtctggctctgaaaactgggctcttagccaccacatgattctgctacctaatcatctatatgttcctatcttttccttttttaccagaataaaagagaaaaagggggaaaaaccccatttttttcaagcaaggattaatttttaatgacatcctttcctgtgttaaatgtgaagtctcttttgtctcaatgccagtcaagtatttagttttcagtttctttatactatttgtattcaaaatatacttgatcttaaaaaagtaggggaacacttaatttggtctgttttcagattcctcccattaatttggcaaacattcaaaatggtcagatgatttaattacttattatttttatgagtttagttattctaaagtagtttccaacctatggatcttagtttctaagagtcttttttattttattattattattttattattgttattattatactttaagttctagggtacatgtgcacaatgtgcaggtttgttacatatgtgtacatgtgccgtgttggtgtgcggcactcgttaactcgtcatttgcattaggtatatctcctaatgctatccctcccccctccccccaccccacaacaggccccggtgtgtgatgttccccaccctgtgtccaagtgttctcattgttcaattcccacctatgagtgagaacatgcggtgtttgcttttctgtccttgcgattgctcagaatgatggtttctagcttcatccatgtctctacaaaggacatgaactcatccttttttatggctgcatagtattccatggtgcatatgtgctaccttttcttaatccagtctatcattgatggacatttgggttggttccaagtctttgctattgtgaatagtgccactataaacatacatgtgcatatctctttatagcagcatgatttataatcctttggttatatgcccagtaatgggatggctgggtcaaatggtatttctagttctagatccttgaggaatcgccacactgtcttctacaatggttgaactagtttacagtcccaccaacagtgtaaaagtgttcctatttctccacatcctgtccagcacctgttgtttcctgactttttaatgattgccattctaactggtatgagatggtatctcattgtggttttgatttgcattctctgatggccagtgatgatgagcattttttcatgtatctgttggctgcataaatgtcttcttttgagaagtgtctgttcatatcctttgccttctttttgatgaggctgtttgatttttttcttgtaaatctgtttaagttctttgtagattctggatattagccctttgtcagatgggtatattgtaaaaattttctcccattctgtaggttgcctgttctgtctgacggtagtttcttttgctgtgcagaagctctttagtttaattagatcccatttgtctgttttggcttttgttgccattgcttttggtgttttaatcatgaagtccttgcccatgcctatggcctgaatggtattgcctaggttttcttctagggtttttatggttttaggtctaacatgtaagtctttaatccatcttgaattaatttttgtataaggtgtaaggaagggatccagtttcagctttctacatatggctagccagttttccctgcaccatttattaaatagggaatcctttccccatttcttgtttttgtcaggtttgtcaaagatcagatggttgtagatgtgtggtattatttccaagggctctattctgttccattggtccatatctctgttttgataccagtaccatgctgttttgactactgtagccttgtagtatagtttgaagtcaggtagcgtgatacctctagctttgttctttttgcttaggattgacttggcaatgcgggctcctttttggttccatatgaactttaaagtagttttttctaattctgtgaagaaagtcattggtagtttgacagggatggcattgaatctataaattaccttaggcagtatgaccattttcacaatattgattcttcctatccatgagcatggaatgttcttccatttgtttgtgtcctcttttatttcgctgagcagtggtttgtagttctttgtggagtgtaaggcaatgtcatgtgataagaatgagaaaatggtggggtaggagtcttagtggagaattgtttaaaattatcattgctgaaaatagaagaaagagcaaattgtaaaaataaaggagaaatgggtaatgataagagcacatttgaggttggagaacattagtcttcatttttttaagtcactatttagttgtgtgatattctccaatatcactcaaaaatatagacgaaaagcatggtaaaagtggacagttagattgaagcaggattaacattttgccaagaaggtgcaataaaagggcagtgggtaagggatctagggatattggcattaagatgaaagactaagaaactaagtggatcagaaaaggagaattcaagaaaatgcagatcagtggtgagaagacaaggcactgaagatgtcaatggggatggcaggactgaaggtagttgtcttagtctgctcaggctgctataataaaatatctagaggctggaagtctaaaatcagagtgcgagcaaggtcaggtcctggtgagggccctcttctgagttatagactgccaacttctcatggtgttctcacctgacagggagagagagagatcaagctctttagtgtcttttttttttttttttttgagaggcagggtcttgctcttttgcccaaactagaatgcagtggtgtgatcatagctcctggtagcctcagatccctgggctcaggagattctctaacctcagcctctcaaacagctgggactacaggtgtacaccaccatgcttgactagtttttttgtaaattttttaggagagacacagtcttgctatcttgcctagactggtttcaaactcctctcctcagtgatcttaccacctcagcctcccagagtacctaggaagacagacacaagctaccatgcccagcatcttttcttacagggacatgaatcccatcatgagggtgccaccctcataacctcatctaaacccagtgacctcctgaaggccccatctccaaataccatcacagtgaggagtagggttttagcacatgagttttggggagacacaattgagcccatagaaatagtagtcaaaagtgagatgcatagacttacgatttcagagatagaacatttacaggtgatgccaatacaaggacatggccacaggtggattaagtgtcatgatactctctggagatcaggatcaaggaaggaagagaataggggtaggactgattatccatataaatgtaggaggcactc

SEQ ID NO: 376 - DNA, 3305 bp, Homo sapiens
ggctgttttcccactgtcccttcttcgggcagtgtcgccgtccagcctggttgttgaagcgtccccgtggtcccccggggtccaggcccctttgtggaggcagctgctggcccccagcccatgggaccgtagtcgcggaggcctctgcagaggcgcaggctggaagcggtggcctttgaggggggcggcaggagagagtaccgacctccctcgaactcctggcagagagctggcggtcaccatggcaatgcgggagctggtggaggccgaatgcgggggtgccaacccgctcatgaagctcgccgggcacttcacccaggacaaggcccttcggcaggagggattgaggcctggcccctggccccccggagccccggcctctgaggcagcctccaagcctttgggagtagcttctgaagatgagttggtggctgaattcctgcaggaccagaatgcaccccttgtgtcccgtgcccctcagaccttcaagatggatgacctcctggctgagatgcagcagattgagcagtcaaacttccgccaggctccccagagagcccctggtgtggcagacttggccttgtctgagaactgggcccaggagtttcttgcagctggagatgctgtggatgtaactcaggattataatgagactgactggtcccaagaattcatctctgaagttacagaccccttgtctgtgtcccctgcccgctgggctgaggaatatttggagcaatcagaggagaagctgtggctgggagaacctgagggaacagccaccgatcgctggtatgatgaatatcatcctgaggaggatctgcagcacacggccagtgactttgtggccaaagtggatgaccccaaattggctaattctgagggtacatcagatgcctgggttgaccagttcacaagaccagtaaacacatctgcccttgatatggagtttgaacgagccaagtcagctatagagtctgatgtcgatttctgggacaagttgcaggcagagttggaggagatggcaaaacgggatgctgaggcccacccctggctttctgactatgatgaccttacgtcagctacctatgataaggggtaccagtttgaggaggagaaccccttgcgtgatcaccctcagccttttgaagaagggctgcggcgccttcaggagggggacctgccaaatgctgtgctgctttttgaggcagctgtgcagcaggatcctaagcacatggaagcttggcagtatctgggtaccacccaggcagagaatgaacaagaactattagccatcagtgcattgcggaggtgtctggagctaaagccagataaccagacagcactgatggcgctggctgtgagcttcaccaacgagtccctgcagcgacaggcctgtgaaaccctacgagactggctgcggtacacaccagcctatgcccatctggtgacacctgctgaagaaggggctggtggggcaggactgggccccagcaagcgtatcctgggatctctcttgtctgactccctgtttcttgaagtgaaagagctcttcctggcagctgtgcggctggaccctacctccattgaccctgatgtgcagtgtggcttgggagtccttttcaacctgagtggggagtatgacaaggccgtggactgcttcacagctgccctcagcgttcgtcccaatgactatttgctgtggaataagctaggcgccaccctggccaatggaaaccagagtgaagaagcagtagctgcgtaccgccgggccctcgagctccagcctggctatatccggtcccgctataacctgggcatcagctgcatcaacctcggggctcaccgggaggctgtggagcactttctggaggccctgaacatgcagaggaaaagccggggcccccggggtgaaggaggtgccatgtcggagaacatctggagcaccctgcgtttggcattgtctatgttaggccagagcgatgcctatggggcagccgacgcgcgggatctgtccaccctcctaactatgtttggcctgccccagtgacagtgggacgggctgccctgtgagtgtccacctggagggatccccgctttggatgtgattccctctccccaaatgggcctaccaagggggcgggctgatgaccataagcggtacggcctttcaggagctgcctcaacgtaggggtgggtagtctgtgttctagttcctacataattgtaggaaaatgagctgtgtcatctctgagtcccttggtaattcaagggctgtacatccagctacagatctctctgctcatcatgccctttcttggtgctgctttttgggtaggaccccacgatttagggtaactgttatcatcagctgccatttctgatagggtctaccacatctgtaatgtctgtcctttcccccacttttactgggaattgatagtccagcttccttgggcagtgtaagtaggaggttcatctgctgtgcgcctctaatgtctgtctggatgggatgtgttaggagttggcctgttgggttgaattgttgatttggctgagcagagctgagttttggtaggagtgctcatggttctgtcattcttggacctctcctggctgagctctgattccctgtgagcacgatgctgatgcaatagtcctgtgtcatcactgcagcggtcctcaggagctgccagggccaattgctacagagtgtctgggtgtgtggcataggaggaaggtttgcttgtgaaatgaggctgggtgggagcggggagggactagatcagaagagatcaagggctgtattcaggaacgttggtgggaggacagagcaagtgggaagggggtatggtgagtgcggcaatccctcatcctcttagaagcacctgtgaatgggaattgagccaactgttatagaaaattggttcagaaagtgcaatcttgccagatttctagcaaataggttcagtgttaccataagcctttgctgtacttcttgaaatgtttctaggggagagcattggaaaatccccttcccccatctagatcgaaggaagatgagggagcagcttggattcttctcagttgtcccctgcatggggagatacactaacccccagaaatgactgctaagcctcttgccttgtctttagtagctaatgatcagagagattttttttttaaactaccatggtcccaggattccatcctgaaatttatttttctttgtatgaatatgtgtaaatgatttaaaaataaaactgtaaaatatttgtacgaagaataaatggaactgatgtggg

SEQ ID NO: 377 - protein, 598 aa, Homo sapiens
MAMRELVEAECGGANPLMKLAGHFTQDKALRQEGLRPGPWPPGAPASEAASKPLGVASEDELVAEFLQDQNAPLVSRAPQTFKMDDLLAEMQQIEQSNFRQAPQRAPGVADLALSENWAQEFLAAGDAVDVTQDYNETDWSQEFISEVTDPLSVSPARWAEEYLEQSEEKLWLGEPEGTATDRWYDEYHPEEDLQHTASDFVAKVDDPKLANSEGTSDAWVDQFWVNTSALDMEFERAKSAIESDVDFWDKLQAELEEMAKRDAEAHPWLSDYDDLTSATYDKGYQFEEENPLRDHPQPFEEGLRRLQEGDLPNAVLLFEAAVQQDPKHMEAWQYLGTTQAENEQELLAISALRRCLELKPDNQTALMAVSFTNESLQRQACETLRDWLRYTPAYAHLVTPAEEGAGGAGLGPSKRILGSLLSDSLFLEVKELFLAAVRLDPTSIDPDVQCGLGVLFNLSGEYDKAVDCFTAALSVRPNDYLLWNKLGATLANGNQSEEAVAAYRRALELQPGYIRSRYNLGISCINLGAHREAVEHFLEALNMQRKSRGPRGEGGAMSENIWSTLRLALSMLGQSDAYGAADARDLSTLLTMFGLPQ

SEQ ID NO: 378 - DNA, 3080 bp, Homo sapiens
agagctggcggtcaccatggcaatgcgggagctggtggaggccgaatgcgggggtgccaacccgctcatgaagctcgccgggcacttcacccaggacaaggcccttcggcaggagggattgaggcctggcccctggccccccggagccccggcctctgaggcagcctccaagcctttgggagtagcttctgaagatgagttggtggctgaattcctgcaggaccagaatgcaccccttgtgtcccgtgcccctcagaccttcaagatggatgacctcctggctgagatgcagcagattgagcagtcaaacttccgccaggctccccagagagcccctggtgtggcagacttggccttgtctgagaactgggcccaggagtttcttgcagctggagatgctgtggatgtaactcaggattataatgagactgactggtcccaagaattcatctctgaagttacagaccccttgtctgtgtcccctgcccgctgggctgaggaatatttggagcaatcagaggagaagctgtggctgggagaacctgagggaacagccaccgatcgctggtatgatgaatatcatcctgaggaggatctgcagcacacggccagtgactttgtggccaaagtggatgaccccaaattggctaattctgagggtacatcagatgcctgggttgaccagttcacaagaccagtaaacacatctgcccttgatatggagtttgaacgagccaagtcagctatagagtctgatgtcgatttctgggacaagttgcaggcagagttggaggagatggcaaaacgggatgctgaggcccacccctggctttctgactatgatgaccttacgtcagctacctatgataaggggtaccagtttgaggaggagaaccccttgcgtgatcaccctcagccttttgaagaagggctgcggcgccttcaggagggggacctgccaaatgctgtgctgctttttgaggcagctgtgcagcaggatcctaagcacatggaagcttggcagtatctgggtaccacccaggcagagaatgaacaagaactattagccatcagtgcattgcggaggtgtctggagctaaagccagataaccagacagcactgatggcgctggctgtgagcttcaccaacgagtccctgcagcgacaggcctgtgaaaccctacgagactggctgcggtacacaccagcctatgcccatctggtgacacctgctgaagaaggggctggtggggcaggactgggccccagcaagcgtatcctgggatctctcttgtctgactccctgtttcttgaagtgaaagagctcttcctggcagctgtgcggctggaccctacctccattgaccctgatgtgcagtgtggcttgggagtccttttcaacctgagtggggagtatgacaaggccgtggactgcttcacagctgccctcagcgttcgtcccaatgactatttgctgtggaataagctaggcgccaccctggccaatggaaaccagagtgaagaagcagtagctgcgtaccgccgggccctcgagctccagcctggctatatccggtcccgctataacctgggcatcagctgcatcaacctcggggctcaccgggaggctgtggagcactttctggaggccctgaacatgcagaggaaaagccggggcccccggggtgaaggaggtgccatgtcggagaacatctggagcaccctgcgtttggcattgtctatgttaggccagagcgatgcctatggggcagccgacgcgcgggatctgtccaccctcctaactatgtttggcctgccccagtgacagtgggacgggctgccctgtgagtgtccacctggagggatccccgctttggatgtgattccctctccccaaatgggcctaccaagggggcgggctgatgaccataagcggtacggcctttcaggagctgcctcaacgtaggggtgggtagtctgtgttctagttcctacataattgtaggaaaatgagctgtgtcatctctgagtcccttggtaattcaagggctgtacatccagctacagatctctctgctcatcatgccctttcttggtgctgctttttgggtaggaccccacgatttagggtaactgttatcatcagctgccatttctgatagggtctaccacatctgtaatgtctgtcctttcccccacttttactgggaattgatagtccagcttccttgggcagtgtaagtaggaggttcatctgctgtgcgcctctaatgtctgtctggatgggatgtgttaggagttggcctgttgggttgaattgttgatttggctgagcagagctgagttttggtaggagtgctcatggttctgtcattcttggacctctcctggctgagctctgattccctgtgagcacgatgctgatgcaatagtcctgtgtcatcactgcagcggtcctcaggagctgccagggccaattgctacagagtgtctgggtgtgtggcataggaggaaggtttgcttgtgaaatgaggctgggtgggagcggggagggactagatcagaagagatcaagggctgtattcaggaacgttggtgggaggacagagcaagtgggaagggggtatggtgagtgcggcaatccctcatcctcttagaagcacctgtgaatgggaattgagccaactgttatagaaaattggttcagaaagtgcaatcttgccagatttctagcaaataggttcagtgttaccataagcctttgctgtacttcttgaaatgtttctaggggagagcattggaaaatccccttcccccatctagatcgaaggaagatgagggagcagcttggattcttctcagttgtcccctgcatggggagatacactaacccccagaaatgactgctaagcctcttgccttgtctttagtagctaatgatcagagagattttttttttaaactaccatggtcccaggattccatcctgaaatttatttttctttgtatgaatatgtgtaaatgatttaaaaataaaactgtaaaatatttgtacgaagaataaatggaactgatgtggg

SEQ ID NO: 379 - protein, 598 aa, Homo sapiens; identical to SEQ ID NO: 377

SEQ ID NO: 380 - DNA, 2145 bp, Homo sapiens
tccttgctcttctccatgacactaggactcccttggtcttgaagctggagagctggcggtcaccatggcaatgcgggagctggtggaggccgaatgcgggggtgccaacccgctcatgaagctcgccgggcacttcacccaggacaaggcccttcggcaggagggattgaggcctggcccctggccccccggagccccggcctctgaggcagcctccaagcctttgggagtagcttctgaagatgagttggtggctgaattcctgcaggaccagaatgcaccccttgtgtcccgtgcccctcagaccttcaagatggatgacctcctggctgagatgcagcagattgagcagtcaaacttccgccaggctccccagagagacttggccttgtctgagaactgggcccaggagtttcttgcagctggagatgctgtggatgtaactcaggattataatgagactgactggtcccaagaattcatctctgaagttacagaccccttgtctgtgtcccctgcccgctgggctgaggaatatttggagcaatcagaggagaagctgtggctgggagaacctgagggaacagccaccgatcgctggtatgatgaatatcatcctgaggaggatctgcagcacacggccagtgactttgtggccaaagtggatgaccccaaattggctaattctgagttcctgaaattcgtgcggcagattggcgaagggcaggtgtccctggagtccggtgcagggtcgggccgagctcaggcagaacagtgggcagcagagtttatacagcagcagggtacatcagatgcctgggttgaccagttcacaagaccagtaaacacatctgcccttgatatggagtttgaacgagccaagtcagctatagagtctgatgtcgatttctgggacaagttgcaggcagagttggaggagatggcaaaacgggatgctgaggcccacccctggctttctgactatgatgaccttacgtcagctacctatgataaggggtaccagtttgaggaggagaaccccttgcgtgatcaccctcagccttttgaagaagggctgcggcgccttcaggagggggacctgccaaatgctgtgctgctttttgaggcagctgtgcagcaggatcctaagcacatggaagcttggcagtatctgggtaccacccaggcagagaatgaacaagaactattagccatcagtgcattgcggaggtgtctggagctaaagccagataaccagacagcactgatggcgctggctgtgagcttcaccaacgagtccctgcagcgacaggcctgtgaaaccctacgagactggctgcggtacacaccagcctatgcccatctggtgacacctgctgaagaaggggctggtggggcaggactgggccccagcaagcgtatcctgggatctctcttgtctgactccctgtttcttgaagtgaaagagctcttcctggcagctgtgcggctggaccctacctccattgaccctgatgtgcagtgtggcttgggagtccttttcaacctgagtggggagtatgacaaggccgtggactgcttcacagctgccctcagcgttcgtcccaatgactatttgctgtggaataagctaggcgccaccctggccaatggaaaccagagtgaagaagcagtagctgcgtaccgccgggccctcgagctccagcctggctatatccggtcccgctataacctgggcatcagctgcatcaacctcggggctcaccgggaggctgtggagcactttctggaggccctgaacatgcagaggaaaagccggggcccccggggtgaaggaggtgccatgtcggagaacatctggagcaccctgcgtttggcattgtctatgttaggccagagcgatgcctatggggcagccgacgcgcgggatctgtccaccctcctaactatgtttggcctgccccagtgacagtgggacgggctgccctaaatatacagcctctgcagacactgcttctgaatgaacgggctggagtttccttgggatcctgaactcatattggattctctacctaccatcttggacaattcatgtaggaaaacaaatcctcatttgttcaaacaatagatgaaaattattaaagt

SEQ ID NO: 381 - protein, 630 aa, Homo sapiens
MAMRELVEAECGGANPLMKLAGHFTQDKALRQEGLRPGPWPPGAPASEAASKPLGVASEDELVAEFLQDQNAPLVSRAPQTFKMDDLLAEMQQIEQSNFRQAPQRDLALSENWAQEFLAAGDAVDVTQDYNETDWSQEFISEVTDPLSVSPARWAEEYLEQSEEKLWLGEPEGTATDRWYDEYHPEEDLQHTASDFVAKVDDPKLANSEFLKFVRQIGEGQVSLESGAGSGRAQAEQWAAEFIQQQGTSDAWVDQFWVNTSALDMEFERAKSAIESDVDFWDKLQAELEEMAKRDAEAHPWLSDYDDLTSATYDKGYQFEEENPLRDHPQPFEEGLRRLQEGDLPNAVLLFEAAVQQDPKHMEAWQYLGTTQAENEQELLAISALRRCLELKPDNQTALMAVSFTNESLQRQACETLRDWLRYTPAYAHLVTPAEEGAGGAGLGPSKRILGSLLSDSLFLEVKELFLAAVRLDPTSIDPDVQCGLGVLFNLSGEYDKAVDCFTAALSVRPNDYLLWNKLGATLANGNQSEEAVAAYRRALELQPGYIRSRYNLGISCINLGAHREAVEHFLEALNMQRKSRGPRGEGGAMSENIWSTLRLALSMLGQSDAYGAADARDLSTLLTMFGLPQ

SEQ ID NO: 382 - DNA, 3319 bp, Homo sapiens
gggccgctgcggggcggtcacggcccctttaagcctgagccccgccccctggctccccgccccctcttctcccctcccccaagccagcacctggtgccccggcgggtcgtgcggcgcggcgctccgcgagagctggcggtcaccatggcaatgcgggagctggtggaggccgaatgcgggggtgccaacccgctcatgaagctcgccgggcacttcacccaggacaaggcccttcggcaggagggattgaggcctggcccctggccccccggagccccggcctctgaggcagcctccaagcctttgggagtagcttctgaagatgagttggtggctgaattcctgcaggaccagaatgcaccccttgtgtcccgtgcccctcagaccttcaagatggatgacctcctggctgagatgcagcagattgagcagtcaaacttccgccaggctccccagagagcccctggtgtggcagacttggccttgtctgagaactgggcccaggagtttcttgcagctggagatgctgtggatgtaactcaggattataatgagactgactggtcccaagaattcatctctgaagttacagaccccttgtctgtgtcccctgcccgctgggctgaggaatatttggagcaatcagaggagaagctgtggctgggagaacctgagggaacagccaccgatcgctggtatgatgaatatcatcctgaggaggatctgcagcacacggccagtgactttgtggccaaagtggatgaccccaaattggctaattctgagttcctgaaattcgtgcggcagattggcgaagggcaggtgtccctggagtccggtgcagggtcgggccgagctcaggcagaacagtgggcagcagagtttatacagcagcagggtacatcagatgcctgggttgaccagttcacaagaccagtaaacacatctgcccttgatatggagtttgaacgagccaagtcagctatagagtctgatgtcgatttctgggacaagttgcaggcagagttggaggagatggcaaaacgggatgctgaggcccacccctggctttctgactatgatgaccttacgtcagctacctatgataaggggtaccagtttgaggaggagaaccccttgcgtgatcaccctcagccttttgaagaagggctgcggcgccttcaggagggggacctgccaaatgctgtgctgctttttgaggcagctgtgcagcaggatcctaagcacatggaagcttggcagtatctgggtaccacccaggcagagaatgaacaagaactattagccatcagtgcattgcggaggtgtctggagctaaagccagataaccagacagcactgatggcgctggctgtgagcttcaccaacgagtccctgcagcgacaggcctgtgaaaccctacgagactggctgcggtacacaccagcctatgcccatctggtgacacctgctgaagaaggggctggtggggcaggactgggccccagcaagcgtatcctgggatctctcttgtctgactccctgtttcttgaagtgaaagagctcttcctggcagctgtgcggctggaccctacctccattgaccctgatgtgcagtgtggcttgggagtccttttcaacctgagtggggagtatgacaaggccgtggactgcttcacagctgccctcagcgttcgtcccaatgactatttgctgtggaataagctaggcgccaccctggccaatggaaaccagagtgaagaagcagtagctgcgtaccgccgggccctcgagctccagcctggctatatccggtcccgctataacctgggcatcagctgcatcaacctcggggctcaccgggaggctgtggagcactttctggaggccctgaacatgcagaggaaaagccggggcccccggggtgaaggaggtgccatgtcggagaacatctggagcaccctgcgtttggcattgtctatgttaggccagagcgatgcctatggggcagccgacgcgcgggatctgtccaccctcctaactatgtttggcctgccccagtgacagtgggacgggctgccctgtgagtgtccacctggagggatccccgctttggatgtgattccctctccccaaatgggcctaccaagggggcgggctgatgaccataagcggtacggcctttcaggagctgcctcaacgtaggggtgggtagtctgtgttctagttcctacataattgtaggaaaatgagctgtgtcatctctgagtcccttggtaattcaagggctgtacatccagctacagatctctctgctcatcatgccctttcttggtgctgctttttgggtaggaccccacgatttagggtaactgttatcatcagctgccatttctgatagggtctaccacatctgtaatgtctgtcctttcccccacttttactgggaattgatagtccagcttccttgggcagtgtaagtaggaggttcatctgctgtgcgcctctaatgtctgtctggatgggatgtgttaggagttggcctgttgggttgaattgttgatttggctgagcagagctgagttttggtaggagtgctcatggttctgtcattcttggacctctcctggctgagctctgattccctgtgagcacgatgctgatgcaatagtcctgtgtcatcactgcagcggtcctcaggagctgccagggccaattgctacagagtgtctgggtgtgtggcataggaggaaggtttgcttgtgaaatgaggctgggtgggagcggggagggactagatcagaagagatcaagggctgtattcaggaacgttggtgggaggacagagcaagtgggaagggggtatggtgagtgcggcaatccctcatcctcttagaagcacctgtgaatgggaattgagccaactgttatagaaaattggttcagaaagtgcaatcttgccagatttctagcaaataggttcagtgttaccataagcctttgctgtacttcttgaaatgtttctaggggagagcattggaaaatccccttcccccatctagatcgaaggaagatgagggagcagcttggattcttctcagttgtcccctgcatggggagatacactaacccccagaaatgactgctaagcctcttgccttgtctttagtagctaatgatcagagagattttttttttaaactaccatggtcccaggattccatcctgaaatttatttttctttgtatgaatatgtgtaaatgatttaaaaataaaactgtaaaatatttgtacgaagaataaatggaactgatgtggg

SEQ ID NO: 383 - protein, 635 aa, Homo sapiens
MAMRELVEAECGGANPLMKLAGHFTQDKALRQEGLRPGPWPPGAPASEAASKPLGVASEDELVAEFLQDQNAPLVSRAPQTFKMDDLLAEMQQIEQSNFRQAPQRAPGVADLALSENWAQEFLAAGDAVDVTQDYNETDWSQEFISEVTDPLSVSPARWAEEYLEQSEEKLWLGEPEGTATDRWYDEYHPEEDLQHTASDFVAKVDDPKLANSEFLKFVRQIGEGQVSLESGAGSGRAQAEQWAAEFIQQQGTSDAWVDQFWVNTSALDMEFERAKSAIESDVDFWDKLQAELEEMAKRDAEAHPWLSDYDDLTSATYDKGYQFEEENPLRDHPQPFEEGLRRLQEGDLPNAVLLFEAAVQQDPKHMEAWQYLGTTQAENEQELLAISALRRCLELKPDNQTALMAVSFTNESLQRQACETLRDWLRYTPAYAHLVTPAEEGAGGAGLGPSKRILGSLLSDSLFLEVKELFLAAVRLDPTSIDPDVQCGLGVLFNLSGEYDKAVDCFTAALSVRPNDYLLWNKLGATLANGNQSEEAVAAYRRALELQPGYIRSRYNLGISCINLGAHREAVEHFLEALNMQRKSRGPRGEGGAMSENIWSTLRLALSMLGQSDAYGAADARDLSTLLTMFGLPQ

SEQ ID NO: 384 - DNA, 2034 bp, Homo sapiens
tccttgctcttctccatgacactaggactcccttggtcttgaagctggagagctggcggtcaccatggcaatgcgggagctggtggaggccgaatgcgggggtgccaacccgctcatgaagctcgccgggcacttcacccaggacaaggcccttcggcaggagggattgaggcctggcccctggccccccggagccccggcctctgaggcagcctccaagcctttgggagtagcttctgaagatgagttggtggctgaattcctgcaggaccagaatgcaccccttgtgtcccgtgcccctcagaccttcaagatggatgacctcctggctgagatgcagcagattgagcagtcaaacttccgccaggctccccagagagacttggccttgtctgagaactgggcccaggagtttcttgcagctggagatgctgtggatgtaactcaggattataatgagactgactggtcccaagaattcatctctgaagttacagaccccttgtctgtgtcccctgcccgctgggctgaggaatatttggagcaatcagaggagaagctgtggctgggagaacctgagggaacagccaccgatcgctggtatgatgaatatcatcctgaggaggatctgcagcacacggccagtgactttgtggccaaagtggatgaccccaaattggctaattctgagggtacatcagatgcctgggttgaccagttcacaagaccagtaaacacatctgcccttgatatggagtttgaacgagccaagtcagctatagagtctgatgtcgatttctgggacaagttgcaggcagagttggaggagatggcaaaacgggatgctgaggcccacccctggctttctgactatgatgaccttacgtcagctacctatgataaggggtaccagtttgaggaggagaaccccttgcgtgatcaccctcagccttttgaagaagggctgcggcgccttcaggagggggacctgccaaatgctgtgctgctttttgaggcagctgtgcagcaggatcctaagcacatggaagcttggcagtatctgggtaccacccaggcagagaatgaacaagaactattagccatcagtgcattgcggaggtgtctggagctaaagccagataaccagacagcactgatggcgctggctgtgagcttcaccaacgagtccctgcagcgacaggcctgtgaaaccctacgagactggctgcggtacacaccagcctatgcccatctggtgacacctgctgaagaaggggctggtggggcaggactgggccccagcaagcgtatcctgggatctctcttgtctgactccctgtttcttgaagtgaaagagctcttcctggcagctgtgcggctggaccctacctccattgaccctgatgtgcagtgtggcttgggagtccttttcaacctgagtggggagtatgacaaggccgtggactgcttcacagctgccctcagcgttcgtcccaatgactatttgctgtggaataagctaggcgccaccctggccaatggaaaccagagtgaagaagcagtagctgcgtaccgccgggccctcgagctccagcctggctatatccggtcccgctataacctgggcatcagctgcatcaacctcggggctcaccgggaggctgtggagcactttctggaggccctgaacatgcagaggaaaagccggggcccccggggtgaaggaggtgccatgtcggagaacatctggagcaccctgcgtttggcattgtctatgttaggccagagcgatgcctatggggcagccgacgcgcgggatctgtccaccctcctaactatgtttggcctgccccagtgacagtgggacgggctgccctaaatatacagcctctgcagacactgcttctgaatgaacgggctggagtttccttgggatcctgaactcatattggattctctacctaccatcttggacaattcatgtaggaaaacaaatcctcatttgttcaaacaatagatgaaaattattaaagt

SEQ ID NO: 385 - protein, 593 aa, Homo sapiens
MAMRELVEAECGGANPLMKLAGHFTQDKALRQEGLRPGPWPPGAPASEAASKPLGVASEDELVAEFLQDQNAPLVSRAPQTFKMDDLLAEMQQIEQSNFRQAPQRDLALSENWAQEFLAAGDAVDVTQDYNETDWSQEFISEVTDPLSVSPARWAEEYLEQSEEKLWLGEPEGTATDRWYDEYHPEEDLQHTASDFVAKVDDPKLANSEGTSDAWVDQFWVNTSALDMEFERAKSAIESDVDFWDKLQAELEEMAKRDAEAHPWLSDYDDLTSATYDKGYQFEEENPLRDHPQPFEEGLRRLQEGDLPNAVLLFEAAVQQDPKHMEAWQYLGTTQAENEQELLAISALRRCLELKPDNQTALMAVSFTNESLQRQACETLRDWLRYTPAYAHLVTPAEEGAGGAGLGPSKRILGSLLSDSLFLEVKELFLAAVRLDPTSIDPDVQCGLGVLFNLSGEYDKAVDCFTAALSVRPNDYLLWNKLGATLANGNQSEEAVAAYRRALELQPGYIRSRYNLGISCINLGAHREAVEHFLEALNMQRKSRGPRGEGGAMSENIWSTLRLALSMLGQSDAYGAADARDLSTLLTMFGLPQ

SEQ ID NO: 386 - DNA, 3443 bp, Homo sapiens
ccctcccccaagccagcacctggtgccccggcgggtcgtgcggcgcggcgctccgcgtgtcgccgtccagcctggttgttgaagcgtccccgtggtcccccggggtccaggcccctttgtggaggcagctgctggcccccagcccatgggaccgtagtcgcggaggcctctgcagaggcgcaggctggaagcggtggcctttgaggggggcggcaggagagagtaccgacctccctcgaactcctggcagagagagctggcggtcaccatggcaatgcgggagctggtggaggccgaatgcgggggtgccaacccgctcatgaagctcgccgggcacttcacccaggacaaggcccttcggcaggagggattgaggcctggcccctggccccccggagccccggcctctgaggcagcctccaagcctttgggagtagcttctgaagatgagttggtggctgaattcctgcaggaccagaatgcaccccttgtgtcccgtgcccctcagaccttcaagatggatgacctcctggctgagatgcagcagattgagcagtcaaacttccgccaggctccccagagagcccctggtgtggcagacttggccttgtctgagaactgggcccaggagtttcttgcagctggagatgctgtggatgtaactcaggattataatgagactgactggtcccaagaattcatctctgaagttacagaccccttgtctgtgtcccctgcccgctgggctgaggaatatttggagcaatcagaggagaagctgtggctgggagaacctgagggaacagccaccgatcgctggtatgatgaatatcatcctgaggaggatctgcagcacacggccagtgactttgtggccaaagtggatgaccccaaattggctaattctgagttcctgaaattcgtgcggcagattggcgaagggcaggtgtccctggagtccggtgcagggtcgggccgagctcaggcagaacagtgggcagcagagtttatacagcagcagggtacatcagatgcctgggttgaccagttcacaagaccagtaaacacatctgcccttgatatggagtttgaacgagccaagtcagctatagagtctgatgtcgatttctgggacaagttgcaggcagagttggaggagatggcaaaacgggatgctgaggcccacccctggctttctgactatgatgaccttacgtcagctacctatgataaggggtaccagtttgaggaggagaaccccttgcgtgatcaccctcagccttttgaagaagggctgcggcgccttcaggagggggacctgccaaatgctgtgctgctttttgaggcagctgtgcagcaggatcctaagcacatggaagcttggcagtatctgggtaccacccaggcagagaatgaacaagaactattagccatcagtgcattgcggaggtgtctggagctaaagccagataaccagacagcactgatggcgctggctgtgagcttcaccaacgagtccctgcagcgacaggcctgtgaaaccctacgagactggctgcggtacacaccagcctatgcccatctggtgacacctgctgaagaaggggctggtggggcaggactgggccccagcaagcgtatcctgggatctctcttgtctgactccctgtttcttgaagtgaaagagctcttcctggcagctgtgcggctggaccctacctccattgaccctgatgtgcagtgtggcttgggagtccttttcaacctgagtggggagtatgacaaggccgtggactgcttcacagctgccctcagcgttcgtcccaatgactatttgctgtggaataagctaggcgccaccctggccaatggaaaccagagtgaagaagcagtagctgcgtaccgccgggccctcgagctccagcctggctatatccggtcccgctataacctgggcatcagctgcatcaacctcggggctcaccgggaggctgtggagcactttctggaggccctgaacatgcagaggaaaagccggggcccccggggtgaaggaggtgccatgtcggagaacatctggagcaccctgcgtttggcattgtctatgttaggccagagcgatgcctatggggcagccgacgcgcgggatctgtccaccctcctaactatgtttggcctgccccagtgacagtgggacgggctgccctgtgagtgtccacctggagggatccccgctttggatgtgattccctctccccaaatgggcctaccaagggggcgggctgatgaccataagcggtacggcctttcaggagctgcctcaacgtaggggtgggtagtctgtgttctagttcctacataattgtaggaaaatgagctgtgtcatctctgagtcccttggtaattcaagggctgtacatccagctacagatctctctgctcatcatgccctttcttggtgctgctttttgggtaggaccccacgatttagggtaactgttatcatcagctgccatttctgatagggtctaccacatctgtaatgtctgtcctttcccccacttttactgggaattgatagtccagcttccttgggcagtgtaagtaggaggttcatctgctgtgcgcctctaatgtctgtctggatgggatgtgttaggagttggcctgttgggttgaattgttgatttggctgagcagagctgagttttggtaggagtgctcatggttctgtcattcttggacctctcctggctgagctctgattccctgtgagcacgatgctgatgcaatagtcctgtgtcatcactgcagcggtcctcaggagctgccagggccaattgctacagagtgtctgggtgtgtggcataggaggaaggtttgcttgtgaaatgaggctgggtgggagcggggagggactagatcagaagagatcaagggctgtattcaggaacgttggtgggaggacagagcaagtgggaagggggtatggtgagtgcggcaatccctcatcctcttagaagcacctgtgaatgggaattgagccaactgttatagaaaattggttcagaaagtgcaatcttgccagatttctagcaaataggttcagtgttaccataagcctttgctgtacttcttgaaatgtttctaggggagagcattggaaaatccccttcccccatctagatcgaaggaagatgagggagcagcttggattcttctcagttgtcccctgcatggggagatacactaacccccagaaatgactgctaagcctcttgccttgtctttagtagctaatgatcagagagattttttttttaaactaccatggtcccaggattccatcctgaaatttatttttctttgtatgaatatgtgtaaatgatttaaaaataaaactgtaaaatatttgtacgaagaataaatggaactgatgtggg

SEQ ID NO: 387 - protein, 635 aa, Homo sapiens; identical to SEQ ID NO: 383

SEQ ID NO: 388 - DNA, 3128 bp, Homo sapiens
tccttgctcttctccatgacactaggactcccttggtcttgaagctggagagctggcggtcaccatggcaatgcgggagctggtggaggccgaatgcgggggtgccaacccgctcatgaagctcgccgggcacttcacccaggacaaggcccttcggcaggagggattgaggcctggcccctggccccccggagccccggcctctgaggcagcctccaagcctttgggagtagcttctgaagatgagttggtggctgaattcctgcaggaccagaatgcaccccttgtgtcccgtgcccctcagaccttcaagatggatgacctcctggctgagatgcagcagattgagcagtcaaacttccgccaggctccccagagagcccctggtgtggcagacttggccttgtctgagaactgggcccaggagtttcttgcagctggagatgctgtggatgtaactcaggattataatgagactgactggtcccaagaattcatctctgaagttacagaccccttgtctgtgtcccctgcccgctgggctgaggaatatttggagcaatcagaggagaagctgtggctgggagaacctgagggaacagccaccgatcgctggtatgatgaatatcatcctgaggaggatctgcagcacacggccagtgactttgtggccaaagtggatgaccccaaattggctaattctgagggtacatcagatgcctgggttgaccagttcacaagaccagtaaacacatctgcccttgatatggagtttgaacgagccaagtcagctatagagtctgatgtcgatttctgggacaagttgcaggcagagttggaggagatggcaaaacgggatgctgaggcccacccctggctttctgactatgatgaccttacgtcagctacctatgataaggggtaccagtttgaggaggagaaccccttgcgtgatcaccctcagccttttgaagaagggctgcggcgccttcaggagggggacctgccaaatgctgtgctgctttttgaggcagctgtgcagcaggatcctaagcacatggaagcttggcagtatctgggtaccacccaggcagagaatgaacaagaactattagccatcagtgcattgcggaggtgtctggagctaaagccagataaccagacagcactgatggcgctggctgtgagcttcaccaacgagtccctgcagcgacaggcctgtgaaaccctacgagactggctgcggtacacaccagcctatgcccatctggtgacacctgctgaagaaggggctggtggggcaggactgggccccagcaagcgtatcctgggatctctcttgtctgactccctgtttcttgaagtgaaagagctcttcctggcagctgtgcggctggaccctacctccattgaccctgatgtgcagtgtggcttgggagtccttttcaacctgagtggggagtatgacaaggccgtggactgcttcacagctgccctcagcgttcgtcccaatgactatttgctgtggaataagctaggcgccaccctggccaatggaaaccagagtgaagaagcagtagctgcgtaccgccgggccctcgagctccagcctggctatatccggtcccgctataacctgggcatcagctgcatcaacctcggggctcaccgggaggctgtggagcactttctggaggccctgaacatgcagaggaaaagccggggcccccggggtgaaggaggtgccatgtcggagaacatctggagcaccctgcgtttggcattgtctatgttaggccagagcgatgcctatggggcagccgacgcgcgggatctgtccaccctcctaactatgtttggcctgccccagtgacagtgggacgggctgccctgtgagtgtccacctggagggatccccgctttggatgtgattccctctccccaaatgggcctaccaagggggcgggctgatgaccataagcggtacggcctttcaggagctgcctcaacgtaggggtgggtagtctgtgttctagttcctacataattgtaggaaaatgagctgtgtcatctctgagtcccttggtaattcaagggctgtacatccagctacagatctctctgctcatcatgccctttcttggtgctgctttttgggtaggaccccacgatttagggtaactgttatcatcagctgccatttctgatagggtctaccacatctgtaatgtctgtcctttcccccacttttactgggaattgatagtccagcttccttgggcagtgtaagtaggaggttcatctgctgtgcgcctctaatgtctgtctggatgggatgtgttaggagttggcctgttgggttgaattgttgatttggctgagcagagctgagttttggtaggagtgctcatggttctgtcattcttggacctctcctggctgagctctgattccctgtgagcacgatgctgatgcaatagtcctgtgtcatcactgcagcggtcctcaggagctgccagggccaattgctacagagtgtctgggtgtgtggcataggaggaaggtttgcttgtgaaatgaggctgggtgggagcggggagggactagatcagaagagatcaagggctgtattcaggaacgttggtgggaggacagagcaagtgggaagggggtatggtgagtgcggcaatccctcatcctcttagaagcacctgtgaatgggaattgagccaactgttatagaaaattggttcagaaagtgcaatcttgccagatttctagcaaataggttcagtgttaccataagcctttgctgtacttcttgaaatgtttctaggggagagcattggaaaatccccttcccccatctagatcgaaggaagatgagggagcagcttggattcttctcagttgtcccctgcatggggagatacactaacccccagaaatgactgctaagcctcttgccttgtctttagtagctaatgatcagagagattttttttttaaactaccatggtcccaggattccatcctgaaatttatttttctttgtatgaatatgtgtaaatgatttaaaaataaaactgtaaaatatttgtacgaagaataaatggaactgatgtggg

SEQ ID NO: 389 - protein, 598 aa, Homo sapiens; identical to SEQ ID NO: 377

SEQ ID NO: 390 - DNA, 2121 bp, Homo sapiens
tccttgctcttctccatgacactaggactcccttggtcttgaagctggagagctggcggtcaccatggcaatgcgggagctggtggaggccgaatgcgggggtgccaacccgctcatgaagctcgccgggcacttcacccaggacaaggcccttcggcaggagggattgaggcctggcccctggccccccggagccccggcctctgaggcagcctccaagcctttgggagtagcttctgaagatgagttggtggctgaattcctgcaggaccagaatgcaccccttgtgtcccgtgcccctcagaccttcaagatggatgacctcctggctgagatgcagcagattgagcagtcaaacttccgccaggctccccagagagacttggccttgtctgagaactgggcccaggagtttcttgcagctggagatgctgtggatgtaactcaggattataatgagactgactggtcccaagaattcatctctgaagttacagaccccttgtctgtgtcccctgcccgctgggctgaggaatatttggagcaatcagaggagaagctgtggctgggagaacctgagggaacagccaccgatcgctggtatgatgaatatcatcctgaggaggatctgcagcacacggccagtgactttgtggccaaagtggatgaccccaaattggctaattctgagttcctgaaattcgtgcggcagattggcgaagggcaggtgtccctggagtccggtgcagggtcgggccgagctcaggcagaacagtgggcagcagagtttatacagcagcagggtacatcagatgcctgggttgaccagttcacaagaccagtaaacacatctgcccttgatatggagtttgaacgagccaagtcagctatagagttgcaggcagagttggaggagatggcaaaacgggatgctgaggcccacccctggctttctgactatgatgaccttacgtcagctacctatgataaggggtaccagtttgaggaggagaaccccttgcgtgatcaccctcagccttttgaagaagggctgcggcgccttcaggagggggacctgccaaatgctgtgctgctttttgaggcagctgtgcagcaggatcctaagcacatggaagcttggcagtatctgggtaccacccaggcagagaatgaacaagaactattagccatcagtgcattgcggaggtgtctggagctaaagccagataaccagacagcactgatggcgctggctgtgagcttcaccaacgagtccctgcagcgacaggcctgtgaaaccctacgagactggctgcggtacacaccagcctatgcccatctggtgacacctgctgaagaaggggctggtggggcaggactgggccccagcaagcgtatcctgggatctctcttgtctgactccctgtttcttgaagtgaaagagctcttcctggcagctgtgcggctggaccctacctccattgaccctgatgtgcagtgtggcttgggagtccttttcaacctgagtggggagtatgacaaggccgtggactgcttcacagctgccctcagcgttcgtcccaatgactatttgctgtggaataagctaggcgccaccctggccaatggaaaccagagtgaagaagcagtagctgcgtaccgccgggccctcgagctccagcctggctatatccggtcccgctataacctgggcatcagctgcatcaacctcggggctcaccgggaggctgtggagcactttctggaggccctgaacatgcagaggaaaagccggggcccccggggtgaaggaggtgccatgtcggagaacatctggagcaccctgcgtttggcattgtctatgttaggccagagcgatgcctatggggcagccgacgcgcgggatctgtccaccctcctaactatgtttggcctgccccagtgacagtgggacgggctgccctaaatatacagcctctgcagacactgcttctgaatgaacgggctggagtttccttgggatcctgaactcatattggattctctacctaccatcttggacaattcatgtaggaaaacaaatcctcatttgttcaaacaatagatgaaaattattaaagt

SEQ ID NO: 391 - protein, 622 aa, Homo sapiens
MAMRELVEAECGGANPLMKLAGHFTQDKALRQEGLRPGPWPPGAPASEAASKPLGVASEDELVAEFLQDQNAPLVSRAPQTFKMDDLLAEMQQIEQSNFRQAPQRDLALSENWAQEFLAAGDAVDVTQDYNETDWSQEFISEVTDPLSVSPARWAEEYLEQSEEKLWLGEPEGTATDRWYDEYHPEEDLQHTASDFVAKVDDPKLANSEFLKFVRQIGEGQVSLESGAGSGRAQAEQWAAEFIQQQGTSDAWVDQFWVNTSALDMEFERAKSAIELQAELEEMAKRDAEAHPWLSDYDDLTSATYDKGYQFEEENPLRDHPQPFEEGLRRLQEGDLPNAVLLFEAAVQQDPKHMEAWQYLGTTQAENEQELLAISALRRCLELKPDNQTALMAVSFTNESLQRQACETLRDWLRYTPAYAHLVTPAEEGAGGAGLGPSKRILGSLLSDSLFLEVKELFLAAVRLDPTSIDPDVQCGLGVLFNLSGEYDKAVDCFTAALSVRPNDYLLWNKLGATLANGNQSEEAVAAYRRALELQPGYIRSRYNLGISCINLGAHREAVEHFLEALNMQRKSRGPRGEGGAMSENIWSTLRLALSMLGQSDAYGAADARDLSTLLTMFGLPQ

SEQ ID NO: 392 - DNA, 2092 bp, Mus musculus
ctcttttagaatttgtctagcaggttttctgacttcggtcggaaaacccctcccaatttcactggtctacaatgaaagcaaaacagttctcttccccgctccccggtgtgtgagaggggctttgatccttctctggtttcctaggaaacgcgtatgtgctagagccacgctctgagacttccgcctcgtgcggtcccgcttcctttctgcctcctctggcctgcatccgtgggggaggtggctggctgcagggttctccggatctcttctgtgttcccactactcaagcaccgagtggcgttctatggcgtccgcctcggctcagcccgcggccctgagcgcggagcaggccaagggtgaggaaagagcctagtctgggtgtgggccgtcttctggggggagggcgcgatactattctttgcctctccaagtggggcccttgcccattagggcgaagggttgggaggacaagcttatcgggttgcttgcaggcctcggcccactaattccctgcctcttccctcctctgggctcgcccgccgtcctccgcggacctctctgggatgcttccgtctcgcagtggtcctggcggaggtgattcaagcgttctcggccccagagaatgccgtgcgcatggacgaggctagagacaatgcgtgcaacgatatgggcaagatgctgcaatttgtgctgcccgtagccacacagatccaacaagaggttattaaagcctatggcttcagctgcgacggggaaggtgggtcccacagggcttggcaaaggaatggactgggggtgggacgcatgatgatgccccccccccccccgatcgatctttttctcgccacagggcggcagtcacatcaaacattgccactcacagttcagggactagacttaagccccgcctgaaaagttatggctcttgaagccaggcatggccacagtggcctttcatcccagcatttgagaagcagaggcaggcaggtctctgagttcaaggccagcctggtatgtagggtgaggagttccagggtagccatggctatacaaagaaaaccctgtcttgaaaaaacaaaaacccaccaaacaaaagttctggctctagagtccaaagccctacataggcaagtgtttctccatggccctcgaacttcccagctctccccgagtcaggatcgcagtaagttgcccagaatggccttgaaccagagacccacctttctcagccttttgagtaagtgacaggcttgagtcactgggcccagctctaacctgaactctctcgtgtacctgaactctttcttgtctgccttttggctaataggtttggtgtggcaggttgagccctctcttcccaaggacagttgtttattaattttgtgtttgtttgtttgtttgtttgtttgttagctagccaggactaccagggagtctctttcaaatcaggctgcttgaggctaagctgctgaacgtggttcacccgagactgaaaacataatgctttttaattttttgtttgtttgtttgagacagggtttctctgtgtagccctggctatcttggaactcaatctgtagaccaggcaggcctcgaactcaagagacccacctacctctgcctcccgagtgctgggattaagggcaggcccagctgttttagggcttttttatattgcatccagttgtgcctagtgaaaaccggggcggggttggttgaagccatgcaggacatgggggtgaattgtcctctattgcagatggctgcctgacgaaaggagatcttctgctctagggagcccccttggctgcctccacacactggtccccagcagtgtggcttgacttgcttctgattgcaggtgtccttaagtttgcccgcctggtcaagtcttatgaagcccaggatcccgagattgccagcctgtcaggcaagctgaaggccctgttcctgccacccatgacactgccgccccatgggcctgcttctggaagcagtgtggcagcctcctgagattggttctcgtatgtgtgctgctgctgtggaggcggcccttgtgttccagaggataataaatgtacttgtgactaaa

SEQ ID NO: 393 - DNA, 764 bp, Mus musculus
ctcttttagaatttgtctagcaggttttctgacttcggtcggaaaacccctcccaatttcactggtctacaatgaaagcaaaacagttctcttccccgctccccggtgtgtgagaggggctttgatccttctctggtttcctaggaaacgcgtatgtgctagagccacgctctgagacttccgcctcgtgcggtcccgcttcctttctgcctcctctggcctgcatccgtgggggaggtggctggctgcagggttctccggatctcttctgtgttcccactactcaagcaccgagtggcgttctatggcgtccgcctcggctcagcccgcggccctgagcgcggagcaggccaaggtggtcctggcggaggtgattcaagcgttctcggccccagagaatgccgtgcgcatggacgaggctagagacaatgcgtgcaacgatatgggcaagatgctgcaatttgtgctgcccgtagccacacagatccaacaagaggttattaaagcctatggcttcagctgcgacggggaaggtgtccttaagtttgcccgcctggtcaagtcttatgaagcccaggatcccgagattgccagcctgtcaggcaagctgaaggccctgttcctgccacccatgacactgccgccccatgggcctgcttctggaagcagtgtggcagcctcctgagattggttctcgtatgtgtgctgctgctgtggaggcggcccttgtgttccagaggataataaatgtacttgtgactaaa

SEQ ID NO: 394 - protein, 126 aa, Mus musculus
MASASAQPAALSAEQAKVVLAEVIQAFSAPENAVRMDEARDNACNDMGKMLQFVLPVATQIQQEVIKAYGFSCDGEGVLKFARLVKSYEAQDPEIASLSGKLKALFLPPMTLPPHGPASGSSVAAS

SEQ ID NO: 395 - DNA, 22699 bp, Homo sapiens
  misc_feature (1)...(22699): n = A, C, G or T/U
ctcctgagtagctgggattacaggcacgtgccaccacgcctggctgggtttcaccatgttggctaggctggtcttgaactcctgaccttgtggtccatccacctaggcctcccaaagtgctggaattatagacatgagccaccatgccccgctccatttctttatgttcctttgtaaggctccgtggaatgtgtgtgttcacaaatatcctttagggatcatgaagggtaaactgtgtgatctcctggattggggcttgtaggtacatccgaattttctgccctctacagagatgaaagagattatacttcgagcagaatctgcctcccttttagatagctaaggtagcccatggggcatgccagcaatgtcttgtggtatctgtacctcttggcccaaaggcttagggttgggccgcttgctcagttctctgacaagcagaatagtattcctttgtgactctgttctccaagttggagactctgatggtttccttctaacaggtttcattgaaaacagatcctgcaaaagttccaggtgcccacactggaaacttggagatcctgcttcccagaccacagctgtggggaacttggggtggagcagagaagtttctgtattcagctgcccaggcagaggagaatggggtctccacagcctgaagaatgaagacacgacagaataaagactcggtgagttaaaatgagagacatgaaagatgaggggcggggcaggcaagctaggaggaagggtctagagaagaagaacaaataatgtgcaccataaagttaggtgcaatgtaaagaacagtgttacctacctccttcctcctcctgtagatgtcaatgaggagtggacggaagaaagaggcccctgggccccgggaagaactgagatcgaggggccgggcctcccctggaggggtcagcacgtccagcagtgatggcaaagctgagaagtccaggcagacagccaaggtattctgtcctcaggtcctcccacaggatgcccaaggcactggggctgagggtgtgtgtgtgttgtgggggaacttcctgtttggcagagggtaacggtggagctcgggaggtagggaaaagacaggaattttctctttctctctaacagaaggcccgagtagaggaagcctccaccccaaaggtcaacaagcagggtcggagtgaggagatctcagagagtgaaagtgaggagaccaatgcaccaaaaaagaccaaaactgaggtgggaaacccttgtcgccatcctgacccatcttgtgaccattcttttctcagacttgcttatgctcactattcttagctggatctctcctgggacataagagaaaggccagatcatagtgcttatgagagcagttctgtctataatatgccagagagattcttagagctttgacagaccaccagatgaccaggcagggccaaaggggaccagaagagttgggggattctagtctctgggtgagaagtcttagtcggaggaacaaataaatcttaaggaaaatgcagaagtggtctttcttttttattgtttttttttgtttgtttgtttttgagacagtttcgctctgtcacccaggctggagtacagtggcacaatctcagctcattgcaacctccgcctcctgggttcaaacaattgtgcctcagcctcccgagtggctgggattataggcatgagccaccatgcccggctaatttttgtatttttggtagagacagtgtttcaccatgttggccaggctggtttggaactcctggcatcaagtgatccgcccgcttcagcttcccaaagtgctgggattacaggtgtaagcctctgtgcccggccagaagtggtataaaaaccaagggcttgggggatggaggatggttaaagtggtggttatgagatggtggaagacagggagttggagtcagctgtgggtagagacaaggtgcttgagatggatccttgaggaaggaatagggttttacaggcgggaaacaagactggctgctagggagcagccaagaatgtgaggaaagtgagaaatccccagatggtaagaggtgggcttgagcaagagtactcaccacatcacagtacaacagtgtgctgtgaggggaaatgattttatgcaagagaggccccaaatctcagggaagcaggaaaggaaaagagaaaaaatgagtcttcccttttctacagcaggaactccctcggccacagtctccctccgatctggatagcttggacgggcggagccttaatgatgatggcagcagcgaccctagggatatcgaccaggacaaccgaagcacgtcccccagtatctacagccctggaagtgtggagaatgactctgactcatcttctggcctgtcccagggcccagcccgcccctaccacccacctccactctttcctccttcccctcaaccgccagacagcacccctcgacagccagaggctagctttgaaccccatccttctgtgacacccactggatatcatgctcccatggagccccccacatctcgaatgttccaggctcctcctggggcccctccccctcacccacagctctatcctgggggcactggtggagttttgtctggacccccaatgggtcccaaggggggaggggctgcctcatcagtggggggccctaatgggggtaagcagcaccccccacccactactcccatttcagtatcaagctctggggctagtggtgctcccccaacaaagccgcctaccactccagtgggtggtgggaacctaccttctgctccaccaccagccaacttcccccatgtgacaccgaacctgcctcccccacctgccctgagacccctcaacaatgcatcagcctctccccctggcctgggggcccaaccactacctggtcatctgccctctccccacgccatgggacagggtatgggtggacttcctcctggcccagagaagggcccaactctggctccttcaccccactctctgcctcctgcttcctcttctgctccagcgccccccatgaggtttccttattcatcctctagtagtagctctgcagcagcctcctcttccagttcttcctcctcttcctctgcctcccccttcccagcttcccaggcattgcccagctacccccactctttccctcccccaacaagcctctctgtctccaatcagccccccaagtatactcagccttctctcccatcccaggctgtgtggagccagggtcccccaccacctcctccctatggccgcctcttagccaacagcaatgcccatccaggccccttccctccctctactggggcccagtccaccgcccacccaccagtctcaacacatcaccatcaccaccagcaacagcaacagcagcagcagcagcagcagcagcagcagcagcagcagcagcagcatcacggaaactctgggccccctcctcctggagcatttccccacccactggagggcggtagctcccaccacgcacacccttacgccatgtctccctccctggggtctctgaggccctacccaccagggccagcacacctgcccccacctcacagccaggtgtcctacagccaagcaggccccaatggccctccagtctcttcctcttccaactcttcctcttccacttctcaagggtcctacccatgttcacacccctccccttcccagggccctcaaggggcgccctaccctttcccaccggtgcctacggtcaccacctcttcggctaccctttccacggtcattgccaccgtggcttcctcgccagcaggctacaaaacggcctccccacctgggcccccaccgtacggaaagagagccccgtccccgggggcctacaagacagccaccccacccggatacaaacccgggtcgcctccctccttccgaacggggaccccaccgggctatcgaggaacctcgccacctgcaggcccagggaccttcaagccgggctcgcccaccgtgggacctgggcccctgccacctgcggggccctcaggcctgccatcgctgccaccaccacctgcggcccctgcctcagggccgcccctgagcgccacgcagatcaaacaggagccggctgaggagtatgagacccccgagagcccggtgcccccagcccgcagcccctcgccccctcccaaggtggtagatgtacccagccatgccagtcagtctgccaggtgagcggccaggtggggcggaggtgggcctggaaaggggacgacgacaaggcggcgacgagagagggagtagcagggaggggccttgcgctggtgtagtgttttagaaaagcacgcccctctcctccgtccaggcctagtggccagtgaggcccgcagcagctcacagcctgcaggggtggttttgaggcgggggctacaagcactcgccggggccgcggcgctgcgggctccatcgggcagctcgcaccgcctgagcgcccgctgcttccacgcccggcaggttcaacaaacacctggatcgcggcttcaactcgtgcgcgcgcagcgacctgtacttcgtgccactggagggctccaagctggccaagaagcgggccgacctggtggagaaggtgcggcgcgaggccgagcagcgcgcgcgcgaagaaaaggagcgcgagcgcgagcgggaacgcgagaaagagcgcgagcgcgagaaggagcgcgagcttgaacgcagcgtggtgagtgcgtcactgcctgcgccaccgccttctttccctctttccttccttccctctgcgctgcgctgcgctacgctacgctgcggggctgtggctgggtgggcgggcgagtcacgtcgccacctgtcggaggggaggtaccactgcagcccaggaaatggagcccaaaaggttttcagcgagagccatctgcattcctgggttgggaaaaggcatgctcagatgggactacctgtggatcccaagaagggcaaatattcgggagcgggggccgcagttaagttccaggtgggcagagtttcaatgagttgaggcattttggcattcggctgtcgaaacaaatgggcagcttaaaaccagccacctcttttcataactgccgctttgactccacttttccctgtatcccacagaagttggctcaggagggccgtgctccggtggaatgcccatctctgggcccagtgccccatcgccctccatttgaaccgggcagtgcggtggctacagtgcccccctacctgggtcctgacactccagccttgcgcactctcagtgaatatgcccggcctcatgtcatgtctcctggcaatcgcaaccatccattctacgtgcccctgggggcagtggacccggggctcctgggttacaatgtcccggccctgtacagcagtgatccagctgcccgggagagggaacgggaagcccgtgaacgagacctccgtgaccgcctcaagcctggctttgaggtgaagcctagtgagctggaacccctacatggggtccctgggccgggcttggatccctttccccgacatgggggcctggctctgcagcctggcccacctggcctgcaccctttcccctttcatccgagcctggggcccctggagcgagaacgtctagcgctggcagctgggccagccctgcggcctgacatgtcctatgctgagcggctggcagctgagaggcagcacgcagaaagggtggcggccctgggcaatgacccactggcccggctgcagatgctcaatgtgactccccatcaccaccagcactcccacatccactcgcacctgcacctgcaccagcaagatgctatccatgcaggtgagacccctccttccttgccctggccctttggggccaccttccccctatcatgactgggctctttcattcctatggccaagactttcctcccctggcctggcatgaacctttcctgagattgctgccctgaactttgcctccctgacgttctctcagccttgtcttctcatggccttccctggccacaaagcctgtatgccccacagcccagttctctccatagtctagtatccttcccatgacagaggcccacacgggagcttttgaaggacacttttctattctcacagccccattctcccaagcccttcacaaacctgtcttcttatttatttttttgagacatggtctggctctgccacccaggctggagtgtagtggcgcaatcacagctcactgcagcctcgacttcccggtctcaagtgatcctcctacctcagcctctggagtagctgggattacaggcgtgtgtcaccatacctggctactttttgtatttttggtagagacggggtttcgccatgttggccatggctggtctcaaattcctgagctcaaagcgatccacccacctcggcctcccaaagtcctgagattacaggcgtgagccaccgtgcccaacccacaaacctatcttctgatttctctggattcaactcattttttgccattttctcctcttctccctctgcgaggtctttcatgtttttccccatctctagatctgtaactttctagaaagggccctgtagctttgggtttgggtgtcataggcgataatgagctttacttactatcctttcaccattttttggtttttgagacggagtctcgccctgtcaccaagctggagtgcagtggcgcgatctcggcttactgcaacctccgcctctggggttcaagtgattcttctgcctcagcaggcactgcctgcccgagtagctgggactgcaggcgtgtgccaccaagtacagctaatttttgtatttttagtagacacggggtttcaccatgttggccaggatagtcttgatctcttgaccttgtgatccacccgccttggcctcccaaagtgctggaattacaagcgtgagccaccgcacccggcttcctttttttcttttgcccagactggagtgcagtggcgcgatctcggctcactgcagcttccacctcccaggttcaagcgattctcctgcctcagcctcccgaggagctgggactataggcgtgtgccaccctgcctggctaatttttttgtattttttgtagaaacagggtttcaccatcttggccaggctggtcttgaactcctcacctcaggtgagctgcctgcctcagcctcccaaagtgctgagattataggcttgagccactgtgcccggcctcttcttgtcttattttctaaacttctatcatcttccaccttcttcacgcagtctacctctctctgtccttcccctcagacccttctgatgactgtaatctcctgtcctgtgtcatccatatgtccctcctccagtagggctcagcctgtccacccctgccaggcctctagttcttccactctgcctttgttccactttggacctccttgtgtttgtctgactcagttcccaggcttggatcccttcacccaaatgcatggtttgccccaaacctgccttctggtgacaccttcctcttctctgccctccagcctctgcctcggtgcaccctctcattgaccccctggcctcagggtctcaccttacccggatcccctacccagctggaactctccctaaccccctgcttcctcaccctctgcacgagaacgaagttcttcgtcaccagctctttggtaaggatggaagttggggtaggcagctccaatgagaaaagggcagaaaggaggtatttgggtggggggatgggcctagttgggcttggggagggatgaggaggtgcctagaggagctgggcatgggaataggagagctggagctctgcccaagagaagcacgagttttagtgtcagcctaagaggttcgaatcccaattccaccctaccactggcaacttacagaactgggtgtgttacctcactttttagttcattacctttgtatgtaaaggagctggctatcccctggtccagagcaggtacttgttatccgttggtcatatgccccttgcccttcctgctcacagctgccccttaccgggacctgccggcctccctttctgccccgatgtcagcagctcatcagctgcaggccatgcacgcacagtcagctgagctgcagcgcttggcgctggaacagcagcagtggctgcatgcccatcacccgctgcacagtgtgccgctgcctgcccaggaggactactacaggtaccctagggtgccccagcccaggggacatgggctcagcgagcctgggaggagctgtgggcatggtacggctgggcaccgtgctcctgggggagggaacccctcctctcccaaccccttcggtaagagggggcaaggtcagagttggtctcaagtctcttacctctctgctatgcactgccccttccctagtcacctgaagaaggaaagcgacaagccactgtagaacctgcgatcaagagagcaccatggctcctacattggaccttggagcacccccaccctccccccaccgtgcccttggcctgccacccagagccaagagggtgctgctcagttgcagggcctccgcagctggacagagagtgggggagggagggacagacagaaggccaaggcccgatgtggtgtgcagaggtggggaggtggcgaggatggggacagaaagcgcacagaatcttggaccaggtctctcttccttgtcccccctgcttttctcctcccccatgcccaacccctgtggccgccgcccctcccctgccccgttggtgtgattatttcatctgttagatgtggctgttttgcgtagcatcgtgtgccacccctgcccctccccgatccctgtgtgcgcgccccctctgcaatgtatgccccttgccccttccccacactaataatttatatatataaatatctatatgacgctcttaaaaaaacatcccaaccaaaaccaaccaaacaaaaacatcctcacaactccccaggaacatggctgtgactattctttgcgggatatgggggtgaggctgggtctcagtgcagcggtgcttagagagaactgcagccagggcctggcagggaagcgggaagagaccagaccttcttaaggaacggggtgtgggggctgggaagaattggagaggggatccctgaagagcccagagccttgactcagctggaggcggtaccatgggtgctggtgccccctcctgccccaaggctgggcaggaccgctgcgcgccagtggaggcctcggtctgggctctgtggcttatgcctgtgagacgcgggtggattgcttgagcccaggagttggaaaccagcttgggcaacatagagaaaccccatcttaagacaaaatcagctgggggttgtggtgcacttgtggtcccagctactcaggaggctgaggtgggaggatcacttgggggtcgaggctacagtgagtcatgatcgcaccactgcactctagcctgggtgacagagcaaggccctatctcaaaacaaacaaacaaaagacaccccaaccaaccaaacactagaggcctgggacaggcccacctctgacgtggtcagttctaggaatctattcagacgggtctcactgctaggagccaccagagtcctccggaacaagggcttcagagtcctgaaacctttccgtggaatactttaagaaacggttatgaggccaggcgcgacggctcacgctggtaatcccaggactttgggaggccgaggcgggcggatcacgaggtcaggagttccagaccagcttggccaacatggcaaaaccctgtctctactaaaaacaaaacattagctgggcatggtggcgcgcgcctgtcgtcccagcgacttgggaggttgaggcaggagaatcgcttgaacccgggaggtggaggttatggtgagccaagatcccccccagctgcactccagcttggcgacagagcaagactccgtctcaaaaacaaaaaacaaagccggttatgaagcgggggtggggtgggctagttttaataggtccaggcgattagtacctggcatccttaaccacctacagtttgagaagggagtgggtgataaaagcctggaagggaagggaaatcgggccgggcattaggctccatcgctcatcaatagacaaggcctttaggaaactgcgacaacggcttttgctctgggcctttactgccgaatccaggtctccgggcttaacaacaacgaaggggctgtgactggctgctttctcaaccaatcagcaccgaactcatttgcatgggctgagaacaaatgttcgcgaactctagaaatgaatgacttaagtaagttccttagaatattatttttcctactgaaagttaccacatgcgtcgttgtttatacagtaataggaacaagaaaaaagtcacctaagctcaccctcatcaattgtggagttcctttatatcccatcttctctccaaacacatacgcagcagtgttacagctcttttagaatttgtctagtaggctttctggctttttaccggaaagcccctcttatgatgtttgttgccaatgatagattgttttcactgtgcaaaaattatgggtagttttggtggtcttgatgcagttgtaagcttggggtatgaaggtttgggccacgcctgggcgcttccggctgcgccggatgctgtttcctttccgctcccaggggcgttgggaacggttgtaggacgtggctctttattcgtgagttttccatttacctccgctgaacctagagcttcagacgccctatggcgtccgcctcgacccaaccggcggccttgagcgctgagcaagcaaagggtgagaatcgtcctagtcaaggcatgggctgctggcctggggtagtcaaggcatgggctgctggtctggggaggatgcgggcggaggatgtggggcgacaaacctggctacgtccgccgggaaaatggggtaggggacgccgggtaccgtccttctaagtggggcgcttgcccccaagacttgggatcttattgggttacctacagcctcaatccactaattccttgcgctctccgctgggcccgctgtctgttctccgacgcctacccgggacgcctccctgggatgcttctggcgcgcagtggtcctcgcggaggtgatccaggcgttctccgccccggagaatgcagtgcgcatggacgaggctcgggataacgcctgcaacgacatgggtaagatgctgcaattcgtgctgcccgtggccacgcagatccagcaggaggttatcaaagcctatggcttcagctgcgacggggaaggtgggtcagacgcgggaaggcgggtcagacgcgggaaggcgggagttgggtcgggagagggcgccggatctgtgggcccatgagcggttgtcccctttctcgccacacggcggcagccacaatctgactaacattcttggcactcagagcccagggtctaccctgagcttgtgcgtccgagttgcgttttgtacagtagaggttctgtatcccttacccgaaatggttgggaccggaagtgtttcgggttttttcagatttcggaatatttacatatacatggatatcttgggggatgggacctaaatctgaacacgaaattgttttgtttcatatacacgcaccttatgcacatagcctgagggtaattttatataatagtctgaataattttgtgcatgagacaaagttttgactgcgttttgactacagtctcccccaccccccactatgaagtcaggtgtggaattttccattttcggcctcacactggcactcataatttcagattttggattttctaattaaggatggccaacctgtactgttaatcacattattattccattttgtgatgaggaagcaaactctaatggtgcagactctcgagtagcagagctggacttaaatgctgttgtgccaccttttagtgacatgtctgcatgacagcagtggctgcagtctctccagggtgtttcagctaatttttgtttggggggggttggtggttaaatttttggtgagatcctggtgttccccaaaggtgttgactgattcagctctgctgcctcatagccttcctgagttccagctacagacctggggtctcgtgttcattcttggggttccagtgactaaactgctaaaatggttcacctgagagcaagaagcacactgccttgggacattttcattcactgcatcccatctagttgtgcccagtgtagaccaaatgtcatcatccaaaccacacgggacagaggcctgcatgcgtcctgtttggcaaacagctgcccagccagtgggggagcagttcatgcttaaactaccaccccctccaggtgtcttaggcacgctggtccttaggagaagggttgaccttccactccctcttgcaggtgtccttaagtttgctcgcttggtcaagtcctacgaagcccaggatcctgagatcgccagcctgtcaggcaagctgaaggcgctgtttctgccgcccatgaccctgccaccccatgggcctgctgctggtggcagcgtggccgcctcctgagagttggccctcccttgtgccactgccaggggaggaaaggccttgatgttccagacaataataaatgcgcctgtgacttagccttggtgtcagtctcttgcggacctgacaacccccatctctccttccctgattccctctgcctttccaggccccatccccctgaacagctcctccctatggtcctggctgggcctaaccctgccccagggcctaaccctacctgaggctcctccccttcccccggggcaggttgagaggctggagtgggtccctcagcgccctgggtgggtgggcctgcacagggggtacctccttctctgaggaactgggctgttagggattttccttaggccctttggtttccgcctacggagaggtttcccccattggttgctcttcctcagccagggttacttcctggtctgttcccctacccaataccccgccgctctgtcagcttgagctccaggtggagctccaggtggctcctcctctcccgggggaaggcggccctggaccagcaggcgggcctgctgtactcccgctttggggctgcagggaagctggccgctgtgggcggtctcgggccagccccgccccacctgtccttttcctggagactattagtccagggtttgtccctgcagtgccattggcctggcaggcaggatcgaggaggaagtggctgattactgagcggttcttcctcacctggcttgggccactgtgcacagctgtgccgctggctcagccccgccccctgcggccctccgccgtggcttccccctccctacagagagatgctgtcccgtgggtaagtcccgggcaccatcggggtcccagtctcctgttagttttggagggagggagggctttgttgatgctcactccgacgtgtgtgaacgtgagtgcgatctgccgctgccctgcgcctgtttccggtccctatgaacttccccttcccgcaaggtgtgaggacccccggctcactcatgctcctctgccccctctttaacattttcccctggacaagtgtgtatctgttctctccattgcatttctacttccagcctctgggctcctgcttctgcctcctgcttaggacctgtccccctgggtagctcacaacacctcaaacatagcagtcagaggccacccgcgaaggccctcccacgtccagccaacttctccgcacttcccaacatcagactttggtcccatcttctttgtttcctttcacttccctttcccctgcatcattcattcaacaggtacgtgttgagcatctattatgcaccaggtgctgtttaagatgctggtaatactggagtgaacaagacagacatggtctctgctctcacggagcttacattccagtgggaggttacagaccgaacaaataacccaataaattggatcattgcagattctcagaagtattacgcagaaaatagacagccttggccgggtgtagtggttcacacctgtgatcccagcactgtgggaggctgaggcgagaggattgcttgagcccaggagtttgagaccagcctggccaatatagtgagaccctgtctctacaaaaaataagaaattagctgggtgtggtggcacacgtcctgtggttccagctatggagaggctaaggtgagaggcttgcttgagcctgggaggtcaaggctgcagtcagcgatgattgcaccactgcacaccagcctgggcgacagagtgagaccttgtctcaaaaaaaaaaaaaaaaaaagaaaatgaaccagcttcatatgctagcaagtgactgggtgtgcaggtgacattactagctggagggatcagggaggccttcccgaggaggtgacatttgagctgagacccggatgaggaggaagaggagctggccatgtgacgtagtgatcaagagtcaagcatctctgggcagaggagatggtgagcacaaagccctaatgtgggaacaaacaaaaaaaggacagtgtgcccgtggcagaggaccctagtggagcggaggcagggccacagcaggttagaccatgttggagctaggatgttgaaagtgaaaacctgacgagatgaggtggcgcacgtctgtgatcccagcactttgggaggccgaagggggaagattgcttgagctcaggagtttaaaaccagcctgggcaacatagagagaccccatctctattaaaaaaaaatactgggtatgatggcccaagcatgtggtagtcctagcagtttgggaggctgaggtgggaggatcacttgagcccaagagttcaagaccaccctgggcaacatagggagagacctcatctctactacgactacgactactattactactaataaatagctggatgtagtggcatgcacctgtggtctcagttacttggaaggctgaggcaggaggatcacctgagccaaggaggtcgacgctgcagtgagttggattgtgacactgcacttcagcctgggtgataaagcaagattctgtgtcaaaaaaaaaaaaaaaagagagggaaggaaagaaggaagggaaggaagaaagaaaaagagaaagaaggaaaaaaaggaaagagcgagaaagaagaaagaaaaggaaggaaggaaagaaagaaaagaaaggaaagaaaaagaaaaagtgacacccagtcgaaagaagaaaggaaagaaaaagaaaaagtgacaaccggtcgaaagaaaaaagaaaaagtgacaaccggctgggcatggtggctcaagcctgtaatcccagcactttgggaggccgaggcaggtggatcacgaggtcaggagttcaagaccagcctggccaacatggtgaaaccctgtctcaactaaagatacaaaaaaaaaattaggctggcacagtggtgcgcacctgtgagtcccagctactagggaggctgaggcaggagaattgcttgaacccaggaggcggaggttgcagtgagccgagattgcgtcactgcactccagcctgagtgcagcgggagagactccatctcaaaaaaaaaaaaaaaagaaaagaaaaagtgacaacctgcttacagagtactggcgagtttgtgggtgggtggctccctagccctgctgattcttgcttctcacactcatgtctgcccctgccccagtgcacatcttgtcactgtcggccccaccgatggggttcctactgagtcttctggtccctgatcccgtctgtggtcattttcctgccaggtagcttggccaggcctcccctggtgcagatttcatccttggtttctcagcctggccttgaatgaccctctacagcagggtccccacctctcagaacaactttgctccagccacatggcttgctcacggccaggcactgcccatgtggactctgtgcgtgccacctctttgccctgacccatgttgcctctgggggagcacttcttcctccaccttccatcatgggctgtggcagtgcccatcccatctgcccccgacgctgtctgctgcagtatggttgttgggggaaagggcaccaggctccggcgtctgacagccgtgttttacccaccttcctactcactagcttgtgaccttgggcaattacttaacatctctgagtcttagtttctgtttctaaaattgggtgaataacacctactaagtagggttggcctgaggattaatagtataatgtaaaagctggcagcactgaaaccctgccacttaccagcttttcacatcagtatttgggaaatattgttaagctcatttgtcaggcggggattctgaggctcagagcagttccagaactttctacagattattttgccttgtttgcgcttccagactgcctatcttcttgtatcaccattgatcttgatctgtatggtttttaatttttttttttttgagacggagtttcactctgttgcccaggctggagtgcggtggcatgatctcggctcactgcaacctccacctcctgagaagctgggattacaggcatgtgccaccacacccggctaatctttgtatttttagtagagttggggtttcactatgttggccaggctggtctcgatctcctgacctcgtgatccgccagccttggcctcccaaagtgctgggattacaggcgtgagccactgcgcccggccaacttcacgtttatacacacccatgcaaacagcatccagatagagacaaagagccttccctgtaccctaaaagtttcccagaaattgttcccagttagcatatttatttttataaaggtaatgcatgcccatcatataacattcaaaaaggtatgtagagaaccaagtgtctcccccagccctgtcctccagccacccagtttccctccctaggggaagccaccaatatgtgtttcnnnnnnnnnnnnnnnnnnnnagtataatgtaaaagctggcagcactgaaaccctgccacttaccagcttttcacatcagtatttgggaaatattgttaagctcatttgtcaggcggggattctgaggctcagagcagttccagaactttctacagattattttgccttgtttgcgcttccagactgcctatcttcttgtatcaccattgatcttgatctgtatggtttttaatttttttttttttgagacggagtttcactctgttgcccaggctggagtgcggtggcatgatctcggctcactgcaacctccacctcctgagaagctgggattacaggctagtagagatggggttccactgtgttgcccagctggtctcgaactcctgacctcaagtgatcctcccacctcggcctcccaaagtgctgggattacaggtgtaagtcactgcgcccagctgtatttttattttttgagacagggtctcactctgtcacccaggccggattacagtggcacaaccatggctcactgcagcctcgaccaccccaggctcaagcgatcctcccatctcagtctcccaagtacctggggctacaggggtgtgccaccacacctggctaaattttgtattttttgtagagacagggtttctccaggtttcctaggctgctctcaaacttggtgtcaagtaatccaccagcctcacccccacaaagtgctgggattacaggcgtgagccactgcgcctggccttgatctctacttttatcttcctgcttccaaggaaatatttttttcttctgaattatcaggcatttactcttgtaattcttagtctccctacgcttgtttcctcccataagaaaatggggaaaattattcctacatcacagggctgtctgaggcctaaatgagatcgtgtatgtgaaagtgatctgcaaaccccacaccatgccaaggtaagggaggtagttttttattttcctgccaaaggatagcagaagctgtacctcttgtctgagttctgtctcttggcttgacacccttcagaggaattcctgcctcttccatgggtcaggaagaggtgcctagttagtttcttctgggtgccgagttaattccttcccaccaagtgggtttaagccctggaaggagtgtcttggggccagggtgcagtgggcgtttggtgctgagcatggacctgaaacttcgtgtgtggtcagatttatgttccatgcgtggggatgtgcaccggaccaggtatgtgtgtaggtggacatggatgatgaggtgtgtgtgctgtgactgtgtgtgcacccttgcctgcgtatgacaagcaggctgtgtgtgtaggaccaggaagctgtacttgtggccaggtatgtggctatggactgacgagcttgtttgttgaacacttgctcagtgccaggcatcgcactggactctgaacactccgagatgagcgagagcgccagcgggtgtcccgcgctgcagccagctttgcatgtgctcttcttgctccttggcgttgggcgtgggggttccgcggatttccggggctctggggtggtgtccaagctgaaggggtagtcaaagctggaccatgcaataaacccaccaggcagattccccagggcaccagtgagagaagaaaaccagaaacaaatagaacaaaaagaaagaaagaaaagtggaaaagccttttttgggggaaaacattgatgtttgatgtttctaaaaatgataatgtagttatcatgggaaaattagacttgttgggcttaaaactttttcttcttttacctgaagcagaacatgcataatgttcataaatattaagcacacaacctggctccatttttttttttttttttgaaatagagtcttactgtgttgccaggctggagtgcagtggtgtgatcttggctcgctgcaacctccgcttcctgggttcaagtgattctcctgcttcaacctcccgagtagctgggattacaggcgcccaccaccatgcccagctaatttttttgtatttttagtagagagggggtttcaccatgttggccaggatggtctcgatctcctgacctcgtgatccgccagccttggcctcccaaagtgctgggattacaggcgtgagccactgcgcccggccaacttcacgtttatacacacccatgcaaacagcatccagatagagacaaagagccttccctgtaccctaaaagtttcccagaaattgttcccagttagcatatttatttttataaaggtaatgcatgcccatcatataacattcaaaaaggtatgtagagaaccaagtgtctcccccagccctgtcctccagccacccagtttccctccctaggggaagccaccaatatgtgtttcttatgtatcccctgttgagctgcttttcctcgttttggtttggcggtgttgatgtttgtatttggaattacaggtaggcagcatcatataccttagtgtttagggcctctaagatcaaccagccctgagaaaatcagccatggtgaggaccttgtcccccagcccccaggagataggccccctggtgggagtgctggggcagggcagaggcctagggacaagaattagaaaggacccatgttgacagggctgctcagggtcatgttgtccatccctctgccacagtggcatggacaaactgcatatgttggttagaggagggcacccttctctcttgcaagcattggcaaggtcttaactattagtctcctgctcccatggcagcccctttggacaaggaggctcttaatctctgttctttgaagccctgagggctggtgtataggagttcaaagcactggctttggaaccggactgtctgggtttgaatcctggcactgcagctgactcactgatggactcaggcaatgccttaaactccctgagcctcaggttccttgtctgtaaaatgataaagatagcccctgtttcatagggctgtggtgagaaaccaatcagacaaggcatgtgaacgccattatagcacagcgcccggcatccagcaggactcactcgatgacagttgtcaccgccatcattgttattagcgtgggccagggagggctgcgtaaaagcagctggtggaggagggagagatgccgtgggaccgtctgggttcgcatgcgtgaagtattatctgggcctggagtgtgcaaggcacacatgtgtccttactgcatgtgttgtcacatatgtgcaatgccatgctcctgagcctttgattgcagacgtgtgggaagtgggccccgtccccacccccagtgccaccctgctctgcttctcttcccttgctgtgctctaaaacgagaagtacaagtgagttcccccaaggggtcggccgcgcctcttcctgtccccgccctgccggctgccccaggccagtggagtggcagccccagaactgggaccaccgggggtggtgaggcggcccggcactgggagctgcatctgaggcttagtccctgagctctctgcctgcccagactagctgcacctcctcattccctgcgcccccttcctctccggaagcccccaggatggtgaggtaagggcctgccacccacggtagacaggaggcaagggtgcctggtgcccacgggacccctcctcactgccctgcctgggccgcccaggtggtttcaccgagacctcagtgggctggatgcagagaccctgctcaagggccgaggtgtccacggtagcttcctggctcggcccagtcgcaagaaccagggtgacttctcgctctccgtcaggtaggtgggccccccgcaaccccgggcattttggccactctcttgtgccatccaggccctgaaccactcattcctggttccccgtggcagtgctgactccccgtctgttcccttgcccccaacccccacactccccatccctgtctgtgcccacccatgcccatgtgtgcccccacccaggacctcagccgatccctgccctcctgcctctactcctgcaccgactggcctcaccgcctggtgccctgcagggtgggggatcaggtgacccatattcggatccagaactcaggggatttctatgacctgtatggaggggagaagtttgcgactctgacagagctggtggagtactacactcagcagcagggtgtcctgcaggaccgcgacggcaccatcatccacctcaagtacccgctgaactgctccgatcccactagtgagaggtgagggctccgcacccccgccattcccaagcagggatgagccggctcccaccctgaacagccagggaggcagggagactggcagccggcgctgcctaccctccatcccctcccctccctgcaccggctggggctctcaatgtccctcctccctgctgtcctgggacctggtgtctcagagcctaacctaccaccctttccacctaaccccgaggaagccacagaaagctgcctcgccctactccgggagccctggccgctgcaacccaggtcccactggagacagggaggccactgctggtggccagcatgtcgtgcaggccagctctgttgttagaaagctcttcttcctctggaatcgagcctgccttcctccgtctgcccctcaccccagcacatgttaggacagtgaggagctgacactggggtgaagatggggatgaatgcttgccaagacacttgatgccttgtcccagccgccccgtggggatgggtctgtcctgtggggtcaaataggtctccggcccaaacagagatcattgagagcacgatgtgaagtgttcacctgtgtaaagtgtctcacgctgtcccgggcacagagtaatactccaggcatttccttcctgtggcctccccgactcctcctgtggtctcccaaaggcatgggctgggggctgggggctctgaatgctcctcatgacaccatggctcctttcagcagccgcatctcaatgccagatccccttagagtaaagggcagcggaataacgctagggggttttcacatgcacccctgggccaagccgacttgcccttgccgtggatccctgcattcatggatcggttattgaaatgatcgggaaccttgctcctgccagcttgcagcctctctgagattcgggcctccaaactgcatcaatatttttggtcaaggcactgattgaaacttagagctggattcggtcacggtgcagccctgtggcccacctgggaggcctcctttcctggatcggcctccttcaaggccttccctctctctgtgagcctcacgtggctggctccgtgtctgccccctgcccttcctcttccccaccgcaacactcagggggcttttggcaccgagaccctctaaagctcatgtcctctctttctccttgcctccagccaggagaggaggacgggctgaccagtgcctggaggtggaagagaggagcagggccccaggaggcccctgcagaggaggctgaggcctgggttcaaggagaagagagaagagagagaaggaagggagggcagtgccggggcgggaggttaagaccagggaagccgcactggaggcccttttgggtgacccgtcccaggagccagtgtcacccctgagcctgggagtgtgtgagaggctctttctcccaggttctgctgtgtcctctgccttgtctgtgcgcctcctcctctgcgag

SEQ ID NO: 396 - DNA, 1279 bp, Homo sapiens
gggtggggtgggctagttttaataggtccaggcgattagtacctggcatccttaaccacctacagtttgagaagggagtgggtgataaaagcctggaagggaagggaaatcgggccgggcattaggctccatcgctcatcaatagacaaggcctttaggaaactgcgacaacggcttttgctctgggcctttactgccgaatccaggtctccgggcttaacaacaacgaaggggctgtgactggctgctttctcaaccaatcagcaccgaactcatttgcatgggctgagaacaaatgttcgcgaactctagaaatgaatgacttaagtaagttccttagaatattatttttcctactgaaagttaccacatgcgtcgttgtttatacagtaataggaacaagaaaaaagtcacctaagctcaccctcatcaattgtggagttcctttatatcccatcttctctccaaacacatacgcagcagtgttacagctcttttagaatttgtctagtaggctttctggctttttaccggaaagcccctcttatgatgtttgttgccaatgatagattgttttcactgtgcaaaaattatgggtagttttggtggtcttgatgcagttgtaagcttggggtatgaaggtttgggccacgcctgggcgcttccggctgcgccggatgctgtttcctttccgctcccaggggcgttgggaacggttgtaggacgtggctctttattcgtgagttttccatttacctccgctgaacctagagcttcagacgccctatggcgtccgcctcgacccaaccggcggccttgagcgctgagcaagcaaaggtggtcctcgcggaggtgatccaggcgttctccgccccggagaatgcagtgcgcatggacgaggctcgggataacgcctgcaacgacatgggtaagatgctgcaattcgtgctgcccgtggccacgcagatccagcaggaggttatcaaagcctatggcttcagctgcgacggggaaggtgtccttaagtttgctcgcttggtcaagtcctacgaagcccaggatcctgagatcgccagcctgtcaggcaagctgaaggcgctgtttctgccgcccatgaccctgccaccccatgggcctgctgctggtggcagcgtggccgcctcctgagagttggccctcccttgtgccactgccaggggaggaaaggccttgatgttccagacaataataaatgcgcctgtgacttagccttggtgtcagtctcttgcggacctgacaa

SEQ ID NO: 397 - protein, 126 aa, Homo sapiens
MASASTQPAALSAEQAKVVLAEVIQAFSAPENAVRMDEARDNACNDMGKMLQFVLPVATQIQQEVIKAYGFSCDGEGVLKFARLVKSYEAQDPEIASLSGKLKALFLPPMTLPPHGPAAGGSVAAS

SEQ ID NO: 398 - DNA, 11818 bp, Mus musculus
  misc_feature (1)...(11818): n = A, C, G or T/U
cagaacttagaatttgtcactgttcacagttcccatctcctgtctacaatggacacatcaaaggtccatggcaatgtaaagccatttaggtgtccagggtataagcaagcatcttctccatctttctccccaggtaagtggctttatttattcttttggaatgtgcatatagcctagatataagcctcccccattattttagagttgtaagcaattgctttggaatagtgagatgacttattaggtaaaagtacttgctgcacaaacctgacaactggagcaaaagtaggggagatggcttgttgaaatggaagtaagagcactgagaattccaactgcttttgctggaaagagaatcacttcttgaagttgttctctgatctctacacctactatagtatgcaaacatgagcagtcacatagactctctctctcgcacacacacacacacacacacacacacacacacacacacactcacactcctatatcccacacctgcaattatacaaaatggacacacacctacagtcacaaacacacacttatacacacatacacacctgcagtcacacagacacacatttatcacacacctgcaatcacagacacacatctgtactatcaaacacatacactctctgtctctgcctccctctgtctctctgtttctgtttttgtctctgtctctgtctccgtctctctccctctttctctctccccttttctctctctctctctctctctttctctctctctcctctctctcctctctcttctctctctctctctctctctctctctctctctctctctctctctcacacacacacacacacacactagctagaaacctgttgcttttaaccagtggttcttctgttgatgttgatagtgtaggacagcttgcctgtagctatctatagattcagagagaaaaactcacatgttgctttttattcaagtaacctttatgcacagggcttcttctactcagccttagttaaaaacaccctgaagaaataatgttttgcaaatatgagcatgagaatgttattagagatactgcaaacttgctgtaataggttgcccattccagatcgtggtacacaacagactctctggctcaactccactgcagttgcacttctagcatttagcattagggaaaaatcagccctcttttctgccagtttagaaatcttagggaaacaatgtgcaagactgaggtagtactcaaaagtatctaacaggacatgaggatgtatgaaaagggaccagaaactgaggtagaaaatgtgtcaaattgtcctgagatagcactgaactctgtgacccaactggacttactaatattaataacactgcaccatttcaatttgtgaaattcctatattgtaaaaactatgtgattatcaatattaaagattttggttaggaaccatcataagaggtaaaatcaggaaagcatcttagaatcattatatcagcttcatcttcatgtcagagtcaagagtaagtggaggcttttacagtgctaggatgttcccagtgagccaacatgatagaaagaagcatgtttccttctgctgtgttcctgcttagcaaaagtaggggaggggcttgttgaaatggaagtaagaaagtgcaggttgagaaagataatgtgatttcctcagcactactatctcaaatcaagagactaggaaatttgtctaccctcattgtaattattttcctacagacatcagcttgaatgtgaacctgaaggacaaattagtagaatagtaccagcaaggcatatgacccagtagtgaaggaacggaaccaacctgcgcccattaactaggttcaaactgtgggaaattcatagcataaggattagaactctcagtaaacaaacacagaaagaggaacatgaacagttacctactttgtgaccaaataacagaaagttttctttgatggtagaatggatagaatatatacagagctcattcattcattcattcattcattcatccattcattcattcagttataaccaccctgctatgtgtcagtgtttttcaaaataatatccaggtttaaacaaatgtgaacatcttttccttatagggtttctatgaatgtatatatgtgcaatcattaaacacctgccccacaaatcccccttttgtttttataaaaaagggggggctcactggtgtgcctgtgtcatttgtgatgaaaatttagggtggggtggaagtatcagaagaaaacatacagcctagagaagtagcacaacaaagccagagtagtaaagagggttaagggtaagggttgggaaggcaagagattgtacaatcaattacttgttccatgggtagtacaatttgagggtaataacaccaattttgaacagcaattaattaatttagatagacattatgttttctttgctatcatgtaactttccctaagttcagcagccattggctttggcgagagagttcatctgtagctggaaggtcccaagtctgtcttctgtggggttcttcatgtgtctcaggagtcttcagtcagatgaggtttttggaggaaggcagctttgttgtctgtaggctcagaagatgggcgggcgctgttttaagtggatcagtggcagcaggcactatgtggagatagacctgtagagttgtaacagaggagcagatttccagcagggtgtctctgcatagggtggatagcaaacattatgcctgcaatggtttgcttaggagcacatcatggtccgttgttaggatgctaggaaagtgagggtgtttaaggaatttagtcctggaaggcaccctttaagtctgctttggatggccgaggaagaaaatatcatgttaattgtgtatctggggtaggtagtaacagttagtctgtaaaaggaaaccggtttttaattaaggattggatgacttttgaaccttaaaggaaattttaaacaaggtgagagatttttttgggacatatatcatgaatgctagagagaaaataagcatttaaacaaagaagcaagaaaattttgggttgaaaagcatgatttaggtgttcctgaagggagagcagagccttcactgcagttttcacgggcttagctgggtggggggcaggggcacattgtaccctatagttgccttgtcttccccttttgtttttttcttggaaagcagaaggagaaaatctaacattgaagaaaagataagcatagagggttgggtgaaaggctttttagccaaggtggttgtctgcaagtgctgcatggcccttggcggtcactttcgcttctgctgctgccacccacagctgcctgcagcctgcgctgcccgcctttggcctgggaactccagtgcacggggtggggcggggccgggtcgtggtcgctaagcatgagctgcactctctcggggctgtggtggggaaggacgaacggagctcagagcaacattgcaaggggggttggcagcagagtctgtgaaaccttctgctgcagggaaaacctgtgaagagtgannnnnnnnnnnnnnnnnnnnnnnnnnnnnnnnnnnnnnnnnnnnnnnnnnnnnnnnnnnnnnnnnnnnnnnnnnnnnnnnnnnnnnnnnnnnnnnnnnnnnnnnnnnnnnnnnnnnnnnnnnnnnnnnnnnnnnnnnnnnnnnnnnnnnnnnnnnnnnnnnnnnnnnnnnnnnnnnnnnnnnnnnnnnnnnnnnnnnnnnnnnnnnnnnnnnnnnnnnnnnnnnnnnnnnnnnnnnnnnnnnnnnnnnnnnnnnngaaatttggagttttgatgtaggtctctgtgtgtggagcattttctttagctggttctgtcttgcatcgatagttacaccattgtcttgctacgatttgcggggctgtgggtgtaggggaagagtggagtgggagagagtgcccgtgtccggcttgccccacacatcgctcttatattcagtgtgtctttggggccttggaggttttctttgtgtgtgtgttgacttttgtctccttgcctagcaacataccatgtcttacacagcaggaatcacattccatggtcctatttcataaaagcaatgcactattttttctatgacagtcttatatcacctcagaccacacagcttttttgttcaccgttcacaaaagactgcttgcagaagtgccacatatcagatcttcacttctataaaatatggtatttgcacaagacctatgtgcatatctctgtgtgctttagatattctccaggttaaccacagtgactaagatgatcttggtggcatacaaatagttgttataagtatttctcaagaggatatgatggggaaatctgtatgtgtttaacagttgcagctctttaatttatatatgaaaagttttagtcagcagtgaatttagtcttcagatatggagaaaccataaagctaagggagttgtctcctatctcttaggagtatttctatgctttctccttcacttaatttattttggtttttcctcaagaacattttaaaataatttagcttacttaatgattgtcagcatcctaaaactggtctacggtgttgtagtgtttgcattctcaatcatacaattcaggcaccaaagataatgcgccccccccccccaaagagtgaaaatggatacacaggcaattctggaccatactatgaaaataagcatatctggtttaaaaatttaacatgtaactcaaaacatgctattattttcaccaggaaatatttataagcaacaaaaccaggaataatctatatttgtagaaattaagaaaccatagccacatattgtgggacacagctgtaactctagtacgtgggaagagcagacaaggagatcaagaattcaagggtgtcctcaatccttaacccttaatcagttaagagtgagtttgggtctagtctaagctacaggaaaagcaatctcagaaacaaagcagagcaaagcaaaaagtagtaagaaatctttgcttaaaatggtatagtacttggttctaataaataagtctagaaaccatttataaattggtaagacatggaattgttagaaattaaataagagcaaaagggttttttttttttattaaattagagacagaaaagccagttaatgtttctccttattatctttataaacaaaattatcattgtttctcatatgaaacccatatttctaattgtttagaagaaagttagacaaagatatgatacttgatgaccacatttaaaaaaattagtacgttttactgtttaagaaacataagccatccattgttgatagagttaccaaagaaggcagagatatcaaagacggtatttaggcagtgcagtgtggtagatctagtgtatgccatgctatgtggaagacatccagggtcttgtgctcacagataagcactagatgacacaggaatgttaagcagaaagtattgttcctttaaagaagagatgcataatctgagagattagacatggttaatactctggtaactcttgcaatatctatatggctgagactatactgattcgtctcccagacaagtatagtgatcttctcatctacaaaacttatctttatgaaaggtatcatacatacttacaaagaagtcaagtcttcagttatattgtatacaaaggatttagttggttatcacctgagaagtttttaccaagtcgttgtgcttcaaaatgcctaaaatatgctatttggggtcagatttctgaagtttgaaccaatacctgctccttaatcatgctgagcctaactgcctactgcgtctggcagatcatatactgctgactgtggtgatcacagggactcccacaatgttacatcatagtacttccataacttctatatacatagtgtatacctcatgttatgcctcagtactcctgatttgccatttcagtgtctgtagcttctactacttgcattcaacagtgagtttaaatgactaagtataaaatcgtagagataagtaattcagtgttttaagcgagacacggccttgagcagcaatggtgagatatcatagcatctagtttaagctgtgactcattagtccccagtgctgtgtctcaggaacactcattcagtcagtgatggaatcgtattgcaaaagtagagattctgacagcccactcatgccaaagagaaaccgtggtgcatttctttaaataaaaggtacaaagtacttcacttaactgaaaaaattgtttacacaaattgtgaaagttataaccaccagttatatcatgggttaagttaaaatagaaatccctctctctttgtcactctctctatctcttgttctctctctctctttctctgtgtgtgtgcatgtgcgtgagagaaagagacagagagagacagagagtgtatgtgtgtgtatgtaaaactaagtgtagcactgtctccaggctcagttagtctattagaagtattggaatcagtccttgtaagttaaggaagatcttatggtagttatgaacttctctgctacttatctcagaagttctcaagtggacttaacaactgtatcctttgcacttcttagatgcttgtcggtgcccacactggcatcatttggctctgaaatctggctgtgctgggctgatccttcttctcttgagcctgattggactcagtgtcttaggtaagtgaggcaaagcttttccttcatagtattcccatataaacattagtcctctttatagcatttggcctctttaagcctagggtaaggtcaatgccacgtaattgttacaggacaatattctgaactttctgctgaaacatcacattccttccatgcttcttaattttttagaaaaccattacagggtaaagctcttgacctataaaaaaataaaagtcacattgttccaaaaagatgacagtagcaaagaacccaaaagtcccatgttagcatctgcttctgacatgcctgctgaaccttgtcttggtgtggttgtgactgcagataagcaagttcaggtgtgactgtgaacaattgagagattcagccatgcccacaggttgacttgtcaagcagaatcatgaaacctcagagccttgtgaatctacatggtctgtgcttttcttgttcatatatcctgtctcagaacttgtcccttaatctagtttcctgatattttatcctcagtccagaaattcagatttgttgaaataaccccattgcctgaagtgagaactagaatatcctttctactatttatttcaccatttcatcctctgtgtgtgtttttcttatttactagtgagattcctagtgcaaaaaccaccaatagaaaaatgcagtgtggctgctcaagagaacaggactgaactaacaggtaattgtgtggcttgaatttcctgaggataataggtagcagaaaattgtgagttatctcagtcaaagttcacaacagtccttgatgaagacaccatattgccatggttttgtctgagaaggcagccatacttttaagaactcatggagagtcacacagtttgtaaatgttggtcctgctgcctgctggtgctggtggtgcacatgagcactcataggcagatatcaagttaaaaagtggaatactagtgaatatgttaaacaggttactttgtttgatgttaattaatataaacaaaatataaaatgaatcctttgtcattaattatgattccctgatatatgacagcattagttaggttcccacacacactaatgaagtacctactgtgtgtagttgattgtgatataccataaacagggcagaaatagaacatgtcctctctcttctctaggaagatcagccatactagagtgcccgagatattggcatccacactggaacaaatgtttatttgtttctcaaatttccagaccttgggcagaaggtcgagatgcctgctctatggaagacgccattttgttgctcattgaaaataaagaagaactggtaaattgttaaacaatattgttaagtagaatacaaagcttttctttaagctatgtcaacatctctgaattctaaccaattgtctatgctgaggaactggaggcttgtattttaaagagttcataatgtgagagactaattggatttatgaattaataacttggatgaatcaattaaaatacaaacatatatatatatatatatatatatatatatatatatatatatatcaatgtagagagaattattggtggggagctaggaagaccttgggcagaatgtgtttagaactaatcgtggtttagaaggttaatagatgaatgtaagtcatgaataaacatgttgtagttcaagtatttcactctgtttttaattgtagagatttgtgcagaacttgataaagggaaaagaacagttattttttattggactaaaatatgtacagaaggagaagatctggaagtggatagatggctctattttaaatcctaacctgtaagttttaaatgaactaatttgaaaattcaattcatatctattttactaaaattaagttttagaattttaatttagtttataaattcttgaaaggttcagctgaaaagacaagtcaaccatttattgaaaaatttcatgtacaaatagacatcaaccctttttaatagtttgtgtgtatgtgtgtgtatttatttacaatggaattttaaaggataaatagtatattaacttatccatgtcagagataaaatatttttaaatgcctatctgaaatacttaatatatttttatttttaaaatacatacccttacaaagaatttctttaatgtttttatgtgtgtgtgccagcatgtatgtatgtgtaccatgtgcatgcaggagcccacagaggtcagaggagggcatcagattttctgtaactggagtaacagatgattgtgatctgcattgtgggagctggaagttgaatctgtgttctttgtatgagtagtaagcactcttaacctctaaaccatctctcgcaaccctacacaaaaattcttatgtagttctttagaattgtggcagaaagttgcatcttagtttgtcacaaaataaacttctctaagcagaatcagaatagacattgccttttgaaaataatttcatacaaactaatgattgatttttgtgtgtgtgtttgtatccgtatggatattgattttgttttgtgtgtgtgtttattaattgtatatgatgtaaaattcttgtttaatcttgattcataatacaaaatattatgataataagtgaaaaattcatgtacagcagaggattatactcagttgctgtgtgatttactcttggataaaatgatgctctgatcaaacagcaacaaccaggtaaatctggaggctgtacttccatagtaaaaagagagtcagccaaagtctgttttggtttgcactgcactgagacaatggctccaggtacaagctctaggtatctaagcttcatagctcattccacaaaacccatataaaaagccagatgcagaagtgaatacctggatcttggcactcttgcagagagactggaggtggagatcagacattggcccagcataacttggaccagtgagccttctccacagcaggtagaaacaaaatagaaaggaagacactagggtgtcatcaaatttgctgtacagttcaaaggaactctataaaaaaaggagtagaggtaaaggcacagggatgagggacgtctgcctactgtctgatatgttatatcctctgctagagacaggctagtcttgaactcacccttccttgcaatcacccagaagatgcctgtattagtgtttgctttctggtcttattctcacatgtaggggtctccaggaactcagggtatgagactagtgcttcaataagacaaagacccaccagcttttggcatgacacagaaaagaatcggaccctgttcaacatgagttgaggctcttgtcctctctgcatccaattctgtagactcactgtgttcattctgtttattaaatacagttactgagcacctagtgtgtaaatcctgacatgtatccatgtatatatcaatacctcccctaaaccttagctggtattttaggaaactgaagctcagcaagatgaagatgctttccacataaacacataacatgtttgtattagatggagtaggtttcagcccaactcacaaacctcccttttttacatcatgataaagattgttgctggaagagttcttccccagtgacagtgcaatacaaaattatagaggcttctatcagctgtatctttaatgttgatatatgtttataatgtttatcagtgcatgataactatacacaaatattatgtaatctagagatttcttaagtccagagaaaaatgatggctgatgtgataattgtaagaaaatcttggacagctatgctttactctccagattacgaatcactggcaaggacaaagaaaacagctgtgccatcatctcacacacggaagtgttttcagattcttgttcttcagacaaccactggatctgccaaaagaccctgatacatgtctgaaagcctgtgtcctgattcctgattgtgagtctcatctggattacttcactgtccacatcggatctctgtactgaacattctgttggcccacccagtgagtagctagtggcacaaaacaaggactccaaaatcactgtgacttttacagatgctcatgtctagtttattatgtaaacataaatgtacacagacacagatgtgccattctaggagaggagttctatagaaggaagcccagaccagcaaggggcagtgaaggccttgtgatgcccttgctgatctttttgtctaaggtcatctgcagagagctacagaaaactgtttgtaaagtctagattttgaccctatccccacttcaagctacttcacatttgggctgtagaaccttgattaaagtcgtgctgtcatttatttgactgacagcagaggctcagagttaaggagcttgagatgaaaagggtttgtattgattgacactcgccaactagttgactaataatggactaatgctgtgttcgacattgagtgtgactttatgtaaacagaactctactcatatgatacctactactttgtggtgatgtaccagcagactctgggcagattctgggccattggagtggggcttctcagtctcctgagttgcatgaaagtgggatgtcctcttctccagtgacctgttagtacagctataacaataccaccaccaccactaccaataacaaaaacaaaaagactaagacagggacttgtctcttcccactgcccacaggcatcctattttaattttcccatcacttctttcttccacatttctctataatttatagcttatgtacaaattgtaggacatatgtagctaaatattggataattgtagtaggaaataaatgacagctttttaatatttaagttagagaaattttcaaaaataagtattctgataaatctttcagatgtcctcttctcaaaaaaacaaaacaaaataaacaaacaaaccacaaaccaaaaaaaaaaaccaaaaaactttgtcaaattttccattgtaatcaaaagaaaaatattgaatttactatataaagaaataatgaaactttttagaatagatacctacagaccctcatcactcaatgtgaaatataataaaattgaagcatatgctatgatccaagtaaaatctcaattaaaataattctaaaataaaattattattta

SEQ ID NO: 399 - DNA, 1917 bp, Mus musculus
cagaacttagaatttgtcactgttcacagttcccatctcctgtctacaatggacacatcaaaggtccatggcaatgtaaagccatttaggtgtccagggtataagcaagcatcttctccatctttctccccagatgcttgtcggtgcccacactggcatcatttggctctgaaatctggctgtgctgggctgatccttcttctcttgagcctgattggactcagtgtcttagtgagattcctagtgcaaaaaccaccaatagaaaaatgcagtgtggctgctcaagagaacaggactgaactaacaggaagatcagccatactagagtgcccgagatattggcatccacactggaacaaatgtttatttgtttctcaaatttccagaccttgggcagaaggtcgagatgcctgctctatggaagacgccattttgttgctcattgaaaataaagaagaactgagatttgtgcagaacttgataaagggaaaagaacagttattttttattggactaaaatatgtacagaaggagaagatctggaagtggatagatggctctattttaaatcctaacctattacgaatcactggcaaggacaaagaaaacagctgtgccatcatctcacacacggaagtgttttcagattcttgttcttcagacaaccactggatctgccaaaagaccctgatacatgtctgaaagcctgtgtcctgattcctgattgtgagtctcatctggattacttcactgtccacatcggatctctgtactgaacattctgttggcccacccagtgagtagctagtggcacaaaacaaggactccaaaatcactgtgacttttacagatgctcatgtctagtttattatgtaaacataaatgtacacagacacagatgtgccattctaggagaggagttctatagaaggaagcccagaccagcaaggggcagtgaaggccttgtgatgcccttgctgatctttttgtctaaggtcatctgcagagagctacagaaaactgtttgtaaagtctagattttgaccctatccccacttcaagctacttcacatttgggctgtagaaccttgattaaagtcgtgctgtcatttatttgactgacagcagaggctcagagttaaggagcttgagatgaaaagggtttgtattgattgacactcgccaactagttgactaataatggactaatgctgtgttcgacattgagtgtgactttatgtaaacagaactctactcatatgatacctactactttgtggtgatgtaccagcagactctgggcagattctgggccattggagtggggcttctcagtctcctgagttgcatgaaagtgggatgtcctcttctccagtgacctgttagtacagctataacaataccaccaccaccactaccaataacaaaaacaaaaagactaagacagggacttgtctcttcccactgcccacaggcatcctattttaattttcccatcacttctttcttccacatttctctataatttatagcttatgtacaaattgtaggacatatgtagctaaatattggataattgtagtaggaaataaatgacagctttttaatatttaagttagagaaattttcaaaaataagtattctgataaatctttcagatgtcctcttctcaaaaaaacaaaacaaaataaacaaacaaaccacaaaccaaaaaaaaaaaccaaaaaactttgtcaaattttccattgtaatcaaaagaaaaatattgaatttactatataaagaaataatgaaactttttagaatagatacctacagaccctcatcactcaatgtgaaatataataaaattgaagcatatgctatgatccaagtaaaatctcaattaaaataattctaaaataaaattattattta

SEQ ID NO: 400 - protein, 215 aa, Mus musculus
MDTSKVHGNVKPFRCPGYKQASSPSFSPDACRCPHWHHLALKSGCAGLILLLLSLIGLSVLVRFLVQKPPIEKCSVAAQENRTELTGRSAICPRYWHPHWNKCLFVSQISRPWAEGRDACSMEDAILLLIENKEELRFVQNLIKGKEQLFFIGLKYVQKEKIWKWIDGSILNPNLLRITGKDKENSCAIISHTEVFSDSCSSDNHWICQKTLIHV

SEQ ID NO: 401 - DNA, 5915 bp, Mus musculus
gtgcctctcagctttcaagtttcaatcctgtagtggaaactcagctcctcagctctgagatgtgtgtcacaaaggcttccctacctatgcttagtcccacaggcagcccgcaggaggtagaagtgggtaagtattcaatagtatttgaaccaatgggaggggcagagaggagtttcaaacagggcaggaaggcaaaagagttgaaccttgaacaaaagattaagaacagaagggcgtctgtgagcccgtcactgtgggtctgcagagcaggagaatgcagtcgggattagctatgaggttgttacattagttattctattggagcatacaatactcgaatagttctcaggcaagagaaatgagcagcgagtcaccttctaactgccagagctgtagccacagcgttctcgctttgtacttagcttgctagtccactcttcccagggatctggtaagttacagtctggtggattacatcaaattgctgtagtaaacgtttgctttaagtccctgagtgaaggaaactcagacaacagctttgcaatgtgcatagtggcagaagttgcctgggaagcttggagcttgtgttttgcagatccattgtaattaaaatagaattgtaagggggtggcttggggtggggtgggggtggggggcgctgaacctactcaggaccaaatcctttctgttttgagctcttgataagttacagaaaaagaatataatggggtttcctacttaattcttcagaaaggaagcaaaattgtgtttcttgtgtttcaaactgtctatgctccattatattgtgttcctttattttccttttccccctcattcctgtttcttcacattaattttttttttttaatttgtggaaagactactgaattttgagaaagtaagattgacatctatcaaaatacaaaattcccaacaaatgctaatgtttatcacttaaaccaagtattctgaaataataataataataataataataataataaattataataaattattattactgaggatgatgatgactgactgactgattgattgattgattgattctttggcaaagtctcatactttaccccaagctggcctggaactcctgctccctctgcctcagcagggttgactttttaaaatcaaatacacaaatatttagccattggaaacatttcctgagaatgtggagcttctgtctcaagtgcagctgttgcatagctagctgcaggcattttgaagcctgtcttgtgaatgtggagctcctgtctcaagtgcagctgttgtataactagctgcaggcattacacaacttcactcctttgaagcagtagcttgttttatcattgaaacagtttttaagtaagctaaaaaccaggccagcaatacttcatttctttgggttttttgagagatcatttccaacattacttttaaataaagacaggaaagttatgttcaaattgtgctatggaacacattcgaatttagaaggagatctgtgtgtatacagcaaaattcctgtttacatattagaaggaaacagacagtatcagaattatactggtgtaaacacagaggattatctgtaaatcttactcttaatatcatataagaaatgctggtgtagaactctaaataaataaaattaccattctgagtttttgaaatgcccaataaccataaatgtgttcctttaattcctaacttgctaagagttcttgttattttagactaatattatttttttcacatgattttggtaagcttgttaaaatgctcccatatttttatccattagttatgtcagtgtgttctattacatttatgtgcctttattaatttatttactgactaggttctctgagactgatccttacatagtccaggttgagttcaaacttctaatgtagccaaggctagtcttgtactcctgactccagcttctgcctccctagcactggaaatataaaagtgtaccaacctgtttgtctcgttgactggagcaggagttacacaggtggttatgaggtgcccctttaggagctgagatttaggagctaactcctgtcctctagaagagcaacaattgatcttaactcctcagccatctctgcagcctcctgctgatcccagtctgtccccatccttggcactcagtgttattctcagtcctagccagtctattcttagggagcaaaatctatgaatagcttggatgttgtttgctttcagcctgatcttcactctttctgtttcttgtttcttcattggccctttgttcaatgactggaagactccatgtttccctttcatctagtcttctgtgagcattagacatcatttataaaccaggaccttctgtgaaggggtttgcaatgggtgaatacaagccaaatctacagataattctttttctttaaatgttttttgagattggtgttctcatatttatattttcaggtaaaattctccaaggaaaaaggcacggaaccatctcccctgagtcttgtgctaagctttactgctactatggagtgatcatggtcctcactgtagctgtaattgctctttctgttgctttgtcaggtaagtgacttattctccaaattatgtgacactttgtccacattcacaaggtcagttatacttactgaccactgtgacccaggcattgtgggaagggctctggagaaatcacactggaaattcctgttctctgggaacttaggttctagctggaaggtgcagtgaaggaacacacagtctgtggtgtacacaggagtcttggcttggcatctgtgagaagatgacattcaataagctctcaactgagatgtcagggacataaatctccttggggaactgttcaaggcagagaataaagagaggaaatttcaaagtaggaacctcaaaggtgaggacagggaagagtaatatggccaggaagatacagtgcctcccaccatgacctagtttagttaccaggctaaactgaattttcaaagtattaaatggaaagtttctgaagtaagaaatttataggattttagtaccacaatatcagaatagtgcaatacaatcttgcactgtcctcttaagtatttgaagtcatcctttagtgcaatgtgtctgcaccgtatatactacctacacaaaagttctcacagcaatctcaattatcaggctgggtgtcagtaggtgtccctacagagtgcttgctgctgtagcaatccctactgtagtcaatggtcatccaaaagctcagaaagtgatatagaagtgatatagtgttatagaagtgcacttcctgggagccctactgacagtgagcacctgagagagaatgggacacaggcccacggtgggaggcctttagttaaaggcccatcagatcagttaggaaagctatcatcagattcacacctcacagctgagctcaggagggtgtgccaaaacgagagaagacctgcttgccatgatccattgtattctctacattttagcaacaaagacagaacagatcccagtcaacaagacctatgctgcttgcccgcaaaactggattggagttgaaaataaatgtttttatttttctgaatacccaagtaactggacattcgcccaggccttctgcatggcacaagaggcccaactagctcggtttgacaaccaggatgagctggtaagcaatgggcagggattggtttgtctgtctgttctgttgaatattatattgccttgagatagagagttacagatgaggcctgaggaaggatcccatcccaagcacatggagacatagggaatgtgagtgtgtgccatttgctgatgcttgacttctgactggagccctgagacagtcaagaaactttctctcatgaagtgttcatagtcagttggaaggtcagatatgccattttactggatacctggtggtcatcagtgttttcccatatgctggcacttgttgtgtacagaaggaagcaactgttaataactgcaatgggaggttaacccagaactgagtaatgtgaccctcagttacaccctcctgttatctctagaggaatctgtggagtggagagattccaggatcatctgaaacaaagagacacatgtattcttggtttttgtgttttatgacagaatttcctaatgagatacaaggcgaattttgattcctggattggcctgcacagagagtcgtcagagcacccttggaagtggacagacaacactgagtataacaacacgtatgttttcacaaagtttttccttctattatgttcatgtgttgtgatatgtgtgagttgtggctatgggagatgaaaggcagtgtcatgtgaagccaattgtactgggaaggaagaaaaaagaaaatgaacccttgcatggaggtgtggctcagaggtagagattgtgtttacatgcaacagccaatccccagaaaactccacattcccacaaacttaaatgcttcagaggttttcctgtttattggctgtcattttcaaaacttccacttagtgttgttttactcaaaatctttactctaatgatggtgtctgggagtagctattgtttgctctggctccaacttaaacatttctgttgttgataaatgtcctgtgagggatatagacagagccttagatgggcagtgggggctctgaaatcccagaaagccactgcagtatctgcaaggctgagattcagctttccactatttgcatgtctgcacctgttcaggaaagcagagactctaagtacatttggaacctcctctaaagtctcatcatcactgagctcccaaaacagttcttgggtttgagctgttttcctgggatggtaaatcacagactcagtcacatccatcactgaagcccttagagccatttattaagaagtgggcgtccccatatataaaatgcctaaaaacagaattgaaaatcacccttagtcgggtcactcatggctgcagttcatttgaacatggcagcgagcaccagcccaatgccttgtacacacattacaggattcaccatggacaaatgacaaaggagtggtgtacaaatcctgagaatatgagacagtaggtgtaaaactaatgcaggtgattcctcagggactttttgattcatattaccaaaaatcagtggagactggtgagatttcattgcaggagcaaatgcagttctgggttctgcaggcttactgtttttggtttcttttcaggattcccatccggggagaggaaagatttgcctacctgaacaacaacgggatcagcagtaccaggatctattcacttcggatgtggatctgtagcaagctcaacagctatagcctccactgccaaactcctttttttccttcctagcatttaccaagagacgctttttagcctgttatctgtgggtgctactctttcccctatggtcccaaagtgctatcaaaccagatagagaatatttcttaacatcagaaatgaaaaccatcatttcatttcatgcagagattgttcagtggttaaaatcactgactactcttccgaaggtcctgagttcacatctgagcaaccacatggtggctcacaaacatccgtaatgagatcttctgaggtgtatgaaaacagctacactgtactttatactctgcaatttaaagcatgagggacataggagagttagctaccccacactgatgagtcccaaaaaggacgaaataacaggctaaaaagcctctcttgaactcttcatcctttcttctccctcttggtctttttaaagaccaggtcgctgaggagaaagagatggagaaatgggggaagggaaggggagagggacatgattgggggaggggaggggagggaaattaataaaaaaataaaaccaaaatactac

SEQ ID NO: 402 - DNA, 1206 bp, Mus musculus
gtgcctctcagctttcaagtttcaatcctgtagtggaaactcagctcctcagctctgagatgtgtgtcacaaaggcttccctacctatgcttagtcccacaggcagcccgcaggaggtagaagtgggtaaaattctccaaggaaaaaggcacggaaccatctcccctgagtcttgtgctaagctttactgctactatggagtgatcatggtcctcactgtagctgtaattgctctttctgttgctttgtcagcaacaaagacagaacagatcccagtcaacaagacctatgctgcttgcccgcaaaactggattggagttgaaaataaatgtttttatttttctgaatacccaagtaactggacattcgcccaggccttctgcatggcacaagaggcccaactagctcggtttgacaaccaggatgagctgaatttcctaatgagatacaaggcgaattttgattcctggattggcctgcacagagagtcgtcagagcacccttggaagtggacagacaacactgagtataacaacacgattcccatccggggagaggaaagatttgcctacctgaacaacaacgggatcagcagtaccaggatctattcacttcggatgtggatctgtagcaagctcaacagctatagcctccactgccaaactcctttttttccttcctagcatttaccaagagacgctttttagcctgttatctgtgggtgctactctttcccctatggtcccaaagtgctatcaaaccagatagagaatatttcttaacatcagaaatgaaaaccatcatttcatttcatgcagagattgttcagtggttaaaatcactgactactcttccgaaggtcctgagttcacatctgagcaaccacatggtggctcacaaacatccgtaatgagatcttctgaggtgtatgaaaacagctacactgtactttatactctgcaatttaaagcatgagggacataggagagttagctaccccacactgatgagtcccaaaaaggacgaaataacaggctaaaaagcctctcttgaactcttcatcctttcttctccctcttggtctttttaaagaccaggtcgctgaggagaaagagatggagaaatgggggaagggaaggggagagggacatgattgggggaggggaggggagggaaattaataaaaaaataaaaccaaaatactac

SEQ ID NO: 403 - protein, 205 aa, Mus musculus
MCVTKASLPMLSPTGSPQEVEVGKILQGKRHGTISPESCAKLYCYYGVIMVLTVAVIALSVSATKTEQIPVNKTYAACPQNWIGVENKCFYFSEYPSNWTFAQAFCMAQEAQLARFDNQDELNFLMRYKANFDSWIGLHRESSEHPWKWTDNTEYNNTIPIRGEERFAYLNNNGISSTRIYSLRMWICSKLNSYSLHCQTPFFPS

SEQ ID NO: 404 - DNA, 56900 bp, Mus musculus
  misc_feature (1)...(56900): n = A, C, G or T/U
tgtatggacatcaacagcccagtccaatagcaaacaccaatcacggatcagtagccgtgactcaatccaacagaaaccacaaggcaagagtcagcaaggaagcagcaagagtcagctggaatagcctgagttctttggcacgtttctctcgacaaaagcgaagaccagcgaagacaggagacaagcatagcattgcaagccatagccatgcaagagcctcctttcactgtctgggggttctagttgcactctttccagacgtcatgcgccttctcaagcgtcggcttctgtaaaacatcctctcctgtgcctgtttcagcaaaccgtcctctctcgacagcttccgggaaaacatcgcatgacataactgagtttccaaagaaaccagaaacttcttcttcaaaaagtgtcttttgtcattgttcacaataagctcctttgaaaacacctgtctttataaaatgaggtgacttggggctagagccccagtaatcttccccacatgatagaatagcagttctcaacctgtgggctgtgacccctttggtgttgcctatcagatagcctgcatatcagttatttacattgtgattcataacaatagcaaaattacagttatgaagcagcaacaaggtaatttatggttgggggtcaccacgacacgaggaactgtactaatgtttgccataggcgactctatgttagtgtggagagctttcaccaacctaaagaggaaagtcgtgagagctgcatggctcatacccagtcaggagcacaggtcacatggtacctgtggttggtgcctgctggagctgagctcgtagcctgatagtcattcggaaaagaaattgccaaaattgaattttaggaaactcagtttctgcaggagaatttcttatatttcgggtttttttaaaacaccatcaaatcaaatcaaatcaaatcaaatcaaatcaaatcaaatcaaatcaaatcaaatcaaatcttcaggatcggtggcatactcccttaatcccagcacttgagaggcaaaagcaagcttaagtccagccaggtctacagagtgagttccaggacagccagggctacacggagagacactgtctagaaaacaacaaacaacaaacaaacaaacaaacaaacaaaaaactccaaccaaccaaaccaaaccaaccaaccaaacaccaccaaaaaaccttcaagtctagtcatataattaagtagggagtatagaagaattttatttaatgtatctttttctttttgagatatataactgtctttcacttcaagatttaagtaaattttatctagtcatggaaaagttaaagtttgtgtatatactgttttttttaggagttttaatattgtttgataaatgataacagcatggcagcatattttatctaccaacttttttaagagagagagagagagagagagagagagagagagagagagagagaagagagagagagagaggatgtgtatgggtacctgcagaggccagaaaaaggcactagagtcaccggaactggagttataggcagctgtgagttgccctaagtgggtactgagaactcaacctgtctctccagcccattttaaaattattctcacccacctttctctcccattttattcatttgtttactatgagacagtgttccatgtagctcagggttgcctgtaagacacagtgaagactggctttgatcatctaatcctcctgcccccacaccctcctataccttttgctcctggctcctcctccatgagaccctaaaatgtttttctgtttagaatatgactcagtgataggaaacttgcctagcatatttgaaaggctctgctacaatgtccagtgatgcagggtcgggtaggaggggagaaaggaaggttctggttatttctcattagactcgagagactgattgctgttactttttgtctgtctgtctgtctgtctgtctgtctgtctgtctgtctgagacaaggtcttaaccatgtagccctggctaacctggaactctctatgtagaccaggctagcctcggagcccacagagatctacctgcctctggagtgcttggatttgcctgtaacaaatctggtgtggtggcagtagtggtgcacaccttttatctcagcactcaggaggcaggggcaggcagagttgtgtgagttccaggccagcctggtctacatagtaaattccaggacagccaactctatagagagagactgtcatggtttgaatgagaatggcccacataggcatatagagttggatacttagtccccaactgataaaccagttgggtaggattaggtgacacagctttgttggaggaagtgtgtcactgggagtgggctttgatgttgcaaagcctggggtagggccattctctctctgtctctctctctgtctctgtctctgtctctgtgcctgctgcctgtgggttaggctgcaaagctctcagctactgctccagcaccatgcctgcctgcttcccactctgatgatgatggattaaccctctgacactgtaaacctcccaattaaatgctttcttttataagggtggccacggccacggtgcctcttcacaaccacagaacagtaattaagacagagattttgtttcaaaaagcaaaacaagtgaagtctgtaggaacatacccattcaaacactctgactgttaaaacttacatttttaataacacaataacatttttccagatgataatagcatttaaagttttattgtaaaagcaatataagatgaaataaaaacattgaaaaattcacaattcataacctcaccaccttaacaagtactttcgtttctgtgtatttctttatagaacgcttccacacacctaatacatccatagccacgcaagcaacactcaactctgctttctggcaccagaacgttcaaaagactctttaaagtcatctgacaacaggagctgtcgtttcgaatatttacatcagtcatataaacttaaggtcttaaaattctcaaattctaaacaactagggtgtcttctctctcgtagtcctgcagggaaaactccctgaacctcccacagaatgaggtggacatatataaatgacaggagtatctttccagaaatgtctaccgtcccagtcatcagccttttgccagttctcaggaaccagaagacactgcatttgaaggacggctttgagctgtgatgtccacggccaagcttcctgtggtaatggctgcgtacaactgtactgcagaggaaagcacgcagatacctacagtttggaaccctctgggctctttttgcatccgagtctgtggagagtaagtctatcgatggggtgtacactccaacattccaatgttggtgaagaaaattaagcatattgtttaaaatcacaagccgatagtggcccatttgaagtcctttccctgagaggttattaatgctgcatattatctgtactttttacttatttacaaacattgtggttagaacctgttgatacaacacggagatgtgaaagctttgattccatgacagatccaccattacacattaggaacaccccctgctccatggtagggagctagtatagcccccagacttttgggcaaatagcaagggcttgtctttgcagtttcccagaatcccttgtgatggcctaatggctgtgaaaacaagattgaattagtgcactttgcatggcttggtatgcagtgtccctggaggccagaggagggcgacagagagcctgtaactggagttacagtcaggcatgagcggccccatatgggcgctaagaattgaatcctggttctctgtaagagcagcacacactcctaacctgtgagccatctccccagcccctaaaaataaataaagactcagattcagacttaagagtctgcagtttagttccttgtctatttaaatactatacacaggcagcatatacacgtgaacctctgtcttccctttgcattgctgccagttgaatccagagctgtgacgtgcagatcaagcccactactgctaagctgtaccccaatcccacgcttgcttttttagtgtctacactctatgtgcactgaagcttatgagcactaagcgccattagttttgatttttaaaactaaatacttgttattgttttacatggattatttatttattttgtggggcaagggggctgcacctctctgtctctctctctctctgtctctgtctctctctctctgtctctctgtctctctgtctctctctctgtctctgtgtaggtcagagaacaacttttgggagcctgttctctccttccattttgtggatttcaggatggaacgcaggtggtcaagcttggcagtgagcacccttagcccgagccacctcactagcctgacttttaatcttttaaaactacttttcaaatacgtgattttcagttatgtgtacgtatgtgtatctgtgtacatgaatgtaggtgtccacagaggctagaggtgcccgatctgcctggagctggcattatgggcagctgtgagccacccagtgtgggtgctgagaactgaacttgtggcctctggaagaacagcatgtgcccttaacctctgagccatctccccagcccccgaacagcctatgtttagacaataaccgctagactacaggattacattccatgaggatatacctaaaccaaccagcaaagtacaaagtcccaaaccaaatcatccaacaaaataagcctgtcccacttcagtgccatctgctcgacacctcaagctcacaagggctccacaagggctcccaagaccccagtgctaccagtggaggatgcgaggcacagggatatcaaatgacttgaggtacttggagagaggcagggtagatggtgggccctcaagggagaggcacaccccaagggatgcagaagtaagctcttcctgcaatattttcctcatcagcttcttatacacaggagccccgaggcttacaaagcatccaccgtacaacatagcaaggaggaaagaacagcttacaaatggaccagagtgcacatcagggcaaaatgctacattaccagggacctcatgtaaattcgacatctcttcagccaaaattgcttaacagaatcatacattctttacacagcatcctgtaacccataggggaatcacaaagctctggctttaactctaccctaagtattttcccttgtggcaattaaacttttataatacataaaaacagaaatcatccagatggctgtgggggcccacatcagtagcgtattctgaagaggccaaggcacggaggctcatcactttgaggccagtctgggctacaaagcaaggcagggtagcatatgcctttaatcctagcattcaggaggcagaggaaggagcatctaggagttgtcccaggagttcaagggcagcttggtctacaaactgaattccaggacagctaggactacacagtgagattctgtcttagaaaaccaattatctgagcatattcttgctgcattatgactactgtagtcattagcagttcactgctgactcatagctcactcccttgataggtgccttgacaccccgaggttctgccttcttaatattggttaatacattttggggggtataatgattgaatctgaaccttcaagcacgctaagcaagtaccccgccattaggctataaccccagtcctcttttcatcttttattttgagatagagtctaagttgcccaggatggccttgaagtcacactccagaccaacctaattttgaacgtgtgatcttcctgtatcattgtgaagtatcaggcctgcacagaacccagcctaactgatgtattttggttttttttttcttgtcaattataccaagtatgagatcataccaaatgtctatagaagatgaattacctcaacatccaagtatgaatagaaccaggattctatcagcaagctagctcacaaacacaagaagacatattagttagaagatagccagttttacaaggcaagaggtgactttgcctatgtcctatagcagctttcttagacagcatcataacaccaaggacttcacctcatgtttaacattttcaatctcagtgagtttcctgggttcacaggtctactagaggaatgtttagtttaagtcaaccttttgcaacattgcaatgaattgcagtcatctaagaaccatcacaggtggacatctaatgacccagctcattaaatatccaaagaatggctaaggagtgcaaagagtggcggtaacaccccctctttctcactttcagaggttaaaaggaaatcccatttctagccaagcagatctttgcttttgtcccaccaaccatttgaaagttaaatgcatctgctttctcagtaccacttccccaagcccctccaggaaggcagagagcatttctcacatctcatcctttaccggtggaaagcaggggccatttctgccttttatgtggagggttctggcagtttgagctatgatcttaaaattcagtctctattcaggaatatagatgtaaaagtttccgttttggttatgtgcatgtgtgaatagtgtgcctccatggggacaaatacctgaggtgtccagaagagggggctagacctctcctagagctggagttacaggcagttgcgaactgctggctggcagtgggtggatgaatactgtgaacagaacttgcatgttctgcaagtgcaatacctacgtgtggtgtgtgtgtgtgtgtgtgtgtgtgtgtgtgtgtgtgtgtgtgtgtgttacagggtctctctgtgtagccctggctgtcccggatattatgcagaccaggctgccctccaactcagagatcctcctgcctttacctccaaggattaaaagtgtgcactactatgtcccgatacagtacatacttctacctcttaagccatctcgctggtccccagggttttagaaaaaagcagatgcagattcatatttagcagactacatatacaatgtaaaagttctctaagcttgactcacttggcatctatgagcttgtggcccagtttcctttatacaaaaacaaacatgcaacccaactttggtactaacgtgcttacattctttcagatagtgtgtgtgtgtgtgtgtgtgtgtgtgtgtacgcatgcgagtgtttaaagctctttaaattccaaattaaagctgttacattttgaactcagctgccaggctcacaacccctggttactagtgataccagcatcgcccttccctgtaacatggggtcagacagttgggcagctctctagaaaactagcgttcctattggctatcgagtaaattccagggatagataggattaagagcttcaaagaggattccccagccctccctcaaaggagggtcaaacactgtggtctaattctgggataaagtaagccggtgagaaggagaacgtgcctgtttacatagccgtgtggcccttcccaaagcagcaccatcctgtccctcccccatccggggatgagtatggagcggtcttctcttgaagcaagtgtgcagaggatacaccacaaccttcttggctgtgaccctaaatggggtcacgacacaaaaacctctcatagctgcagctcctggtgactaataggcaggctctgccaagtgcagtagtgtatcacagagaaagcactttgcacgagcctctatccgtacacactcccaaagcctaggccccaaaggattaaggtaacaaaacccacgcgcatcttactgcaactggtttcttgtctagggaacaaaatgtctccctcccccaccaccactatgcttgatacaaccccacaccttaacaaaattgtctcgtctaaaacagaatgagtgctaccaaccagcgtgagggcaccaaacttgggacatacgtcttaacccatcaaactcagagggacctggggtcactgtggaccgatttctattaataggaggtaaagctcctacagacattagaggtaatggcctggccgccctgtgctgttaactcctcttgggccagcatgttaaaaaacaaaacacgttttgcccaggcagaggtgggctttgaaaggatcatgttcatatgcacacattcaggctcactacctctctccttaacggttcaaacccgaagcccatgccctggaaagaaaaggggcagcggacgaccgttggatatcagtcagctcagctttgccacacataaggcgagggccacagccaccaacagcacggcgctgaaaacggtggcagccagggccttgctggggtcgcaggggcccgcgcgctcctctaccgaaatgccaccggctgaggacgcgccggcactggcaccggacaggagttcggcgtctgccgcttgtcgcgcctgtacagtccagcggggcacgttgactttcatttccatgtcgtcgatcatctcgcccacctggaggacttcgcgctccaactggggcagatcggcgacatcgaagtcgctctccgcttcgtgccgcaggctgcgggcgctcagggcgcgcgcagctacagcagaggagccgcccgtcaccccagtgcgaacaagtggccggcgcggcgcgtgcagcgggaaggtggctcccagcgctagtgcgcgctgcatgtcggcttcgagcaggtccaggcagcctgaaaaggccacccagagccgctcaaactccgcgcgctcctcggtagctaagctccggtcccggagcgcgacggtcaaccgggcgccggtggccacggccagctcccgcgccttctggcgggtcttctgcagctcttcgcgtaggtcctgagtgtccgcggagccgcccacagtaagcactaagtgatggtagcacgctgtggtcttgttgagcgcgtccagcagcgccttgcactcctctctggccatggcgctgccctccggcggtaccccacttgcaaccttcaacgtcgtaggtcgcctccagccctgatgccagccttgagcagggcggactgaaagctcctcatgtcctcgccgctgttctcaacagagctctccagggaccctcgaggtgcgcctccggcgtccccacggctggggtagtctggttagcttctccccatccgctcctccatttcccccagacgcgctccgggtcacgcgtagtgtctttgcaccactttctttttcacggcggctccctgagaagcccagagtgaagaccccatccttgatcgaccccaagtctccaagacgagccgcgcgccttagccccggccaagggcagcaggatccagtttcctaggacacgcctccagccaccagtccaggccccgggcttcctccgcccgcccccccgccccctccccgcccccgggccaggggtaggcggggcccagcccaggtagatcaagtgtggctttccctcttctccctaccatgataattctggaaccttagcgccctacaaattcaaggttttttttttttttcctactttgcagacgaggaaaagtgagactcggtagaaagaatgcttagcttatcgcagcccatgctagtgaagggaaaggaccaagggactagaccctgtaggcaacagagtagggtggctcggaagtctgggcacctccagtttgcatcaccagtagcacgggcgatcgaccgggtaggattgttacttagttggagctctcttcttcatcacagtctaaccccatttcaggggcccagcttggaccccacccctaatatcagatcttccttaggtcccgcctctcgaattctgggcacgcgcactccctggttctgggcggggctagcttgagtaggaagcgcggagtcgcctgggccccacctccgactgaactagacttaatgattgctctgtttacgtgtcagtctagactaaaacgacctcttattggacagactggagcagggttccgcccaacggcggagtaaagaggtaggctgaagagtggagccaccgcacccgggtggtgggcactcaggtcccagcccagggtccgggaggtgctgtcgtagcacagaggtgaaactatgtagcctcttaagtaagtgtcttctgcgggtatcctccagcgcctccctactctggggaacgccgaggtcgggcggggcctgggagaggaagggggaggggttccctgcactgaaggggagccccaggctgggctgatgggccccaggggcccggacccgtggcgggctgagcctcccagctctcccgttcctctgcggtccgcatcgcggcgcgcacgttgtccactaggtccagagggacgcctaggcggcgcggagaatgcatctgttcctgtggcaccacggcaggcctgggtcccccggagctgggacttggggcagtgggcagagctgtcgctcccaggccatgtggcctgggaggttttccggtgaccaaactgagggaggaggctgtgtgttcagatcctggtctaggccagctgattgagtttccgccggggctgaaagtggaaagggtatccctgcctgctttacacgtggcgaggtcctctcgtcctgtatgtagagaagacttatggaaaactcaggtacccagagacgtacaatcacacagagtgtgttcggtttcttggttgaaaacggactgcccagatgcgcgcgcgccaggcggtgcccctccagcctctcctccagctccaggggacctggacactcaaggcggggtgggtggcaggggaagcaagtgacacatcaccatctaggagtgagaggcttgggataagagggctagtgagactggacagacagagttctcagtggctgggatttctgtttcattctgtggagagatgctcctgtttacatcaaacactgtaaacttcccattgatccggagcgaaagcagcacatagtagggttttcagagtcccccagtgcaggccgtggtggtgtgtcaaccgacaggatctagggccctgaaccccagtacttactgtcactcaggggtctttcctttagccagctcagctgtcggtttgcattcagaatttggatattgtgagacttagccattcttggggcagggcggggtgatgattacagccacgcaggagccacccacccccatgggttttgataggggactaggtttggggaccgaatgggtggaaggagggagaacccatccctttgggaagctgtagggcatggggaatgatggggcttagaaaatggacaatggccaaacaccaagtatggatcattcagcttgttaagggggggtgggggtgnnnnnnnnnnnnnnnnnnnnnnnnnnnnnnnnnnnnnnnnnnnnnnnnnnnnnnnnnnnnnnnnnnnnnnnnnnnnnnnnnnnnnnnnnnnnnnnnnnnnnnnnnnnnnnnnnnnnnnnnnnnnnnnnnnnnnacagaggaatactgtataggagtattggagaggtcacttgggtgtggttcaccaggacaggtatgtgtgcaattgggaggcagaggaagagaatgggcagaggagatgttgttgggaaagcagccagggtcttgcagttggctgaaggtgtattcctgggttagacctcgggagagctcctccagccctgatgcctcacctgagtcatacagcaaacagcagttctaggcgagcagcagtggtgtctgcacagggcctggggtcaaggtcatgactgggcctccatgtgtttactggactgtgctagcctcataccaagctgctgcaggcttttttgttattgatttgtccgggtgccgctcaatgattttgtgctgttaggacactccctggttattagccggtgacattaggttggtgtccagtatcatctgcctctccaaggggtgccaaggaatgtgaccatctgattatagatgacagacttagagaggagtcagttcaggggaatctggattaaggtgtcacgaggttggccatcttagggagctaataattactggccctctgagtgcctgagatcctggcagggagatgggtgcatggctgttccatctgcaactaccgggagcagggtgatggggtcaatctgagcagagaccataccccttaactggctccctgtttctccctaacaccagttaccagtgtcaccgtgtttgaccagctttgagcactttgtttatttttacctgtgtggctgctgtctgggattaacccttcacctacctggtagagacagctgtcctcttgcttcctcttggcctcgaagtgagctgaatgcgggtgttaaagctgagtgctctaacgtggggtttatggacaatatagccccatctgtaaatatcacaaggccagaaggactagggaccagaaagcacagattacatccctgtgcttccgttgatattaaaaaaaagatggctagaaactgttctcgttttgttcccaaccctacccttccctttgcatcacttagagggccttgctcattgcttggatagcatgcctggttagggtctttggttccgaaccaggtctagggttcctggcatgtacttggcagggagtacatttctgggaggcatagactccccatgctggattttgcagagcagggctgtgcgcagtccccagatggtccctgactacccagactcatctggcttgtcaggacagctgaagaccacaaaaccacacctcagtgtgcatgctatctcctgaaatgttcagactttctccgtatggctgtcttgttcacagggtaactcacgttcaggggtatttggcagttctgactagtgctgtcaattttcactggaggtctgttagggatggtcaggagccccctggtcttggattcttaagacttcttatgaactgaactcacgacctcccgaatccttagccttgctttggtccacatctcagtgtctcccccatcccctgctaggccttttcctttctggccatatctccttgctgaggagtgatggtttgagtgctttgccagtgtcacgtgcccttccccaggtttatctcgccatcacatacatcctgtttctcaagtggtttttatccgaagcatcttcagctgtcatactctgccccatggaaccacctatgggaaaccagaagaatgctattcccttctgactctgtccccccccaaattgcattctctgcttctcttggggaatcatgagaatctggaagtaattgaattcaatgaatcaaacacctgaaccattgccagggtctctctgggggcccaaggaaggattatttacacccattttattttcttttaggttcttttttaaaagttcccttagatcctcctgtgggaggagttaaggtcccagtgagaagagtccccagtggggccagtagtcaagccagctcttattgggccaagagatttggtgataggcctgtgtggctctctgtcaggtagacttttccatctgggtagatggagtttacagccttgtgtgtatgtgtagaagtcagaggacaggagctggagaggtggctcagtcgttaagagcactggctgctcttgcagaggagccaggttcagttgtcagcgcttacatggtggctcacaaccatcttgaactccgggggggggggggggggggttgacgccctcttgtggcttccacatgtaccaggcacgcgtgtggttcgtagttgtacatgtcgacagcaaaacacccgtgcacttaaaataaataacgaaaataataatttaaaagagaagttagaagacagcttgcaggagtcagttctcgcccggggatggaagtgaggacgtcaggattggcagcagtgccctcatccactgagacatctgtctcataggccacattaattttaattttaaagtaatgattatttattgaaagtgtattttggataggtcacaatatataaactgttaaaaaccagttttagctgttttatttattttttaaatgtggctactagacattcatatcatgtacttatcaggcatggtgggcacacctggagtcccagctacttagagagtggggttacgaagatcacatgaacccaggggtttgaggtgcaataaaaacaagtacagttggctggcaaggtggtacattcagtaaccttaaatccatccccacggcctgccctgcccacgttttggaaggagagaaccaagtcccgggagtcaccctctgacggtcacatgcatactgttgcacgtgttgctcacactccacacccgtgtgcaaaagcaaaaaaaaaaaaaaaaaaaaaaaaagtagaaaatgtaataacttaaaacaaaccaaatacactaaaaatatctatttgaaaatgtaataattcaaaatgaaacaaaggcagtaagaatttccatgtggctgtatgatctgtatctataattctatttttttcccctacctctttttaagcagcccaggtctagaccactaaaaccgagtagggtgaggaaataggatgaacgcacataagaacttgggagtatgtcggagacagttttctcaactggtgtgtgaaagaaagagactgtgccaaaagcgatgttgggacaatcagcgtaccatatggaaaagtgaaattagctgccgatttatagcgtatgcaaaaataaaatccagatgggttggagatgggaatgtgagacagtttatggtttttagaagttccaggggctatgcttgtggaattggaggggtcctggttgcaggaggcctttgctgtgtaaccaagtcagaatgcgagagctcccagctgccctcatttcgttactctctagatgttttccttggcataactgcgaggctccattttgttcctgcatggctcagttcattagctcacatgggctcctctctctccccgccatggctttttccttacttgggctgtttcccagcatgctgtcttggggtatattgagaacgagggcgggatatacaaggcccctcgaggctgatgaacagaaactgtagccagtgaagtcaggctacagggctggctcaggatgaaaataagtggagaaagctgggcatggggtgcactctactacagtcccagagctggggacactgtagtaggtcagtcccagagcagtggggacctcggtaggaggatcctgattttgaggtcaggttgggctgcatacatagtgaggccttgcttcaagcaaaataacaaataacaaagtggttgggcatttaggtcattggttgattgccttgggctacatccttagagctctgggggggggggcgagaggaggggcggggctgcccacgcgcacatgcatggatttgtgggtcaccacaaccaaaaagcacaaaaaggcaaaaagacacagccagctatgccagttaaggtggcagaagtgtttaatcccaactcttgggaggcagaggcaggtgaatctctttgagttcaaggccagcatggtctacagagtgagctccaggtttactgcacgtggtgagggccttgtctctgttcacagcttttccctcccttgttgcaggaagctcacttggatcccccgaagtccctatggctctatatgatgaagatctcctgaaaaaccctttctacctggcccttcagaagtggcgccccgacttgtgcagcaaggtggcccagatccatggcattgtaagtctaccggccttcacgcgtgagcagtgtcgggagtgtggcaggtgaaggggatatttagaggaagtcagttgcagagctgtggagttaaacgaacccctgtgctgtccctcccccccgggagggggtggttacccaatgttggatatgtggttgaacagtgaggggccacctcaatctccttcctggatgaagcgtcctgagactgacctgggctgccttagggtgtctattgctgggattaaacaccataaccaaaaagcaagttggcaaggaaagggtttctttggctcctacttccatgccactgttcctcaccgaaggaagtctgtgcaggagctcagacagagcaggatcctagaggcaggagctgatgcagaggccatggagggtggcttactggcttgtctcacatagcttgctcagcctgcccagggatggcattgctcaaaatggactgggccctcccccatcaatcactaattaggaaaataccttacagccagatcctatggaggcattttctcaattgaggtttcctcctctcagatgatgccggcttgcaccgagttgacctaaaccagccagcacatcctgggttgtcatcctgtctccaaactcttgcccctcacctatggtagatcctacctttgtcctggtactcagcgttcttatctccttgttgtctgtgagtgctcctaggactcgggtaacggtcctccctggtgctcagcagtcctcctctgttcagctgggtgccctcctatggaatcagggagcatgtgaatgctcaccgagtggcatggttaggtttaaatgctcctcggttaagagcacttatggcttctgcagaggacccaggttcagttctcagcaccagcttaataattaattcagaatatgtcatctcagcacacctaccataacctgaggggaaagtgctaattgaggaattatctggataaggctgacctgtggctgtgtgtgtgtgtgtgggggggggggaggattgtctctttgttaattggttcaggaagacacagcccactgtgcgctacattgtttcatgagccttggacttcagaagagtgaagaaaacacgtaagaggcagcaagcaggaggcatggtgcatctgtctctcgctgtttgaccttggacgtaatgggactgactgtctgctagatttcctggctccacatctacactcccctcttccccccagtgatggacagtacctggacattctaagtcaagtaaaccgtttcccagcaacagaaatgaaactgagcaatagccacggctcagaagcctcccgggcggggccccgggagcaggaatagaagaagcatttgggagcaactgtggtgtcgggaacctgtgccgcctagagtgggcacccccatgtcttggtgttgcagatcttcccaggacatgggttgggagctttagtcagttttcttgataacgtgacagaatgcttagcagaaaccacctattggagaagagttgggtgctggccagtggtggcagagctttctgtccgtatcgagactgctgaccctggacctgtggtgagtggagcattgtgtggtggtgggagtctgtgaggcaggatgttcttcatctcaggatcaggaaggaaagagtaagagagggaatagggaccagcttagtccacagaggcatgcctcccaatgagctgcttcgaccaggtaagggcccctccacagcctaagctgtcaggtccttctcaaaagggccaccagctagggaccaagcctctaacacctgagcctgcctgtgggggaacattcagtattgcacattagtggttgtcctggtttgtgtctctgtctatcatgaagggaaggcggggcaggaactcaagacaggaactgaagcagagaccacaaaggagtgcagccttctggcttcttctccatggcttgcttagctgctgtcctatgcagcccaggatcacctgctcaaggatggcactgcccacagtgggctggccctctcacatcagttgtagatcaggaaaatgcccacagtccaatatgacggaagcctctttccagctgaggttccttctttccagataactctagcttgagtcaagttgacaaaatgacaaccagagcagctgcagctgctgctgttttcttcttcttctccttctcctcctcctcctcctcctcctccttctccttctccttctccttctcctcctcctcctcctcctcctttcttttctttttcttctctttttcttctttctttttattttctcttcctcctcctcttcttcttccttttccttgcttcctctttcttcttttcctttttcttctttcttctctttttcttctttctttttctttctccttcctcctcctcctcttcatctccctccttttcctcccttcctctttcttcttttccttttttatttttttaaatcagtgccaaggaggaaaatcaggattttgtacatgccaggcaagtacactaccactgagccattgattgatacccctcactgggagagtttaagcaagtgctccaccactgagccacactggggattctagtcagggctctaccactgagccacgcccacagcccctcactgggggattctaggcaggtgctccaccactgagccacgcccacagcccctcactgggagattccagggaggggctctatcattgaactatcccagtatcttatgtgtgagtttgtgtgtatgaaggcaaatctatatgtgcatgtggcggtcacgggacagcctcaggtgacattcctcatactacatagctcttttgtttttgatattgagtctctcattggatcggtacacacctacgcagctaggctgactaacctaccatctgagggttctcttgcttcctctgctcagagttcatacatatatgctccaccagacctgttttgtctggctttttcacatgagttccgggggttaagttgaagtcctgcacctcactgaccgagctagcctcagtttctttttccacacttccttttatgttgtccttgactctgcttgggaagtccctgttggcttctgtgtcctgctcccttctcacctcactgagcttctgcttctcttctcctgtggtgacttgctcaggtcaggcctccgaggatttgcaccaaaggagaagtttagctagctcaggccaacctccgtttgctggtagcttttctggaaaaccagaagtgattgctgtcttgtttctgcccacaggagcctcctcctctagaggcttgctctgggttttaggattagtattttgcttcatgtgttttaaccagagacttttggtctcttaatttggattttggaagccatagaattcattatacaaaaaataaaaattccaggtggaacatgacaaaacaggccagtaactccaacacgtgagttttgagtagcatatgttacctagtgggactcatcttgtaaaactccaataaataagtaaagaaacagacaaggggatgaagagaaggctcggtggtgagagcacgtgaggacccacattcaatactgagatcccagctgtgtgtgcaccatggcgctcagccccatcttttgaagtaggactctgctccagtcccttccgagagccacagatccacctggcccactctgggtggcgatccgcttcaggccttccttggcccggttggatgaggccagcttccctgcaggagtcaactgtgcgatgaaccactctgccagcggactcaggggtagggctgaagctgggtgactcgctctgaccccctgttgttcaaagcatgggcaaatgggtcacagctgttcactgtgcagtgtgatctacatggttgttagcacagtgaatgaaaaaaaaatagaacgttgcaattgcttctagaaagttcctcatccttcctgtcacttctgagagagcagtgtgggatcagcagcttcgtgcttagtttctgccccgggagtttgccattgggaccacagtattaaccttacttgttgccacgaccaacctaaggagggagggttggtttggaatcagttgtggaagattatgttccatcctactggagtagtcgcaatggctggagtgtttgcagaggcgtctctacattatggaggaacaggaagcagactgctaaaccggaaccagttacaaacagccatgcctttccaaggccccgccttagtgacctgcttccactctccagcctccgccccctaaagatgccatagacttctagacagcaatgcaagctggggaccaagcatttaagatgtgagctgtgggagacatctcagattcaaaccataaccatgggactttaaaaaaaaaaagataaattcaccgttttaagaactgtcttggggttggagaaatggctcagtggttaagagaagagcagagaagagctctggctgatctcagaggacccatgtttgattcccagtcattacctggtggctcacaaccgtctgtaactccagttccagtggatctgatgtctctgttcaggcctctgtgggcagtgtgtggaaatgcagcgcacaggcatacgcagcgcacaggcatacacataggcaaaacactcaaacatttaaaataaaaatgacggagtaataaatgtatttctgtagtatcagccatctctgggactttcccctacacaactggcatgataccctgctcggtcagtctgctgtagcacgggtgtggcagctgagggggaaggctgacccggtctcctacctggcccagccaccgctggagctggcttccttccagggcttccttgcctgggaggactcttcttcctgccccctggttgcaccatggaaaagcctcctcctgcacccctcatctttcagtcacagggacctggtgacacccactttgttctaatagtcacctctgtgcttattatctaggctaataatgcacctggggctttctgagagtggcttgggagggtctctctccagggactcttgtccacaggcagctgtgtcctgactttgtaagagagatatataattaagatctaccaccaaggtgagacatcacgccccccatgactcatttgcattcatctggttgggtaaaataaatttatgcgggttacctatagggctttgggtcactaccgatagctacattttcttaagttgacaacccactgattttttttttttgagattcccattttacaatgactctaagcgtagcagaatttatacagacttagatccagccactaccctgtgtcaaagcgaaacaggtgactataagctcagacaatgccaggcttgggaagagtttcttgatcattatcagaggttctgctgggctcagcaaacactgtgcagctgtgggcaggacgattgtctcaccgcagtctgttgcagagagcggctaaatggtggcttgctgcacattggagtcactcactgggaggtgaaggactggtttgtagggagtatctcatataagcatcacctgtcaataaagcctatggccaatgagctgaggcaggaaataggaggtgggacactggcaggaagagagaggattctgggaaatagcgagagaataaaagggagttttgcctggaaactaggggagactgacggaaaccagcaagtagcagaactgagaatagaatgaagagagagattggaatgatatgctgaggcgatgcaaagaagatgcaaagaaagaagtggccaggactgaagaaagtaactaaccaagtggtagacataaaatagtttaaatggagtaagtaagttatgagccggttagggaatgagccgaagcctatggcctaggcatttattgataaataatcagtctcagggtcgtcattctgggagcaggagctgaaaggaagaacaaatcatctctttttacactggctcatgacaactgccttgagaaagttgtccaagtttccagtgtgacttagaggatgggtccatttgctcgtcagaaaaattagaagaaggcaggtaggtacccgagggagaggagctggagttccaggctggcctgggctacacagtaagaccttctctcaaaacaccggcaacaaaaagcaagcaaacaagctaaataaataagggttagggctgtctatagcttattagtgggggggctttctgtagtgggggatcctctcccttgaaatggaagggtttagcctcacatccaagtctgtcaggaaactggggaagggcaagtgtgtgaaattgcagggtctcctgttcagtcagtgagcgcatgccacctactctgcctggcatgcttggtgatccagcatggcgggtgctgggcacgggaaggtgtgccggcaagccaacaggatgtacatcttacttgggtggcatttcccaggacacacacaagttcctggtcctgtggaagttagatgaaggccaggagcatgcctgtttcatggatggatggacggtgtgttctcctcctcagtgcagcagcagtggccaccacaaagtctctgagtctgacattacatgcccccagaactgctgctaggcatccgctggctggaacccactctccaggcttcgaggtcttctgtgtgtgcacttagcgtgagctgccccatagagccggccgggagttgtttcccattttgaaactgatatacccagaggcctccctttagttttaaatgaagctttcagatctgaggggcctggagagatggctcagcagttaagagctcttgcagctcagctcagtcatgaagtccagaatttggattccggcacccatatcagctggctgacaaatgcctgtaactgcagctttcaaggaattggacaatctctttcagcctctgtgggcacccaaacacacgtgctaaacaaataaagttgaatccatatatatatatatacatatatatgtatatgtgtatatatgtatatatatacacacacatatgaatatgaacaaatgcatacaattttatcccaggtaggcctcaaatgactgaggctgactttgcaccagtcagccccctgctgggcccctttgagtgctgggttacaggcatatgccactgtctgccttttctttagtgctggaatctcacaagggagttcagcaagagctacagaatagagtttaaatgcataaaaggaagtcttattttccctgaatataaacagtgaagacataaatatcagaaattgaacatttgggccagagcagaggcccattggttaagagcacttgctgctcttgcagaggagagggcctccggtcagttcccaccacacacatgcagtcctaatggtctgtaactccagttccagggatacagcatcgcttttctgcccgctgtgggtactgaatgcaactagtgcatagatacccattcaggcaaaatttgtacaatgaattaaaaaaaatgttttaaaaataatgtttttaagaagaaaaaaaaagtaggaggtaactagagaagtttgaagtgggcatttatgcataataatgcactatggttctgcttttaattttcatttatttttttagatttatgtgtatatgtgtgtatatcagtgtttgggtttgtgcatgtgtgtgcagtgcctccagacgccaggagagggcgttggatccccatgactgacatgggtgctgggaaccgctgggcgatctctccaaccgcgtgttctgtttcttaaaaagaaggctcattgttcagaaatgcattcctaaaaatatatatgaatgagtcacttctctaccttatgtaattttctgggctttgcttcaaaataacctagagattgcgtatagaaagctatggcccaggaccggacactgaattcctaatttttgaagctggatgaaggacatgcggggctcaccatattgttctccagtctacaaattaaacaagttgagctgggtgtggtggtgcgtgccttatatattggcactgggaggcacaggcaaactctgtgagtttgaggccagcctggtttacatagtaaatttcaggacagccagggataaaagagaccctgtcgcaaaagaatatttttttaaaaagaaagagatgaaacaagttagggctcatgaggtggggggagggggggcagggaagaaaagagagagagagagagagagagagagagagagannnnnnnnnnnnnnnnnnnnaaaaagagagagagagagagagcgagcgcgcgcaagtaaaagcatttgctgccaatcataataggccacgcctctaaccttatccagaaccattttccaagtaagctggcgtgcctcatcccagcgtgggctgcagaagtcacacagcactctgcccaccaatcactaagcttccttctcctctaggtcctagtgccttgcagaggaagcctgccgggcagtgtgcaggcctcctgccagttcgagtcctatgttttggtacccacggaaggacactttcagaccttagatggaaaggtactcacttctaaggtggctccggattgatgggggtggggtggggcagacagagacaagattgaccctgtttttccagcctttcacattgttgacatcaaatattgatttttgtttgtacatagcagcttttggaaagagttatgggtcccccgtctttattagggagcctttgagacagggggccatggtaatagtgagtaggacccagactctgtcatgggaggtgtgggggggctggagttcttccctccttccctcagccaagggagtcatctacctgtatgttgggggcccctggtataccccttctcaggtctgtatcccactaagctatttcttttgttgtggttgttttttcgagacagggtctcaccgtgtagccctggctggcttggaactcactttgtaggacaggctggccttgaactcagggactttggcttgcctctgcctcccaagtgctgagattaaaggcatgcaccaccacacctagcccatatatactgatttttgacacagagttttgttgtctcaggcattatgtcccaggctggcttggaagtcatgatcctcctgcctcagcctcccaagtgttgagattacaggcctgagctgccgtgtccagctgtgtgcgtgcattttgttggttttctaacggaagcagttagaacctaagaggtagacgtttcatttgtactcagctggccccatccccccaactgatgcacagtcaggggtccaggccaccctaaattactcttctcactggggttgctctgcaatctgacccagggctggaacacgtggggttcgtagataccgaggcagatcggagagggtgagggttgttatcagcctgcttggttggttgacatccctctgtggctcatgaggcctggcacgtaactatcatagatttttatcaccacatctgttccttgtctcctagtcacgtgtccagctaacccacactggggtggagtgacaggctctgcctaaatacctcccaagaggtggctacaagggtcccggtggccaccctaggctggtccagtgaggttttcttcattccaggctgtcgtcattgaaggaaacaggattaagctaggagcaggttttgcttgccttatctctgtgcccatcctctttgaagagactttctacaccgagaaagaggagagtttcagcattctctgcattgctcatcctttggagaggagagagacttcaggtaccgagggagggctgatcttttctctcgtgcacgtgcacgnnnnnnnnnnnnnnnnnnnnnnnnnnnnnnnnnnnnnnnnnnnnnnnnnnnnnnnnnnnnnnnnnnnnnnnnnnnnnnnnnnnnnnnnnnnnnnnnnnnnnnnnnnnnnnnnnnnnnnnnnnnnnnnnnnnnnnnnnnnnnnnnnnnnnnnnnnnnnnnnnnnnnnnnnnnnnnnnnnnnnnnnnnnnnnnnnnnnnnnnnnnnnnnnnnnnnnnnnnnnnnnnnnnnnnnnnnnnnnnnnnnnnnnnnnnnnnnnnnnnnnnnnnnnnnnnnnnnnnnnnnnnnnnnnnnnnnnnnnnnnnnnnnnnnnnnnnnnnnnnnnnnnnnnnnnnnnnnnnnnnnnnnnnnnnnnnnnnnnnnnnnnnnnnnnnnnnnnnnnnnnnnnnnnnnnnnnnnnnnnnnnnnnnnnnnnnnnnnnnnnnnnnnnnnnnnnnnnnnnnnnnnnnnnnnnnnnnnnnnnnnnnnnnnnnnnnnnnnnnnnnnnnnnnnnnnnnnnnnnnnnnnnnnnnnnnnnnnnnnnnnnnnnnnnnnnnnnnnnnnnnnnnnnnnnnnnnnnnnnnnnnnnnnnnnnnnnnnnnnnnnnnnnnnnnnnnnnnnnnnnnnnnnnnnnnnnnnnnnnnnnnnnnnnnnnnnnnnnnnnnnnnnnnnnnnnnnnnnnnnnnnnnnnnnnnnnnnnnnnnnnnnnnnnnnnnnnnnnnnnnnnnnnnnnnnnnnnnnnnnnnnnnnnnnnnnnnnnnnnnnnnnnnnnnnnnnnnnnnnnnnnnnnnnnnnnnnnnnnnnnnnnnnnnnnnnnnnnnnnnnnnnnnnnnnnnnnnnnnnnnnnnnnnnnnnnnnnnnnnnnnnnnnnnnnnnnnnnnnnnnnnnnnnnnnnnnnnnnnnnnnnnnnnnnnnnnnngcatataaagtttgcggggaaaattttttttaaatgtttctactatacaaagtagcataaggcccttcaggaagtgaaaaatctttgcaacgtctaaaaatgaatatcagaaagaaactaaaactcctacttactgtggccatctgtgttaacctcaaagagaacttttcccccatatacactttaaaaaaaaaaaagttgagagccagaagtgttcagtgggtagaaatgctcaccacgcaagatggacagcttggtggatagctttcacgtgggtgggatataaaatttggacacagtggcacatgtccataacctcagtatacttaggagaggagatgggagctggagactggagaatcctccagaaacgcatgagccagccagcctgaagtactcatcactgtggcaaacagcaaagagaggtcctgcctctaagctaggcgaaaggtgagaattggtaccagaggttgacctctgcacacacaactacgtaaacacataaagttagtatgttaaaaagtggagggttgaccagatggctcagcggctaaaggcacttgccactgggcctgacaggtatgggttggcttttcagacacactgtaaataaatgtaattttatagagctgaatatcccttttagaagatgtgcatatgcccgagagcccgtcactctgggtagtaagaggggtctcctctctctgttcttggttgcataggactccgtaaatgctctctacaccaaatgcctccagcagcttctccgagactctcacctggtaagcacgggtctaaacagaacaacagcggtttgcactgtgtgcagacccagactctcaaccagcgtttctcttgaattctagaaggttcttgcaaagcaggaggcccagatgaacctgatgaagcaggccgtagaggtaaggagagagtgaagggcagtgactgggagactctgtgtcaaccccaatacataccacaagcctgtcttttgaacccacagatgtatgtccatcacgatatttacgacctgatctttaaatacgtggggaccatggaggcgagcgaggtaggttctttgttaccagtctttattctccgggatgagagccttaacctaagaaattccaagtgttggggctggagagatagttcaatactgcttttgcagaagacctaagtgtgttcctagcacccatgaagggtggctcacacattccataactgcaggtctgggagatctagcatcttctggctcctgtggctacctgcaatcgcatgtaccagaatagctggagctatgtagagagaccctgtctctaaacagccagccaaataaacaaaagtcttaagtgaaagaaatttgaaatctgttgctaggatgccgcctttaacaaaatcacgagaagccttcaagatctccagcagaaagacatcggcgtgaaacccgagttcaggtgagtcggtcccacagctccgggaagtccagcacgctcacggctgggctccatctcccccacccctccacttggcagccgtggtgaccactgattagatgaggttacaaccgaagagttgtacacttggtcccagtgatgcccgacagccgaagttgagctgcggctgccttggttccctcctgtgtttgtgggccagtgtgccagctgggtgggagctaaggggaagagggtttggtaaaaccggtctccgagtgggcatgcgactctcagctgggccctacacagaagccatcgaccctcatctgccactcggagagaacccagacctcgaggctctcactctcgggcaagcttcattagggtaaatatgtctgaagtattgatgtggaagccgctcctcacgcttgggttatttccatcttgggcttttattaaatttttaaaagttaatattttttgttgccatataaaattttttcctttttaatttaatttaattttattttagttttagtttagtttagtttagtttagtgtatgagtgtcttgcctgcatgtatgtgcacacacgcgtgcggtgcctttggaagtcaggagagggcatcagtattctggggattacaattagaaccagtaatgaaccaccatgcggttgctgggaatcaaacaggggtcttcttcaagagcagccagtgttcttaaccactgagccacctctccagccctatattatttgaaatttttattttattttattttatttgttttgttttgtttttcgagacagagtttctctgtatcgccctggctgtcctggaactcactctgtagaccaggctggactcgaactcagaaatccgcctgcctctgtctcccgagtgctgggattaaaggcgtgcaccaccaccacccagatgagactaacatttttattttattattggagttatgtgtatatgcatctctctgtgtgggtgtgtgtatgtgagctcaggtgtcctcagaggccagaggagctggaggcacaggcggttgtaagctgcccagtgtgggctctgggagtcaaactccaggcatctgtaagaacatcacaagttcttagccactgagccatctctctagccccccttttttttttttttttttgagataatagctacctatatactccaggtgcctttgtagctcaggttggctttgaaattgtaatcctcctgcctcagcttcccaagtgctgggatcacagacctctaggtcaggcttctggatttttatatttttgaattcctagtaaaagctctcttgtctgcaagcctggatgaaacaccactgacctgcatcaaagtacttcctgtctggcttttttttttttttttttttttttttgatcattccttgaagctgtaagaaatgtctaagcagctgtatgatcaggacagacatgttgggccctccaccatggcctgatatttctcctttgtaaatcacagcttcaacatccctcgggcaaagagagagctgggtcagttgaacaagtgtacgtcgccacagcagaagctgctgtgcctgaggaaggtggtccagctcatgacacaatctcccagccagagaggttggtgctgggctgggcagggaccgggcttggtgaggcagcaggtgggaggaaaacttccaagagaccagcattgcgtggggagtgtcctgggcggtgggtaaggcaggagcaggttagcaaagcctgagagagacaagcagcggcttcagctgggccgggctgggggtgggcgtccggctagctcgcctcattttgtatatatatttaaaaaaaaaatccagggtaaaagtaaagtaggggttgggattgtcacttagtggctgagctcttgctgggtcttcatgagcccctccacccaggttccatccctagagccactaaaaagttaagacaaaggacgtggagagaatcttgattgggataatcaagcaagcatacagcgtgcttccagcagcagcaaggaagagggtggaggtggggctgaccctcctttgggtgacggattcataaactgtcctggaaagtagattctctctctctcgggagggacactgagtgacagaggtggctgggacattcgtggtctctctttctgtactgtttgccatttccttagttagattctgctgctgatgttttgagacagggtcacattatgtaaccgaggctggcctcagctcgcccattgctgggattacaggtgtgtcctatctcgtccagctttttctttttttctttttaattttttcttgttaatttaattaatttattaattagttgtttttttattgtatgagtactccgctgcatctgcatgccagaagagggcatcaagatccccttataggtggttgtgagccaccatgtggttgctgggaactgaactcaaaaacctttggaacctaagtgctctgagttgctgagccatctcaccagttccctcttgtaattttttttaagccagggtctcattatgtagtcctggctggcctggaacacaccccgtagcctagactggtctcaaacttaggatcctcctgcctctgactcccaaaagctgggatgacaggcctgtgctgcttcactctgctgccggtacagcctttcatccctttcgttctgacatctgttcaggacactttctgcctggagtgtggtttcccgggggcgtggctgtggtcttggttggtggatcagggctccgtcctcccgcttggggctcatggaggctgtgggcctgtttctctttgcagtgaacttggagaccatgtgtgccgatgatctcctctcggtcctgttatatctgctcgtgaagacagagatccctaactggtaacattttcctgttaaatattccttagctccttgggctcttttgagcaggattctctcctgcagcccggactgggccccaactcttgttcttcttgccttggcccctgagttctgggatttcaggagagctccattctggctggcatatatttgccgttaactgttctatgcattttgaattggggggtgaatctggggcaagctgcctttaggggtgtacctctgaagggggcagtgttctctcctccatccttcaggggcagctttccttcagtggatagatggggaaactgaggcctggagagctgctatttcactttgtgaagaatgtggcgattttgttgctgtcaactgtgtaggaagcagccaccatctcataggaaaccataattcactttataacattagctaggtgtggtagcttgccccgttaatcccagcacgcaggaggcagagacacatggatctgagacctccaaccattagctgtctcagttactcttctagtgctgtgaagaggcgctatcaccaagacaacttagaaagtattgaactgggacttgcttatcttttcagagggttagtccataatcatcatggccgaagcgtactgacaggcaggcaaggtgctgggtcagtagctgagagcatgcatgatctgtaagctgcagacaagggagagagggagagggagaaggagagggaggggagtgannnnnnnnnnnnnnnnnnnnnnnnnnnnnnnnnnnnnnnnnnnnnnnnnnnnnnnnnnnnnnnnnnnnnnnnnnnnnnnnnnnnnnnnnnnnnnnnnnnnnnnnnnnnnnnnnnnnnnnnnnnnnnnnnnnnnnnnnnnnnnnnnnnnnnnnnnnnnnnnnnnnnnnnnnnnnnnnnnnnnnnnnnnnnnnnnnnnnnnnnnnnnnnnnnnnnnnnnnnnnnnnnnnnnnnnnnnnnnnnnnnnnnnnnnnnnnnnnnnnnnncatgtgagccagtgcaggtcatctccagctttctaatagccagcctttcccaggaagtaactcatagttttcttgtcctaattgtatacaatatgggcagtgggctgaagctgggcagcagccattatacccaccctctacctctaatgaatacacttgatggagccatacaagtcagtagtgtttgtaaagtgttcattatccagcagtaacccctttttcttcttttggttaggatggcaaatttgagctacatcaaaaacttcagatttagcagctcggccaaagatgagctaggatactgcctgacctcagtcgaggctgcgattgaatacatccggcaaggaagtctctccacgaagacgcctgtaaggtctccctgctaaagctaacccacccctcctccctctgtggctgagagtttggttgaggggatggctgttctttcatcgtctcccaagcctggagcctcagctggttaatcgttttgaagtttgagagctactcaagaaactgaacgttaagcccttaattgattgtgagagctggtgtgataccagtgggatttacactgtcagccggctccattaatcctgccatcttcaggagcccgagtgtggggaagggagccagatacatcagatcaggactctgtggccttattattgcttccttggttggtgagctttggtgagagagagcagatctgtttctatgtaaattatgggagtcttaagctcaggtttcaccacgggcctgttttatgtactacatgtcaacagacaaatggtgaaactcagtagtactcagaaagatctccaggctgaagtcagtcatggtggtgcatggctgtaatcctagcacctaggaagctgaggcaggaggattgctgtgagtttgaggctgacctggtcacatggtgagttccatgccagcctggactttactgtgggcactgtgccagaagacaaagggaaaagacaaataaagtaaatataattaaaataaacaaaagaggagagtgaatttgagttcagcctgggctacatgtagtaagactctgtataaaaagacacacagtcagccctgggtgttgagcaggtcaggccttgcttgatctgttgacaagccagtgctgtggtgccattgtcccatgtggctccacatgggagtctgtgcataagaatggactctgcttttactgcagactgccttctttcagttcacagagtttgagtaggaatgcctgaagccatttccctggtgagagagcccgtgtgtatctccacgcggcaagcgaggcttctgcatataagtcattggagttggtttcactaccagctctatgtaacgtggtttcacagacatttcctctcttgagtgttgtgaaacttgagctagccacaggcatccttaggatgttcataaatggagacttcagctgtcggcaaacagttcctacatcgatggccgcaggatcaaggcagagacccttggaataaagacacttgcctacttagtttctaagattgtgtgtgtgtgtgcgcgccacatgtgtgcaggtgtgcaagttcctgaaggggcagaagaagatgctgggttccctggaactgcagttacaggcagttgggagccacctgatgtgtgtgctgagaaactgaactaaagacctctaggagagcagtggatatttttttttttaaagatttatttatttatcatatgtaagtacactgtagctgtcttcagacacatcagaagaggtctcattatggatggttgtgagccatcatgtggttgctgggatttgaactcaagacctttagaagagcagtcggtgctcgtaaccactgagccgtctctccagctctctatatttacattttaaaagtgttatacctctgctgccttcttacacactcctggtctgccttgcttcctcattggctgtttggttttggaaaggtgatgctgggattggaacttgggtccttaagcatgcaggcttttctgagcccttgctttgggaggtgagatctctttgcttgggccattctgaccttgaactcccaatccttcccctcagagatgatggcatttgttaccaggcccgcctctgggttcctgtggtatttgctcttttcccatgagcctctgggttatgtgcctctctgagcacttgctcctccccgaggacttagtcctgcgtgctccacctttcattgctgcccttcagctttctccctagacttttagagaagatccctgactggcctgctgtcccaggcctttgatgttcttctggtcccaagctcctcagccttcagtctccgcacaaagcagattgctggggcttcattatcctcagctgtcagtcaccgtacagagcagattgctggggctttatttaagcatgaggccgctggggacagaaatggctccttctgaggtgctggcagcatttgtatatcacattagtcagtcctcgttggaggtgggcagacttaagggatgatgtttgatagacgaccctggaaatgatccctcctgcggtgcaccgttggcttcatccatagcctagtcagaacgtagagacacgggaagaaagaaccgtgttctgccatgtcaccagggcccgtgagtttccagcatcacctgccttgaaaaactattcattttcctcccaccaagactctttgggaagaagctcatatgtcactgtcccagttgggcccaagtgagcataggagcactgtgttagcgatgattctgtaaaataggcacaagactggggatgtagctcaatggttaagccctttcctagaatcccccagtgaggggctgggggcatggctcagtggtagagcccctgcctagaatccccagtgaggggctgtgggtgtggctcagtggtagagcccctgcctagaatcccccagtgaggggctgtgggcgtggtcagtggtagagcccctgcctagaatccccagtgaggggctgggggcgtggctcagtggtagagcccctgcctagaatccccagtgaggggctgggggcgtggctcagtggtagagcccctgcctagaatccccagtgaggggctgggggcgtggctcagtggtagagcccctgcctagaatcccccagtgaggggctgtgggcgtggctcagtggtagagcccctgcctagaattccccagtgaggggctgggggtatggctcagtggtagagcacctgcctagaatcccccagtgaggggctgggggcgtggctcagtggtagagcccctgcctagaatcccccagtgaggggctgtgtgtgtgagagtcagtgttgataactttgattcagattctgcagtgagaagctggagtcatttctttaagatagggctttggctagcatggtaaggccctggcactgcaaaacaaagcaagcccacagtgaaacaaacaatatagtattgaaagtcttccctcagacaccacctgcatgcacatagtgttagccatcatgatcatcaggtggtaataatcactaatagctaatgaagtgtaaatttctagatttttagattttatttgtgtgtgtatgtgtgtgtttgtgtagacatatgtgtgcagtacctgtaaaagccataagaggccatcagattccctgcagctggatttacaggcagttgtgagccacctgatataggagctgggaagtgaacttctagaagagcagcaggcatctagccattccccagccccaaatttctagacctttttgtgtccgggtaagcattacctttgataggaaaagctgaatatatgaatttgggtggatccctgaaatgcactaagtgtttgggagtgagagaggaggcaggaattcctttgtgtcttcctagattttttttttctccagtgaattagacagacgttttcctgagcagattagtaaaacaagattcctcctgctgcttgacatcaggaagtagaagacagtgtcgggtgatgttgtccacagccctggataaagcagcagagtcaggcaattcaggcgagaagggaggtcagaaggggtggaggtcaggatgagccaagtgtcaatctggatgacgagatggcgtgtatgtggcaaattccacccctgtagatgactttcttcacctgcagtcttgctgcccagggcaccgtcttcaaagctcactttccaggctacctgttctgtgctgaggaggatctgcacttcagctcagagagcagacctgggtgggagaggcccctgagggtcatgcccgggagggatggcagggcttgtacctgggacctctccgggaagggggaagggtccgtgacgggggtctgtgatgtgtgatgaccacaggacgctgagggatttggcgacagactatttctcaagcagcggatgaacttgctgtcccagatgacatcaacacccatcgactgcctgttcaaggtaagacgccacaatgttctttggaggtgatgggtgagcattgtcccatttgtgtgtgtgtgtgtgtgtgtgtgtgtgtgtgtgtgtgtgtaagtcctggggagattaatttgcgttctgtctgggagagtggtcgcaagactacctgtcttcctcagcacacactgtgtggttaccactgtacagcacacaggggctgctgggcctcatcacctttgtcattcaaggctagctcagtgggacctcttcctgtacctgatacagctgtttcccctcctggacccgaggtgccagcactcttgtagtaggccttagctgagtgtagcatcaaatgccctgcagcttttggtcctgagtgcaggaagcgccctgttcagatgtttactgactcctgggaaactcacgaggcagtctgtagccatcactatggactgcctgagggtggaccttctcccagagtctgctgatgtttctaggcttctgggagccagagtagatccctagagggagcccatctgtgagtcacagaggccaagcctcatgggcttgaatgctggggtaggggggcctcccaatattgcagccgttttatttactttaagcctaggatacacttgattactataaagataacactggggctctgtatgtccgtccgtccgtccgtccatctgactccctctcttcctctcttgtcagtactggaaattgaacctaagaccttgcacatactgagccacatcccagccccttactggtgggttctaggctggtattctatagctgaactgtgccctcagttcatggtgctttgggacagtgtctacctatgtagcccatgcagaacttaaactcatgattctcttgcctctctgctcctgggtgctaggggttaaaggtttgtgccaccctacagaactgaggcttttgctaatgaagtgtcaaaatccacactgaggcctgagatggaccgtgtgcctcttctcagtattttggaaattttgtcaggttgtttaaaaaaaaaaaagtgactgcatttatagaaacagtaattgaatgtgaattcatgttgccctgaagctgtcacccgaagtggcttcgtctcatttgcaaagccaatgtctccatctgcccagacaggcagggagccattcccagagaacagccatttcagtgtcatctcagagaagcctttaatcccagcactcggaggcagacagaggcaggtggagatctgagtttaagcctggtctacaaagtgagttctaggataatcagatacacagagaaaccctgtcttgaaaacagaaacaaaacaaaaaagagtccaaggattgcctgggctacagaatgagacctatctcaaagtgaaataagccaggcttggtgttccgggcttgtcatcccagcccttcaggaggccaaggcaggagagtgacaaattctaggtcaccttggtgtacaaagtgagttcaaggccagcatgtgcaacttggggagatcctttctctaagctgaagaagacccaggttgtgactccatgagggagtgcttgcctagtgtgtgtgacaccctgggtccacccacaagtggaccaaacccaaccacaccaaaccacaccaaatcacaccaaaccaagccaaaccacaccaaatccaaccacaccacaccacatcaaaccaagccaaaccacaccaaatcacaccaaaccacatcaaaccaaaccaaaccacaccaaatcacaccaaaccaagccaaaccacaccaaaccacaccaaaccaagccaaaccaaaccacaccaaaccaaaccacatcaaaccaagccaaaccacaccaaactaaaccaaaccaaaagagccatttcttggaaagcgagtgattacttaacattgatagtatttggaatgccatctttagcacatcgcctctggtaaccaaaaggaagtggaaagacttctgagccaagatgaccaggacaaagacgccatgcaaaagatgtgccacccactttgttcctgtgaggactgtgagaagcttatctctgggtaagagcgccagggtgaggattctcgggatgcagccatgaaattgaattatttccatggcccctcagctgtcggctcttgtccccagtgcggggtgacacactttcttcttccgcatcctcagctgcatcccagggctttgcatatgtcctgcctgagcctcacaagagggttttaagatggagagtggggtgggtgccagttccttctagtgactttttggcttccctttatgctctaagggcaattttgtagtttgttgaggcctaagggattggtagagaaggacactgaagctacaggcctcagattctcaccctacagaggcctgaaagggtctcatgttggatggcctccactttggcaccgccttgtgccacctggcaggtcgcggctttgccttgcctttccctgttgtatttttccacatcttctttctgtttcaggaggctgaatgacccgtcagttgtcactcctttctccagagatgacagaggtcaaacacccctccatgtggctgccctctgtggtatgtgaccctgggctggcttctgtgaggcaaaaggatggtggcccatgagctagtggaggcccaggtgatgggatactgggaggggctgggtcgtgggtgcatcccacagggcaggaaagatggacaactgcccctctggttttgctggccaccatgttacctcacaggctggaagaggactcatgtggctctccatgcttggggctgctgctggccagtgagaatgggctggtatgtctgctaagacaatctcacagaattgtggtttggggttcacatatcactgtcctcaaagataatgttgagccaggtgtaatgatgcagactgtaatctcagccactcaggaagccgaggcaggaggatttgagctatagagtgagactccagctcaaaactaggggggctgaagtacaaatgtttccagcaccacgtgggtgctggaaatcgaacctgggtcctctggaagagcagccagtgcttttatccacggggccatctcagcagcccctggcccattgttactgagaacagatgtgggtgtgattcccttcatagggcatccatcccacagtgatttaagtctgcagagcctgactcatgtcagctcaggctcctgtacagctgagactgggtctcctgtgggtttcctgccagggctatccagagtgaggtagcattgtagttgggagcccctgtttcctctaccaacaagaggtccttctgttctgcaggtcaggcatccctcattgacttcctggtctccaaaggtgccgtagtgaatgccacagactatcatgggtccacccccttacatctggcatgtcagaaaggcttccaaagtgtgacggtaagcagcagggttgtgtgtagcattgcatggtggcttcatggctgtaccatgcactaatctagtgctagctgccaggtgtgaggaacccggaggccaagggacctccctggatatgggttgagatggggaaatccctgatcatctcagggtgggaagggcagggttctggacatttccctttaaactttgtgttgatgggaagcaatggcttatgtgtatattacatacgtatgtgtgcaggtgagccactgtgcacatgtggatgtccaaggaaagcttgctgtctgttttcccctgccaccatgtgggtcacgggaattgaactcaggtggtcagacttggtggcaatcgcctttatctgctcacccatcttgccaccctgcaatggcacaattttaacagaggtacaggttgaggagtcttccttccccttgatgctcgggtgttttggattgttttggatccttttggattttagaatatcaggcaataatagtctaaaggtcatttggtatactatttgaagtgtctaagtattcctctgttttggctcatgtcaaatgcctctgacacactagacacggtactgaattttctacttgggttgccttaaaagctcaacgcttttcaagactggggagttgggggggggtgtatctctgtgttgaagcgcctgtgagtgaagccttgagtttctcacctagcatgggggttgggagaagaaaaagaaaggaagaaaggaaggaagaaattaatttcagatttagggccaggagtgcacatcctatgtaatgtttaggatatgatcgtgacctccctggaaggatacagctgtgtgctccgtgctccttctcgggctcagctgctgtcttctctcctctgctagctgctgctgctgcactacaaggccagcactgaggttcaggacaacaacggcaacaccccgctgcacctggcctgcacctacgggcaggaggatgtaagtggctccggccgcccccaagcgctgcttttcgtgtctctcacctgtggagaaatacagatgtgaaagtagaccagtgttatgttctgtgttatagtgattgaaacattggtatgtgattataatttttttgtctgctttttatcgtgtgtgtgtgtgtgtgtgtgtgtgtgtgtgtgtgtcatggttgtgtgcacattgggacaggtgccatcatgtctggaggtcagaggatgacaactgtgtggaatctattctttccttccatcttgcccaagtttggtttctattgctatgatgttgcggtatataataattgggggtttcctaccccacctttgattgtttagttcctaaataaaagacacaaccttgatatttataagaagccttaaagcattagagctgcgcagatatcaatcctctgtgctattttatctacttccctgtcagtaatcccaagatatcacttgccatgtactgcccagaccactcccactccaactagccagtccttgtggccatgggttcatgatctacctacaccatggtaccttcctccttcttcctccctctacctcctgatctctgcctcagaccccaagctgaaccaatgcttcacttagctctcttctgcccagctaccggctgtaggcatctttattaaccagtcatgggtaatgggggggggtgggggagatttgcataataaaggctgatgtactcgatagatttgcactacttggagcaatgcagaacgtagcctttgaatacaagcatctttagaccaacccattattttatgagacccaccaggaccacgtgcaacctgggggagggaactgtttattttctattgcaccttccaaaggaagtcgggatagtcactccccagaggctgaaactgaagcagagaccacaaaggggtgttgcttactggcttgctcctcaggcttgctcagcctgctttcttatacagcccaagaccaccagctcagggttggccccaccgtaatgggctgggcttcgcctcatcaatcaccagaccctgcacagacttgcctacaggccagtgtgacggaggcattgtcacacttgacgttctctcttcccagaaaactttaggttgtcaagctgacaaaaagtaaccagcacacacctttacaggggttctgggatggagccccaggcttgtgtagcaagtgtgtttacctgtgcagccatctgctagccctgtaatttaaaacaattcagtgttcagtgtattacggatgctatatattgagaaatgtaagacctaaccccaaagttaaatcatttttactcatccgcactacatctggctcttaaactctgtatattacattttagcccagcatcgaggaaccctgtggtttccagttctgcctgttactttactatgtatatatctgttacctggcttccccctcatttccagaagttataaaaaaaagtacactgatttttttttttcttctggttttctggtgtagctcaggaaagcactgaactcccagtcccctgtgtggtctattcagtcagtagtggggtcaaaggtgtggcgtcaccacaggtatccttgcagaaattccaaattgtatcaaatgttacataaatcgtatctatttatacaacagctctttgtagtaagaaaagtgattttcagttacagttggaatccctatctgcataaactttgttggtaaatacttgcccagccctagtttgagattcattttggatggctctgcagtccactatataattttattttcttaaatgttttcccaatatgcatatacaatataactacatatatacacacatatatacatacatacatacatacatacacacacacacacacacacacacacacacacacacacacacacaactcacagtcctgctgtattctggaagtttgtaaacgtcttctattattttttggattattttgtggcagaccatccctgactgtcacccaggctgacctcaaactctttcagttttccaaacactgagattataggcaaggctactcacttcttgttgacaattggtgatggtttttcccctgtcctgttttgcttcttattggaagttgccctaaggtttctttgaatgctagacaaagagacaaaagttataccactgagccacgccctcagcccctcactgggggattctagacattctaccactgacctacttggattcttttgaaagaatgaggtgtcctgatcagggactatagaacccttaaactgtaactgctgggtttcatattttgtcttggtgagtggagccttggtcaaaccagggcatggaccatggctgagggagggactgacgttgcccttggctttcatgttagagaaccatgattttgctgtctttgcagtgcgtgaaggccctggtctactatgatgtccaggcctgcagattggatattggtaatgagaaaggagacacagccctgcacattgctgcacgctggggttacgagggcatcatagagacactgctgcagaatggagcccccacagcagtccagaacagactgaaggaaacaccactcaagtgtgctctgaactcgaaggtagctctttccatctcggagcaaccctgtgactcttaaaaacaaacaaaaacaaaaaactgcttacagactggcctcctgagaaaatgtacgttagcaccccaggagaacacttggcctccatccttctgttctatttggaacatggttgttaatgagctttgctttttgatacaattttgagtttttttagcagtttttctcattatgagctgctcccagcagaaatggctctggcccctgagcactaggtctctagcagccagtggactgtgtgaaaatgggtggtggccttgtctgtgaagagcagagaaagcaaaaagggacaaagcactgttggggacaaacactattctctctctctctctctctctctctctctctctctctctctctctctctccctctctctccctctccccctctccccctctcccccttctagcctctagaaactttatttcaatttggccaaaattgaatgaattaggtaaattagagactgtggccccgctagccttgagctcatagtgtgcctcggtctcctgactgctgggattataggtctgataccaccatgcctctagacttggtctcttgaagaagaggaaaaagtcctggattctccatttgcccaggtggatggagggtggttgaccttggcagcaagggcttttaacctgctgagcagtctgtccagaccccagagttagctaagaccatctgagaccatctcctctgacctcccctggggactggcaggcagagggtgctggggatgcagagagcttggttgtagcccatctcattagatgtctttcctgtgcccatcatcctctagattctgtctatcatggaagctcatcacctatcctctgacaggaggccaaggccttctgaggtaagtctctaagtctctagggccgtgcttactggtgtccctggagcttggtactctcctctgggcctgacatggctgtgacatacccacgtcccttctgttgcctgtccctccttcccctccaggtccctgcacagtcccctacacgctctgtggattccatcagccagggctcctccacctccagcttttcttccatatcggtgagcttcaggcaagaagaggtcaaaaaggactacagggaggtgagccagtgagatgggtagacctggtgtgggtgggccggtaacatcactgtgggctgaccacagctgcctgccagcttaccagttattggacagccagtttgttgactccaaggtcaattggcctttgagatgcacccaactgtgagtcatgtggtcttcatcttttctggctctcctgggtcttttctccatagcagtatttggaatgtgtgcgtttgaggggaggaggggtgggggggcacagagacacagaaagagacagagacacagatctggcgcaggacaagaaatagacaaagtgccatgcccactatattctaagaaaaatatatgttgataaagctgagagttctagtgtcagactctcaaagtccatcctctgtccccacccggtgagcatccctgttaatatcctggtgcacattatcccttatggtctgacacgtacacccatcacattttgtaaaacctgatttatggtcagtctttttgtttttgtattttgtttgtttgtttgtttgttttgttttccatgacagtgtttctctgtgtagccctggctatcctgaaactagctatgtctaccaggctggccttgaactcacagagatctgcctgcctctgcctctgcctctctgcctctctgcctctgcctctctgcctctgcctctgcctctctgcctctctgcctctctgcctctgcctctctgcctctgaagtgctaggattaaaggcatgagctgccatgcccagcttttctttcctttgtaatgcttgttcagcatcaacacaatccatccgtctcctcgtctcctccttcggcagaggtggagatcattacctcacggttctgttgctcctctgtggagtcactgtccaccctagaggggtcagccagcacccacaccccaaagcgttctcctgatgggggtattcagtgagctccatgcagagtcacagaaaggaaagccactatgtgccccccgacagagcacccagtccctcagagacctgcactcgttcttgggaaggggtgtctactctcagactcctcacccatcaaactgtgagagctgagtatgacgatcagggtggctggcttcttcagaagtgatcctgacctggccctggtgacaggaacctcttgtcttgactcctcgggagggtgaagcaggaagatgatcaccctggcttgctttgcttgggctgtattgtgagttcaaggcttagcctgaacaactcagtgagactctgtcttgaaatacaaagtaagaagagccctgggggggtctctccctgggagaacgcttgcctagatgcttaaagccccaggttctgttcccagtgccagcaagcaaaaggaagaaagccttattgtgttaaggtcactgtcacttcgcctcccacataaccagcagctccagtctgtgttacgtgggaggtggttccgtgcggctttcagaatgttctagatggacagtttgggggatacatttgaaaggcactgagcgagccactagccagaaggctgcccagggctccagaacactgtgtcttcctgttgttcgtttattgttaaagccgcttccctgactcgctttctccttccattaaggtagaaaagcttctaagggcagttgctgatggcgatctagaaatggtgagtttttcggtgactgtctttctcatcgctgtgacaaaatgcctggcacttggaactgaagagaaagagcgttcgttcacagtttccgagttcagtctgccattgcagagacagcagcttttcgcatggggtggaccaagaagcaaaggggaactagagacaaccaggggtgggtgtgacctccagaggcctgtccctagcgcaggactttccatagccaggtccagactgctaaaggctctacagccttcagggtatgacatgaatagcagcccagtgaacgggagtcagaacaggagcccgtgtgggacattttgagattaaaatcccaagaaagcacatgttccaagctcttcgttggaagtggctgtactcctgtctcctgcctctgagtctctagctatgtggcctctctgtaagctccccctcgaaggtggtggcttccgtatgctctttatcatggcggtggtaggctttcccagggaggaggcgcctagcaagcatggccccgcccctccccgctcctggccttctagacattgccattctgagagtcaaagtgatgctggcaagaatccacactaaggtttgggaaagagaggcgtgagggaggcagacatagccagggttgcatgaaactcagcagcagtatgaggacatcgggctccttgctgggtcggcaggcttggggctttggatgtcacaagcagggatgggactcacactaacagtagccggtagaggcagtcttcctgggggtgcccatggacagtttctcttggcttcctggaagtagcatgcctgtgcttagcaaacctggagctctaaatgactcatcttccgagggcacgttacagctttcaagagtgctttctgaaggctggtggcggcaattgtggaaggctggcagtggcggtggtgtacatctttaatcctggcacttgagaggcagaggcaggaggatctctgagttccagggcaacctggtctacagagtgagttccaggacagccagggctaacactgtctcgaaaaagctccaggcctctgtgggcatcaggcctgcctgcgatgctcatatactcatgagccgtgtgcacacatgcatacacacacacacacacacacaaaataatggataaaaaaatgtacttttcactgatgatcaagtgggccctgtctgttccttgtgttgtcatggtgacaggacaactggagagagcagaattgtttcagcctacggtttcaggggactggccagagctgtttggttccatgcatttgagcagaagacctactgtgattgagacgcagatggatttcttcatcctgtgacagccaaaaagagcctagaaagagggcctatgagatggcctagtgagcagaggggcttgctgcacgtgctgtggcacgtgtatgacccctccccccagtccaggctccagtcatgcatgcacgcacacacaaacatgcatacaataacagttttttaaaaggcagggtaagagggaactaagcgttggagatcatataacccctccgcaaagacccacccccaggtcacctgctccctccagctagaccacactgctggtagttctagcatttccgcaagcagcactgttagctgaggtgtagacatccaacccggagcctgcatgggagatttcagattcaaaccattgcagaggtggtaaatagggtcgtctgggacagaagaaatgtaccccagttgccatatataataagcctgtctcagaggctgatgtcattccatcaggatgacacacagctctctggaagacacagaagtctgcacctatctgctgctgggctggtcctctcacgagagcatctctggaaaacccagagttccagtgctctttgggtatttgaaggccactgtgggagcctgatacatagtctgtgcagcaagcaatgactagaccaggtcatgacccatgtgctctgcctcccactgggatggggttcaggccacatatggaaggggtggccagtggcaccctaggcagcgccctgagtcactgttgagactgaccttgggctgtcacaagacccctttcaaggccacttgtcaatcttgttcttaccctgtcttgagatctgagctggccgatttgtaactgccaccccagtatggaacctgggggacaagaggcttggcattgatggggaccccacaagctctacccttatatgctgagccctgaagacctgcagggaagcctacaaacgcatgtctgtggatgctttctttctcaaaggaattcttactgatagttttctttggggagggacaggatcttactatgcagttcaggctggtctcgaacctgcagttctctggagggatggagttgcaggtttgagcctccacacatgctgtcttctcaagtttcaggtccttgtaactagtggatgctggaacccagcatatcctgcctggaaatttctttgctttggtcctctgtgctggcgtgtagtgctgacaggaccgtggtgtggggtcagggattctcgtgtgctctggaacacagcatgaggactcatcacgaggtttctgttgggtatcaaggaaggatctggggttgacgtggcatcttagagttttactgctgtgaacagacaccatgaccaaggcaagtcttataaggacaacatttaattggggctggcttacaggttcagaggttcagtccattatcatcaaggtgggaacagggcagcatccaggtgtccatggtacaggaggagctgagagttctacatcttcatctgaaggctgctagtggaaggctgacttccaggcagctaggatgagggtcttatagcccaccctcacggtgacacacctattccaacaaggctgcacctattccaacagggccataccttctaatagtgccactccctgggccgagcatattagaaactatcacacctagtcaggtggcataggagtgcggactcagggccagggtctaaaagcttgccctccaggcagtttcagtctgctcctcttaagatgggcaaagactcgtatgctagaaaatgataggtcgatccttctatgcttcccagggggacctaggacgacttgagcacaggtggaatgtagatttattgaggaacaaatgctcttcgtcagtgacagcggtggtccagggagctgatttaggaagtgtgtgcgtccgtgcgtgtgcaagtgcgcgcgctgctggtaaaggtgtcagaataatgaagttcccgtttctcctcattgcccgccaccaggtacgataccttttggagtggacagaggatgacctagacgatgtggaagacgccatcagcacggtggatctcgaattctgtcaccccttatgccagtgtcccaagtgtgctccagctcaggtttggctctgcctgtgtctgtggggcagcatggggtgggaggcaccgtcttttattctgcctaggaagtcctttgctttaagtaattcatgattgacacaggcatcccagagagactgaatagtcaggtgagggctgagagcatcagctcttctttggtcattttcaactcgccagttatttatttatttgtttgtttgtttgttcattcattcattcactcattcatttatgggacagagtcttactacatagccctgactggaagtcatttatgtagatcaggtgtagatcagggtggttggtctcgaactcacagagatctgcctgcctccgccgcatgagtgccgggattaaaatgtatgcaccaccatgccaggctttagtttggttttatgcatgtgggtgttttgcctgcatggttataaatgcacctcatgtgtgcagtgcccatgaagcccaggagagggcatcagatgccctgcaactggagttgaatggctccacatggctgtgaattgccatgtgggtgctgggaactgacctcagatcctctggaagagcagccggtgcttttaactgctgagccatctctccagccctcttttacattcatgttattatttttattcttgaggtgtgagttacattcagtgagacccaacctttaactcagatggttaactgtttgttctcaatgagatgctccacactgcccactattttgtctgccttctccctgaccactgtcctctcagcagaactttaaagccgccagggataagaaggcagtctcaggattaaaaatgaaggtgatgtgtgaggaaaatgacgtactggctgtttcaggaggtttggcaaacacttaggggacctggttgtttaatctcaggctggccgcaaaccccctttgttgtgaaggacgaccttggagtcctgaccttctacttaacccaggagccgtgtgctgcccgcccgcccgtttttgtgcatagtctcctactaagcactgtcatgaagagaggtcatgtctgtgtgtcagttctccatgctcatgaacagcctcccttcccctcctccctggagacccatgatctgtctcctgagctctggggctctgtcactcctgatgctgatgtgggtttccttggcaactggccacattatcaagcactacagtgagcagcttttctgttccacggaatgaccatcacttggcttggtgactgtgatgccatccggtttacgtgtgtggagttagggttggtgtccagtgcgcctgtgtgctgcacccccgccccaggctgatttattaagcaggcttggtgttctccattgcacctcgtggggtaccccttctacgttttgtgtctttggagctccttcctgatgtgatcaggcattcttgcggagggcttactccattgaaatacagaagtcagtcttttgttgtctcatctccttctgaagaagtgggaggtcactcgtaggccatgttgagtccaggtccctctgtgatcccaaaatttgcctaagagctgggaggtgggggcagagagatgcttcccatcaccctcacccccacccccggcccagcctcttgagtactgttgccacatgtttgcaccctctgccttttctagaaactggccaggatttctgccaatgggcttagtgtgaatgtgaccaaccaggacggcttctctcccctgcacatggctgccctgcatggccgcacagacctcgtccccctcctgctgaagcacggtgcttactcaggtgccagaaacacaagccaagccgtcccgctccacctggcctgccagcaggggcactttcaggtatgggccccatctcccgggtagcaaaatagctgtgctttgatttttggcaagaccctcacttggtgacggttcatcggggcagtgctgagggaagccctgaggacagagcagttctttccttcccacgatggaacccctggcctggggcctggtaccagtgcccctccccactgcccttcaggctgggtggtgtaatgctgtccctgagcttctgaccccagcaacagtgtgtctcctgccaaggtgctggtctctatactacctttagatctgtgcaaaatagcttagtattttataaatgataatcaaggccttaaatagcggttcaagagtctgcaatgactaacttttgttttgagacaaggtcttcaaatgtaactcagcctgctctcaaactttccatcctcctgcctcagcctcttgagtgtggggactacaggtgtgtgacctcacatctggctttgaaccagttagcttcctaaagtgcgttttctttgggaagttgtctgtgtgtatgaccttgagaagttccactgtggggttttaaagacaggaccatgtctccagcctgcatctgtcttagatgtccagcagaccgcttcccaccgtgtgttgagagcaatggctacaactctccttaggtagctataaagatgaaaaccctagtgcctggtgcattgtgggcacaaagcaggccccccacagatgagagtgcccccctgttattcatcccccttgatccagagggcccatttcacctgagaggagagatttcttttcctgagttatcattaacactgaagtttttcttctctggactaggtggcaaaatgtctcttagattccaatgcaaaacctaataaaaaggacctcagtgggaacacacccctcatttgtgcctgctctgccggccaccatgaagtcgctgcgctgttgctacaggtaagatctctccctgccacacctggccttatttttttccttttaaacaatttttgtgtttatgcttttttaaagatttatttttatttttgtgtgtgttttgcctgcatgtatgtataccatgtacatgcaatgcctacagtggccaggagagggcgccaggtcccctggaactgaagctaaacaggctgttgtgagctaatgtgggtgctggggaactatatccaggttctcatcacagagccgtgcagtgagagtttggaattttggtgttgatagagtccttggaggttgaaaattccaatattgaatataaaaaagttactagaccattaaaggcatggacagcacctatagacagtggataagggatacaattgatattggttctaacatgtgccatgctaatagcatagaacaagctatatagctagagggctcagatcccagaattcctggtgccctaattgtggcaattgcagtcatttgcacagaggtggtgacgaagccgctaaaggtctcagctctcaaaatatttggtgctttaattgtgggaaatttggtcattagcaacaaaattgtgaacaaggcatctctaaggtcaatggtttttttataaatataaaccagaaagaaggcctaggcttctacacctagggtgtgcaggcgatgtggcaagggctgccattggaccaatgagtgtaggtccaaaagagatatccaaggatatttcttacttttgggaaacagctttgggggcctggcttgaagccccatagcaaaagtatcaaccgatcacctcttatcagccagggagcattaagcagacagaaaaaccttaacactcagcaaaagagagacaggttatagatcaactgtggaattaaatcattctgtatactatctggatgtgttaatgtcagagtggaagcccggggaggttttgctttgggaatgtggatttgtttatatctccacagggattggaaagctgtggatcccatcaaaattgataaagattagaaccgagcaggagaggtctcctgaaaaccttggccactggtccgaaaagcactaatttcatcgaaaatgtctctgtttatgatttcccgccatccagcctaattaacggcttaatacagaaaggaggaaatgtagtgagaattttggaattttggattctttaaaaaacatagaaatataattctaagagtccgtttctgttttaatcccaggtatagggacatggggctgcttcagactgtccatagcagctgactatgatttgtctcgtgctctaacaggggcgtgattttgtcagccgcagatggtttctgcgattgtgtgacatttggagttctggggacttttcagagggtgtataaatgctagggccctgagaggcagggcaacttgttggttgttattggtggctgtttgtcaagtggtcatgcacaaagaagaaacacacatacacgtacctaaaaattggaggaaaaggcagaaaaaaaatctaagttccaagaattttatactgaaccacacacccaggagttgagtttgaggccaacctgggctacataggaagtttgaggccagcctgtgctacatagtaacaccatctcaaaaacagattttttttttttttcttgagacagagtctcaccatgtaccctaactacctaaattctaaattccatgcnnnnnnnnnnnnnnnnnnnnnnnnnnnnnnnnnnnnnnnnnnnnnnnnnnnnnnnnnnnnnnnnnnnnnnnnnnnnnnnnnnnnnnnnnnnnnnnnnnnnnnnnnnnnnnnnnnnnnnnnnnnnnnnnnnnnnnnnnnnnnnnnnnnnnnnnnnnnnnnnnnnnnnnnnnnnnnnnnnnnnnnnnnnnnnnnnnnnnnnnnnnnnnnnnnnnnnnnnnnnnnnnnnnnnnnnnnnnnnnnnnnnnnnnnnnnnnnnnnnnnnnnnnnnnnnnnnnnnnnnnnnnnnnnnnnnnnnnnnnnnnnnnnnnnnnnnnnnnnnnnnnnnnnnnnnnnnnnnnnnnnnnnnnnnnnnnnnnnnnnnnnnnnnnnnnnnnnnnnnnnnnnnnnnnnnnnnnnnnnnnnnnnnnnnnnnnnnnnnnnnnnnnnnnnnnnnnnnnnnnnnnnnnnnnnnnnnnnnnnnnnnnnnnnnnnnnnnnnnnnnnnnnnnnnnnnnnnnnnnnnnnnnnnnnnnnnnnnnnnnnnnnnnnnnnnnnnnnnnnnnnnnnnnnnnnnnnnnnnnnnnnnnnnnnnnnnnnnnnnnnnnnnnnnnnnnnnnnnnnnnnnnnnnnnnnnnnnnnnnnnnnnnnnnnnnnnnnnnnnnnnnnnnnnnnnnnnnnnnnnnnnnnnnnnnnnnnnnnnnnnnnnnnnnnnnnnnnnnnnnnnnnnnnnnnnnnnnnnnnnnnnnnnnnnnnnnnnnnnnnnnnnnnnnnnnnnnnnnnnnnnnnnnnnnnnnnnnnnnnnnnnnnnnnnnnnnnnnnnnnnnnnnnnnnnnnnnnnnnnnnnnnnnnnnnnnnnnnnnnnnnnnnnnnnnnnnnnnnnnnnnnnnnnnnnnnnnnnnnnnnnnnnnnnnnnnnnnnnnnnnnnnnnnnnnnnnnnnnnnnnnnnnnnnnnnnnnnnnnnnnnnnnnnnnnnnnnttttgtcttgtttttcaagacagggtttctttgtgtagccctggctattctggaactcactctgtagaccaggctggcctcgaactcagagattcacctgcccctgcttctcaagtgctgggattaaaagtgtgtagcaccatgctgggcttattggccattctttcagaggacctaagttcagctcctagtacccacatagtggcttacaaccacccatgctccatggtatctggcacccttttgtggcctccaaaaccatagggcatacacacaatgcacatacatgcatactggcaaaacattcatacactaaaaataaacctcttttaaaatgtggatgccctgtgtttcgtgcctatagccccagtactctaacctcaggataggaggtggggacaggagaattggcaagatgtcctcacattcagtagagcagcagaattaagggagaccctgtctcaaaagcagccaggaggagagatcaactcccaaaatgttgttctctgtcctctgtgtgtggtgtgacgcatgtacctctgccattaaatgaattttttaaaaagtcattctatagcgaatagtcccacggattgtgctgtcccgttttctcccccagcacggggcctccatcaatgcttgcaacaacaaaggcaacacggccctgcatgaggctgtgatgggaaggcacaccctggtagtggagctgcttctgttctacggggcgtcggttgacatcctgaacaagaggcagtacacggcggcggactgtgccgagcaggtgagggagagcgcttgaggaggcagctccgtgcttcctgaagcacacacactgtgggttccttgtgttcaaaccagatgggtgatcacaagagccaggcctttggtgctccgtgctgagctaagtgagcaggccagacgtccacaggcagggctagttccttgtcattgtcacctggcggggcatgctcgatgtgccagtgctcttcctggggtaacttcagaggcctaagggaatgtggaccacctatgaattgctactcttagacgccttggcgtggtgcacacagctgctgtcacatctgagaagttgcaggttacacatcgttctgggtttaccagccctgtagcataatggagagttttagctgtgggttttaaatccctcggattctgagagagtttagatccccagctctctctggagctaatcatggagaaagaaagttgctctcctctgttcctctcatggtgaatcttggctttaaactccaaataacccaatacagatgttaaagtcactataaatccaacctaattatatgcctatttaattttaaggccaaaggcatggctctgtagacccctgcctagaactcctagtgaggggctggagggtgtggctcagtggtagagcccctgcctagaatcccccagtgagggactggagggtgtggctcagtggtagagcccctgcctagaatcccccagtgagggactgagggtgtggctcagtggtagagcccctgcctagaatcccccagtgaggggctgggggcgtggctcagtggtagagcccctgcctagaatcccccagtgaggggctgtgggcgtggctcagtggtagagcccctgcctagaatcccccagtgaggggctgggggcgtggctcagtggtagagcccctgcctagaatcccccagtgaggggctgggggcgtggctcagtggtagagcccctgcctagaatcccccagtgaggggctggggtgggatagagccactgcccatcatgtacaatgtcctgggtaccaaccctagttcctcaagaagaaaaactttcaaatattgtctcaatctagagattgggtataccttttaagaaactgttggtgaattttaggtgtcccttgactgggtggaggtgtcctgtgagggttgacggaacttaccagataatgcttaacgtttcatttgct

SEQ ID NO: 405 - DNA, 2608 bp, Mus musculus
gtaaagaggtaggctgaagagtggagccaccgcacccgggtggtgggcactcaggtcccagcccagggtccgggaggtgctgtcgtagcacagaggtgaaactatgtagcctcttaagaagctcacttggatcccccgaagtccctatggctctatatgatgaagatctcctgaaaaaccctttctacctggcccttcagaagtggcgccccgacttgtgcagcaaggtggcccagatccatggcattgtcctagtgccttgcagaggaagcctgccgggcagtgtgcaggcctcctgccagttcgagtcctatgttttggtacccacggaaggacactttcagaccttagatggaaaggctgtcgtcattgaaggaaacaggattaagctaggagcaggttttgcttgccttatctctgtgcccatcctctttgaagagactttctacaccgagaaagaggagagtttcagcattctctgcattgctcatcctttggagaggagagagacttcagaaggttcttgcaaagcaggaggcccagatgaacctgatgaagcaggccgtagaggtaaggagagagtgaagggcagtgactgggagactctgtgtcaaccccaatacataccacaagcctgtcttttgaacccacagatgtatgtccatcacgatatttacgacctgatctttaaatacgtggggaccatggaggcgagcgaggatgccgcctttaacaaaatcacgagaagccttcaagatctccagcagaaagacatcggcgtgaaacccgagttcagcttcaacatccctcgggcaaagagagagctgggtcagttgaacaagtgtacgtcgccacagcagaagctgctgtgcctgaggaaggtggtccagctcatgacacaatctcccagccagagagtgaacttggagaccatgtgtgccgatgatctcctctcggtcctgttatatctgctcgtgaagacagagatccctaactggatggcaaatttgagctacatcaaaaacttcagatttagcagctcggccaaagatgagctaggatactgcctgacctcagtcgaggctgcgattgaatacatccggcaaggaagtctctccacgaagacgcctgacgctgagggatttggcgacagactatttctcaagcagcggatgaacttgctgtcccagatgacatcaacacccatcgactgcctgttcaagcacatcgcctctggtaaccaaaaggaagtggaaagacttctgagccaagatgaccaggacaaagacgccatgcaaaagatgtgccacccactttgttcctgtgaggactgtgagaagcttatctctgggaggctgaatgacccgtcagttgtcactcctttctccagagatgacagaggtcaaacacccctccatgtggctgccctctgtggtcaggcatccctcattgacttcctggtctccaaaggtgccgtagtgaatgccacagactatcatgggtccacccccttacatctggcatgtcagaaaggcttccaaagtgtgacgctgctgctgctgcactacaaggccagcactgaggttcaggacaacaacggcaacaccccgctgcacctggcctgcacctacgggcaggaggattgcgtgaaggccctggtctactatgatgtccaggcctgcagattggatattggtaatgagaaaggagacacagccctgcacattgctgcacgctggggttacgagggcatcatagagacactgctgcagaatggagcccccacagcagtccagaacagactgaaggaaacaccactcaagtgtgctctgaactcgaaggtccctgcacagtcccctacacgctctgtggattccatcagccagggctcctccacctccagcttttcttccatatcggtgagcttcaggcaagaagaggtcaaaaaggactacagggaggtagaaaagcttctaagggcagttgctgatggcgatctagaaatggtacgataccttttggagtggacagaggatgacctagacgatgtggaagacgccatcagcacggtggatctcgaattctgtcaccccttatgccagtgtcccaagtgtgctccagctcagaaactggccaggatttctgccaatgggcttagtgtgaatgtgaccaaccaggacggcttctctcccctgcacatggctgccctgcatggccgcacagacctcgtccccctcctgctgaagcacggtgcttactcaggtgccagaaacacaagccaagccgtcccgctccacctggcctgccagcaggggcactttcaggtggcaaaatgtctcttagattccaatgcaaaacctaataaaaaggacctcagtgggaacacacccctcatttgtgcctgctctgccggccaccatgaagtcgctgcgctgttgctacagcacggggcctccatcaatgcttgcaacaacaaaggcaacacggccctgcatgaggctgtgatgggaaggcacaccctggtagtggagctgcttctgttctacggggcgtcggttgacatcctgaacaagaggcagtacacggcggcggactgtgccgagcaggt

SEQ ID NO: 406 - protein, 864 aa, Mus musculus
  VARIANT (1)...(864): Xaa = Any Amino Acid
RVEPPHPGGGHSGPSPGSGRCCRSTEVKLCSLLRSSLGSPEVPMALYDEDLLKNPFYLALQKWRPDLCSKVAQIHGIVLVPCRGSLPGSVQASCQFESYVLVPTEGHFQTLDGKAVVIEGNRIKLGAGFACLISVPILFEETFYTEKEESFSILCIAHPLERRETSEGSCKAGGPDEPDEAGRRGKERVKGSDWETLCQPQYIPQACLLNPQMYVHHDIYDLIFKYVGTMEASEDAAFNKITRSLQDLQQKDIGVKPEFSFNIPRAKRELGQLNKCTSPQQKLLCLRKVVQLMTQSPSQRVNLETMCADDLLSVLLYLLVKTEIPNWMANLSYIKNFRFSSSAKDELGYCLTSVEAAIEYIRQGSLSTKTPDAEGFGDRLFLKQRMNLLSQMTSTPIDCLFKHIASGNQKEVERLLSQDDQDKDAMQKMCHPLCSCEDCEKLISGRLNDPSVVTPFSRDDRGQTPLHVAALCGQASLIDFLVSKGAVVNATDYHGSTPLHLACQKGFQSVTLLLLHYKASTEVQDNNGNTPLHLACTYGQEDCVKALVYYDVQACRLDIGNEKGDTALHIAARWGYEGIIETLLQNGAPTAVQNRLKETPLKCALNSKVPAQSPTRSVDSISQGSSTSSFSSISVSFRQEEVKKDYREVEKLLRAVADGDLEMVRYLLEWTEDDLDDVEDAISTVDLEFCHPLCQCPKCAPAQKLARISANGLSVNVTNQDGFSPLHMAALHGRTDLVPLLLKHGAYSGARNTSQAVPLHLACQQGHFQVAKCLLDSNAKPNKKDLSGNTPLICACSAGHHEVAALLLQHGASINACNNKGNTALHEAVMGRHTLVVELLLFYGASVDILNKRQYTAADCAEQX

SEQ ID NO: 407 - DNA, 99104 bp, Homo sapiens
cattcataatcctaccactttgttaatattaatatatattaataatatttttatttctttacttccctgtagatctttccatatgcctaatacgtacatacaagcaggggacactcaactttgctttctggtactagcatattaaaagtactctttaaatatatgtattttttttttttttttgagacggagtctcgctctgtcgcccaggccggactgcggactgcagtggcgcaatctcggctcactgcaagctccgcctcccgggttcacgccattctcctgcctcagcctcccgagtagctgggactacaggcgcccgccaccgcgcccggctaattttttgtatttttagtagagacggggtttcaccttgttagccaggatggtctcgatctcctgacctcatgatccacccgcctcggcctcccaaagtgctgggattacaggcgtgagccaccgcgcccagcctaaatatatgtatttttgaaacagagtctcactctgtcgtccaggctggagcacagtggtgtgatctcggctcactgtaacctctgttgcctggcttcaagtgattcttctgcctcagcctcccaagtagctgggattatagatgcatgccaccacgcccggctaatttttgtatttttagtagagatggggtttcaccatgttggccaggctggtctcgaactgctgacctcaagtgatctgcccacctcagcctcccaaagtgctgggaattacaggcgtgagccactgcacctggccagaagtactctttaaatccttttgacaacaggagctcttatttggcttatttacattggtcttaataagccttaaagttttaaaattctcgagccagtgcggtggttcacatctgtactcccagcactttggggggccaaagcaggcagatcacttgagatcaggagtttgagaccagcctggccaacatggtgaaaccccatctctagcaaatacaaaaattatccgggcatggtggcatgcacctgtaatcccaggtagtctggaggctgaggcatgggaatgttgaacccgggaggtggaggctgtagtgagctgagatcgcaccactgcactccagcctgggttgacagagcaaggctctgtctcaaaaaaaaaaaaaaaaaaaaaattctcaaacaccaaagaacaagtatgcccaagatctcatggtactgcgataaaaacatccagaatctcttctatggaattagatgaaaaataagtgagaaaaacatctttccagatattattcatcttgtcctcatggagagaagactgcaacatgaccttcagtcagttcctaacagccagaaaaaacaatatttgaaatatgactttgatctgtgttgaccatagccaaagatctttcatatggagacctatcttcttggattgcatcctgcattaaaatctgagtataatcatattgtgggctgggctgggcagggtggctcacacctgtcatcccagcactttgggaggctgaagcaggcaggcagattgcttgagcccaggagtttgagaacagcctgggcaacatagtgagaccctgtctctactagaaatataaaaattagccgggcatggtggcaccacatgtgtagtcccagctactcaggaggttgaagtaggaggatcacctaagcccaggaagtagaggctgtagtaaggcgtgatcgtgccaccgcatttcagtgtgggcaacgggagtgagactgtctcagaaaaaaaaatcacattgcagaaaagcacttggagatttataatcctgaacatcttcttatgtaatgaaatctgtgaagggtaaatacattgatcaggatgttcactcccactcaaatatcaaaaattaagaatatatatatttttaaaaggccaggtgcagtggcttatgcctgtaatcccaacactctgggaggctgaggcgggtggatcacctgagttcaggagcttgagaccagcctggccaacatggtgaaactccatctctactaaaaacacaaaaaattagctgggtgtggtggcagatgcctgtaatcccagctacttgggaagttgaggcaggagaattgcttgaactcaggaggcagagattgcagtgagccgagatcatgccattgcactccagcctgggaaacaagaatgaaactccatctcaaaggaaaaaagaagaggccaggtgtggtggctcatccttgaacccaggaggtggaggttgcagtgagccatgatttcaccactgcactccagcccgggtgacagtgtgagactctgtctcaaaaaaaaaaaaatcacaagttgaggctgggcacagtggctcctacctgtaatcccagcactttggtggaggatcacgtgaggccaggagtttgagaccagcttgggctacatagcaaggccctgtttctttttttttttttaattttatttttatttaactttttcccctttttttcctattatttatttttcgtttttttaaatcacaagttgatgtctgaatcattggaaggtgccttttcccactgttattatttttaattatggcatgctatccttaattttttaaattaatagaccttctagtttgagacatcattcaaaaagtagacaaagccaggcatggtagggcatgtgcctatagtcccagctactaaggaggctgaggcaggaggatcgcttgagcctgggagctcaacactgcagtggcctatgatcacaccatgcactccatcctgggcaacagagccagaccatgtctctgaagatgaataaatgaataaaacaaaataaaacatttctaaaaataaaacaaaatcaaagagtagacaggaagtcctgaattccatccaccttagatctgataccacatacaaaatcaagctaggctgtgctcgtgtttcccagtggtaaagcagctcatgcagttctaaggctaccaagttacttatgggataggattctcccagcctccaagacaaatgacagagcttcctatctactgtttcccaggctctgatgttcaggtggcctggattgctgggtaaaacagactgttttaataatcagtgggctttcttagactccgacttagagcctgaatttaaattcctaatctaatttaaatactaccaataagtagcatttacacacatttgcttttaagcccatacactaattctgatgtgcactgaaagcatgatatgcttagttacttctgattttgaaaattaatttgaagtttaaagtatttttattagtttttgaaactaatattagacaataaccagcaaatgatatgattccattccattatacacaaaaccaaccaactacaccaaaaaagacaaaaacaaaaccaacaaacatagccctttcttgtttaactgcattttgttcaatgttttaagctctagaaggggaatctttgagttaatcaggtaggaccctcattttgcaaatgagagacatgaggcacaagtaggtcaatgacttattgaggtacttggagagcgaggcagtgtcctctgcccatcgcagctggccaggccttgcaggaggagacacacccaaaagaaatgtagaggccagttctaccacattcatttcacgccctggggctcgcacccttaaaaagcattcattgcagaacagagaagtacattttgaacaggagtagagtagttaaacatgtaccaatgtgcacattaaaaagcaaaataaaatgcagcattgtcagagtcctcatggaaactagaactctctttaaccaaaactactttttagtcattcagtatcacatatcttttatgttgcttacggtaaacgtcaggtaaatcatgatatttatgctttaattttatttaccaaaaatatttttttccttatgggatttaaaagcacatattcttagcttgtgcacagtagctcatgcctgtaatcccagaactttgggagacagagctgggaggatcacttgaacccaggagttcaagatagcctgggcaacatagggaaaccccatatctacacaaaatttttaaaataaattagctgggtgtggtggcatgcacctgtagtgccagctactcgagagactaaagtggaagaatcactggagcccaggaattcaaggctgcaccgagtcatgatcttgccactgtactccagcctgggtgacagagcgagactccgtctcaaaaaaaaaaaaaaaaaaaaaaaagcagctaggcgtggtggctcatgctggttatcccagcactttgggaggccgaggctagtggattgcttgagctcagatgttcaagacaagcctgggcaacatggtgaaaccccatctctacaaaaaaaaaaaaaaaaattagctgggcgcctgtaatcccagctacttgggaggctgaggcaggaggatcacttaagcccaggaagtggaggctgcagtgatccaaagttgtgccactgcactccagcgtgggtgacagagccagaccttgtctcaaaaaaaaaaaaaaaaaaaaaaaaaaaaaagaaaagaaaagaaaaaaagcatatgttcttagaatacataaaaataatttgccaggcatttttttctcctacaaatattatttttactaataacaaaagcccagatcacattcttctgaaatcaaagtttccatgataaaagccttgacattccaagtttttgtcttttcagtgtcagctaacacagtttgaattttttgtttttttttcctacacttgtatcatagtttaaggtcatactaaatgttcacagaaaattaatgacttatgcatcaaacatctcaatttaatcaggcttctattagaaagcaatctcttgcattacatataaaaatgagagcagagatactagttagagagcagcctattgcacaaggcagaaagtgattttgcttgtcgtatagcagaagttctattaggcaatgtcataactccaaataataccaaatacccctaatacttaaaattttcaaactcaaagagctgtttatgttaataggtccaacagggtgagtatatttattgtaattcagctttttttttttttgcaatattttatcactaatttcagcgagcagaagaccttcagaatcaagtacacatctgatccacatataactaaatacccaaagatcagccaagtgggtagaaagagtgacaacaacaaaaacttgtttatcctgccgggcatggtggtgcaagcttgtagtcccagcaattcaggaggctgaggaaggaggatcgcttgggcccaggagtttgaagttgcaatgagctacaattgcaccactgcactccagcctgggtgacagattgagaccctgtctcaaaaagaaaaaccttgtttttcccactgccctcagtgaaacacacatctgatgggttgtttcaacaataggttctgctaaaccattttaaaaaaaaaaattcataacccgaaacaccttgataagaacaaaggttcccagtcttagaaacagtagaatacctttaggacttcatttttagatacattttcttttctttcttttttttttttgagacagagtcttgctctgttgcccaggctggagtgcagtggcacaatcttgctcattgcaacctccacctcctgcattcaagcgactctcttgccttaacctcctgagtagctgggactataggcatgtgccaccatgcccggctaatttttatattttttagtagagatcgggtttcgctatgttggccaggctggtctcgaactcctggcctcaggtgatccacctgcctcagcttcccaaagtgctgggattacaggcttgagccactgtgctggcctaggtatattttccaacacagggtaatgaaatgtcccagccttctcttgccagagatgagactctggggaaggtaacgagagagtccatatgtgggaggagtggcttaaaaacgttctatgtcattttcaaaggcactctgggcaaccaggtgcaaaagaatttgaagtggcccctattcagattcacccacactgggtgaagcaagaggttcttgttattagtaattgtcagctaagcatggtggttcacgcctataaatctcagggttttgggaggctgaagtgggaggactgcttgagcccaggtgtttgagaccagcctgggcaacatagtgaaggctccatttgtacaagaactaaaaaataaaaatattttaaaaatttgcagggtgtgatggtgcacgcctgtagtcccagacaggaggctgagacaggaggatctctcaagcgcaagagtttgaggcttcagtgagctatgattgtgacactgtactctagccccggtaacatagagacccagtatcttaaaaaaaaaaaaaaaaaaaaaaagtaattgcaaaacatttaatcagcttaagaccttgtgggtcttttaaaagcatgatcacagacacaaacacagatcctacatttgccctatctgagctgctggaatctcttggtcctcctgaggaatagtggggggttggggggagagtgaatcttaagtctgggtgtcctgacagcatcccttctgctatccacctctgccccttggtcctccaagcggcccatgtgaaaaatggccaattcctttcccctggtcacccctgttctcacttctggggtaaaaaagaattaaaaaaaaaatccttgtcagttttcagccaaagtctctggaatttattgcaaattacctttagaaagttaaatgtggcctggcgaggtggctcacgcctgtaatcccagcactttgggaggctgacgtgggcagatcacctgagttcaggagttcaagaccagcctggccaacatagtgaaaccccatctctaccaaaaatacaaaaattagccgggcatggtggcaatcgcctgtaatcccagctactcgggaggctgaggcaggagaactgcttgaacccaggaggcagaggttgcagtgagcccagatcacgccactgcactccagtctgggcaacaagagtaaaattccatctcaaaaaaaaaaaaaaaaaagaaaaagaaaagaaagttaaatgcatctgtttttacagcctaacttacccaagaatgggacagagctctctctggaccacaggcaggatttggcagcactgctcaggcagatgtcatcctgggaccaaggaccaagcattttcttacttgttgatcaaaagaattaaaggccacttaacattctgtcatttacacctgtgtggctactcaagaatatagattttattttgcagtgaaattatagaaaaaaataaagaatattgattttagactgagcatagtagcttatgcctgtagtcccagtactttgggaggcctaggtgggaggaccacttgaggccaggagtttgagaccagcctgggcaacatagcccaactctgtctctacaaaaaattagttgagtgccgtgatgcacacctttagtcccagctacttgggagggtgaggtgggaggagagcttgagcccaggagttcaaggctgtggtttgctgattgcgcccctgcactccagcctgggcgacaccacaagatcctatctctaaagaaaaataaaaataaataaataaattaactgccttaaaaacattagccaggtgcggtggcacacacctgtagttccagctactcaggaggctgaagtaggaggatagtttgagcccgagatttggaggctgcagtgagccacaatcacaccattgcactccagcctgggtgacagagggagaccctgtctcaaaaaagaaaaaagtggggggggggggaagactatcaacttcagaagtagatgaaatatatatttagtaatctaagtatctacataaagatactatgtttgactcattggcaggtatgagttcatggcccagcgttctttattaaaataacagctttcatagtacacgctgtggttacgtcatttttctttcagaggattattaccttttaaaagcttcttaaatcccaagttaaagctgttacattctaacccagtctcagagctgattggctcaaaacctctgtgggccagtaatgccacattaccccggaggggcgggcagcgcgggggtcagggagctgccaaagccagccctcctactggccagcacgcacattccaggggataaataggattaagtgctctaaagaggattcccagccctcctgcaaaggaggttcaaacactctggtctagttctgaacaaaaataagccccagagaaggagaaagtgcctgtttaaacaccaggtggccctaccccaagcctctgctcttcctcttacccccatctccgggtggctggggagagcccttttccgcaggcaagtgtgcgcactggatccaagtccgtgagagtaggttcaacccaccctctttggtttcctaaatagggtcagcccctgagcggcagtgggaggtcatgacctcaaatctcttctagctgctcttggggacgaatggataaactctgctaggaagggctgtagcgcgtcttagagaaagccctttgtatgaactgctctcaggacactctcctaaatttaggccctgaaagattaaggtaataaaagctgctgacatttgattgcaatttttcttgtccgggaaacagaccaaccacatagaaccaaacagcgtccctctccaaacttcactccaccccacccaccttttcaaactgtcccacgcagaaagggggcgacgctggcaggggtgggcaccgaactcggactccctgtaaagacgccccaacagcacatgtgttaactcattaactcggagggatctagggtcactgtgacggttttctattaatagggaataaagctcctgcagacgttagcggtaatgccctgacggccggcgcaaagttaacttctcccgggccagcaagaggaaaccgtgtcctgcccaggcagatgtgcactggaaacgcgcgtgtacccatgcacacacggggttttaggaccactccccttgcacaggccagaccccacacccatcccgagtcttttctcaggggagggagcggcagcagcaggcggccgtcgggtgtctgtcagctcagcttcgccacgcacacggctagggccacagccgccagcagcacggcgccgaaaaggatggcggccagggccttcctggggtcgcaaccccccccgcgctcctgcaaggacacgaccgaggaggggccggcgctgaccgtggacaggagctcggcgcccgccgcctgccgggcttgcacggtccagcggggcacgttgaccttcatctccatgttgtcgatcatctcgcccacctgaaggacctcgcgctccagctcccgcaggtccgcgacgtcgaagtcgccctccgcctcgagccgcaggctgcgggtgctcagcgcgcgcgccgccacgccggaggaggcgccagccacacctgtgcgcaccagcggccgccgcggcgcgtgcagcgggaacgcggcgcccagctccagcgcgcgtcgcatgtccgcttccagcaggtccaggcagcccgagaaggccacccagagccgctcgaactcggcgcgctcgtcggcggccaggccccggtcgcgcagcacagcagtcagccgggcgcaggtggacaccgccagctcctgcgccttctggcgcgtcttttgcagctcctgccgcaggttctgcgagtccgccgagccaccgacggtcagcaccaggtggtggtagcacgcagtcgtcttgttgagcccgtccagcagcgccttgcactcctccctcgccatcgcggtgggctccggctgggcccggccgcccgcgcccgttagcctccccctcagcgcggcaggatgtggctaacccccatcccggccttgggccgcgcggcacgaacgctcttcatggtccgtgactcgctcggcgctaccgccaacgtccacggagcccgcccgggaccctcgacgtgcgcctctgcggacggggcgcgcagagggagccccgttagcggtcccccgctccctcgtccatcctccccaggcgcactccgagtcacacgtcgtgtctctgcaccgccctggcctccacggtggctccctgcgaagctgagggtgcggtccccatcctccgtgggtgccaactccggggcaagcaggctgcagagccgcgcgctccgccttaggcgctgccaagggcggccgggtagggtttcctaggacccgcccaccccgctcgtcccggccggagctgccaccccctggatcagtggtaggcggggctccacgcggggaggtcacgtgtgggtggcccatccctccctccccttcgccccatccgagttctggaatgttagcgctcgggagatccaacccgttctattttacggatggggaaactgaggcccaggtaaaaagcgggccaggctcccgcggagtttttgcctgtgatgggactagaacccagctatactgactcccggaccctgtcggcgacaggacgtcgggtgccccgcaggactgggcacctccgtgccccaaagcgagcagtgactggcaatccgaggggctgggcgccgccggggtcaggtgtccctgccgcgttgcgctcacgttggtcggtgcttccaagcgctaaccccacctctagtgtcagcccggctcccagccccgcccctcacgttctgggcacgcgcagttgcgggcgtggggcggggccagctggagtaggaagcgtagggagccgcctgagccccgcccccggctgggctggactccatgattgctctgcgtacacgtcactctgggaaacgacggtttctcattgggtcagctgtggcgcggctccgccccacggcggagtaaggggtgggctatagggccagatcgccgcgcgagggtggtgggcatcgaggtcccagcagcggacgagggaggtgccgccgtcgcccaggatgggctgggaatgaagcgatgtagccttttaagtaagtgtcctcgcgctggcctcctcctgcgcctcccctcccgcgggatggctgcgcctcggggcgcggcggccgggcggggcccggagagtgaggggggaggggctccctgctctccggagtccgctcccgggtccgccaggtggccccgcgccgccccagcccccgcgtccccaggtgggtgcccggtgcgcagccggcgcgccctgcccactccgcccctcgggtctggaggaggggagcggtcggcgcggagaatgcaccctccgagcctcgctgcgtcgacaccggcgggtgtggccggggtgccgggtccggcggttcggatctggcggggcgcggggcggtcgccgcgcggtttcccggaggcctagggtctgctggaggggagcggcgggtgggggtccgagccgcgcgcgcagcggttgtggtttccggggggtgatgagggcgcggagcggggaatccctggctgccggcctctcgcagggcggggggtctctgcattcccacaggtaaagattgttaaaggaaaactcttaagcaccgagagatgttccggattctgagtctgttccgtcttgtggttgaaaatggactgcccaggagcacacgagccacgcggtgcccccttggctgccccacgaggtgcaggggacgtgggcactcgcggcctgtgctgggcgagggagcaagggacgggtcttcgctgaggatttagagcatgcagggaacgagggctgctggcagtgctggagggactgtgaggctgcagagagctcagattttacaagttgatgggtttcatggatagaggcccctattttgattaaaaaatgcactcttcccactggccgaagagtagagcagtggatattttttttcttttctttcttttcgtttttttctttttgagacagggtctggctctgttggctagtctggagtgcagtgatgccatcatagctcattgcagcctcaaactcctggactcaagcaatcctttcacctcagcctctgtagtagctgggactacaggcgcatgccagtatgcacggctaatttttaaatttttttttttttttttgtagagatggagtctagcaggttgcctagactggtcttgaactcctggactcaagccatgctctcgtcttggcctcccaaggtgttgggattacaggcactagccaccacgttttgctgagcagtagctattacgtttcgagatcagcctggcatgaggactggtgttgaggtggcctaagggtccggtgtgctgagccccggggcctgctgtcacccaggggtccgtcctttaactgggtgagcagtaggctgggtgtttgctgccagggcttgggtactcctggccttgaccattgtgtggaaggggggttctcagccacccacacgctacatagggtcgttcccagggggatagtagttttcaggacaaaatgggtggaaagagggaaaatactctttcccttcgggggaagctttggagacagcagagggtgaggaagctgcaaaggtggccagaggccagatgtgccaggtcctgagcacctagcagagaagttgagggctcacctggtggggagtgcaggggaatcctttgaggaatcctgcagagctcggcgctggaaagatcgctttgttgtgttgctggtggacaggcgtgagtgaaatccagggggcagatccaggaggcacagcccgtaggccttggaaggaggggatgcaggatgggagcaggagcagagacttcttctgaccagccatagggacaggaatgcacctggggatctgacattggatagacttacattcccaagttacacccagtcttgcctggtgacctgaaataatcttggccggcagcttccctgggagggcaggcagaggtgtctgcagagggccgggggttagggtctccgttgtgcctctttgtgactgttagactgtgtctccctcaccaagacagctgctgggtctttgttagtgatgtttctgtgtcccagttaaggtttctgtggcatctgccctgctggggctcttcctgtctgtcatttgccagcattaggttggtgtccaatgactccatcctctcatagaggagtggaggaatgtgaccatgtcatgataggtaccaatcctagaaaggattcagcccagaaggatccagacttgatttgtcctgaggttgattctccatctgaggaacactgagaagcggccctagagctcctgcccatctgcccaagatactggtggagggtgcatggtggttcttctccctgtggtccgggaacagggtgatgcggtggcattcggaggggctgttgtgctcctccaaactttcccgctccctgcatggtcccgccctggttccagtcctggcttctctctagccctgcccattccagctatcactgtgttgggctggcactgagcatcctgattgttttgggctttttgcctttgtgcttgcttggctatgacctggggttagcccctcacctaccctggatatggacagtggagttccagctcttgtgagagatgacctctccctgggagctggggcttcctcttaatgccccactatcgttttgttcaagtgggtgagcagttactccatctctgcagggaaccaggcgcagggctgggtgctttaatgagaagctttgagaagaatatggacagggtctctaaatgttataggtcaggaggacacaagtgactgtaacagcatacatacatcaccacattgcttccattggtgtgaaaaatagatgaatagaaagttttcgtttttcgccttttccttctgaatcataaattagaccaaatggagaatactgctcatctgttgggaagcgttcctggtcagagtgtttggtcagagccccggaagggcgggaacagccatcgcagtgagatttcagcagggagtgcatctctaaggaggctgaattcccccatgctgaattctgctgagctgggctgcacgctgtcaccagacggttcttgaccacccagacttatctgggctagcaggacggttgaagaccacaaaaccacgagtgtgcacgctgctccctgaaatactagtttgaggcctcacatggctctcctgttcatagaataactgcagataactcacatttagaggtatttggtatctccagctaactcaactggattttctgtacattttcccatcatttgagcccaggcagggatggaattttttaaaagaagttttataagaagattcacttatctttccagttttacaagaaaaagtccattttctttgcatgttattttaaaatagcaaactaattcttttgtttgttttgtttttgagataggtctcactctgttgcccaggctggagtgcagtggcccgatctcggctcactgcaacctccacctcccaggttcaagagattctcgtgcctcagcctcccaagtagctgggattataggtgtgggccaccacaaccagctaattgtatttttagtagagacggggttttaccatgttggccaggctggtctgaaactcctgacctccagtgatccacccgctttggcctcccaaaatgctgggattacaggtgtgagccactgtgcccagccagcaaactaattcttgcaggtaaacttgacagggtataaaactgtttttttaagcatttacccttatgtaagaattcaactctggcattaagcaccagatcatatgagattattacttttttttttttggagacagggtcttcctctgtcgcctaggctagagtgcagtggtgcagtcataactcattgcagccttgacctcttgggctcaagtgatcctctggcctcagcctcccctggctgggtgtgtgccaccatacccatagataattttttgattttcctgtagagacagggtctcactttgttgctcaggctggtcttgaactcctgggctcaatcatctgtcagcctcagcctcccaaagtgctgagattacaggtgtgagccactgcacctggcatattacagatttttttttgtcattttttgaaatggagtctcactccgttacacagactggagtgcaatggtgtgatcttggctcactgcaacctctgcttcccaggttcaagtgattcttctgcctcagcctccctagtggctgggattataggtgcccatgcctggctaatttttgtatttttagtagagacagggtttcaccatgttggccaggctggtcttgaactccatctcaagtgatcagcccgcctcggccttccaaagtgctgggattacaggtgttagccactgtgcctggcccttttttaaattttaatttacattttttattttttattgagacagagtccccctctgttgcccaggctggagtgcagtgtcatgatcttggctcactgcaacctccgcctcctgggttgaagtgattcttatgcttcagcttcctgagtacctgggattacagggatttgccaccatgcccggctaatttttgtatttttagtagagacagggttttgccatgttggccaggctggtctcaaactcctgacctcaggtgatccgcccgcctcggcctcccaagccactgcaccctgcatgttacgtatttttaacactaggacagaaaggttgagaacagtgttggacagaggtcctttttcttctttttttttcatgtgacagcacggatgaaaggacagagctctttgaatccctactcctggacagaggattcagtctttagtgaccaagaagactgaggtccaagataaagcagatgacttggggctagataacagcaggccctgtccgcgcagcagtgcttgttaagggcgtggtgtgtttacacagttcttgcatgtgacctgcatgttttgatgtggcactcagtgaccttcctgtctcttgctgttctgcccctttctggcctctgcttggagtcttactactttcccatcctctacttcatccccttccctgccgtttttttcattttctttcttttttttttttttgtgacgggatctcagcctgtcactcaggctggagtgcagtggcgccatctcggctcgctgcaacctccacttcttaggttcaagcaattcttctgcctcagcctccaagtagctgggactacaggtgcccatcaccacgcccagctaatttttgtatttttagcagagacggggtttcaccattttggccagggtggtcttgaactcctgacttcaggtgatccactgccttggcctcccaaagtgttcagattataggtgtgagccaccacgcccgaccactgctgttttcttctgtctctggtccttacctcccagctctgtttttagttcgtccatggaagcctgtccttgttgcctcatcttgcggggtggaagtattggtgttcctccagcatcttttctgaagcagaaggagcgccttttcccagcttgagtctgaccatattgcatcctgtttctcacatggctttcatccagagcatctttacttttgcaatgtgccacatagaaccaactatgtcaggaactagaaagagttttgtgttcttgtgactctgtcccagcaaaattgcattatctcattgtggtggagactcataaaaggattatctgggctccagtaataagtgaatttaatgattcaaatagctgagttattgcagaggcacccctggggcccaggcagggattatatgcgaccatttttatgttagtctcttctccctaggaggactggcggagagctcacaggcctttttcaagcagaacccagggcacctgcagccaagacagttctggctggacctggggaattagttgaggggcctgtgtggctgtctgtcttgtggacttttcttctgttgaaataaaatatgactcttaggctgggcatggttgctcacgctgtaatcccagcgctgtgagaggctgaggcgggaggattacttgaggccaggagtatgagaccagcctgggccacatagcgagacaccatctctactaaatgaatgaatgaatgaatggctcttatttatccttgagtcagccagctgcatctcagtttcttcatctgtgacacaggctagtgatacctacttgcctagagttattgtgagcattaagataggatgagtgctgggtgcagtggctcacacttataatcccagcacttagggggagctgaggcaggaggatcacttgggcaatgtagcgagaccccatctgtactgaaaattaaaaaattagctgggcacggtggctcacgcctgtaatctcagcaccctggagtccgagacaggaggattgcttaagtaacttagtgagaccccatctctacaaagaataaaaaaaaaattagctaggcatggtggctcatgcctgtagtcccaactacttgggaggctgaggcaggaggatcacttcagcccaggaggtcaaggctgtagtgagctgtgattgtaccagtgtactccagtgtgagtgatagagcaagacccgtctcaaaaaaaaaaaaaaagatgaagataagactgggcacagtggcttatgccttgtaaccccagcacattgggaggccagggcaggaggctcacttgaggtcaggagtttgagaccagcctgggcaacatagtgagacactgtttctaccaaaaacaaaacaaaacaaaaaatttaggcttggccaggtggctcatacccgtaattgtggcactttaggaggctaaggtgggaggattgcttgaggccaggagtttgagggtgcagtgagctatgattgtgtcactgtactccagcctggtcagtagagtgagaccccaactcataaataaatgaaggtaagtaagtaaagatgaggatgtatagaagttattgcagtgcctggtacaaggactctcccaaatggtggctatttttaccattagttccaaggaatagaattcatcatgcagttatgtatgcatagtgttttcccaaggaagcattctggatccctgttacatagtgagagagtagctcctatttcatatttcattcatttaattgtatcaaggataaattcacttttacgctttttaaatagttgctgattttctcattttaatgaagagagaaggccccaggctcaagcttagcatctaatgacttttttttttttttttgagacggagtttcactcttgtcgcccaggctggagtgcaatggcatgatctcggcttactgcaacctccatctcctggattcaagcgattctcctgcttcagcctcctgagtagctgagattacaagtgtgtgccaccacgcccggctaatttttgtatttttaatagagatggggtttcaccacgttggccaggctggatccgcccacctcggcctccgaaagtgctgggattatgaggttttaaataacagtaattacctttataatttttaactttaagatgatcttctcttcgttggaagtgataccatttttctatttaaagtagtaataagatttctttttaaaataaattttaggccaaggatggtggcatatgcctgttgagccaggagttcaagaccaccctgggcaacacagcgagactccatttctacaaaagtaaacaaaaataaaacagaaaggaaaatacatttttataaagacaataagttattgaaggaaaatgtcaaacactagcaagagagccattatgtgtaattgttgggcaaaattgtgctcacattgtgggcaggttgttcactgcccagcagcaggggccgtgcagcatgttacctaggagctgctcactagcctagtgcccttgcacagggctgcgccccctgggaagtcgggtgcctgtttctaattctcacaaaggtcccatgtgagcttgcagtaactggtgctatgttgatatgcagtactgcatgtcacagatagtgaaggtggcatggaaatgaccctcataagagtcctgcagacaggtattagcattctctgtggtgcaggcccagatggaggctcagagaggtgggatgacgtggttagaaatctgatctcctggctgggcatggtggctcacgcctgtaatcccagcactttgggaggccgaggtgggcggatcacttgaggtcaggagtttgagaccagcgtggccatcatgatgaaaccccgtctctactaaaaataaaaaaattagccgggagtggtagtgcacacctgtaatcccagctacgagggaggctgaggcagcaggagaattacttgatcacaggggtggaggttgcagtgagccgagattgcaccactgcactccagcctgggcaacagagtgagactctgtctcaaaaaaaaaaaaaaaaaaaaagaaatctgatttccttttctgtgcccattttgtaggcaccccctctgagagctcattggctcagaggagcagaccaggggtgatgaggagcagctatagaatgtttcatgaaacacacaaagcactggttcacattagttagcagcatggagcagtctgcagacagcaacatccttcaaacagcttacttcctaaagtgagttgaacactgacctgtaatcttcttttggccgttcacagacctttcagtcatgaatcatggaagggtcttctctggcttcagaagtcccagttctgatggtagtggtaggtgtgttccatactgattcttattttatctgtacagcgtgactctgatgtaagtccatttggcttttgcttttagaaccttacctaaaataagcaatctaattttagcaacccctttcacaacagcagcaaagtccatacagaatatataaatagtctaataaaagtcgtatacgatccttatggaaaagtcggaggacatcgaagaagacattcatggaaagatataccatatatgtggatgataaaattcataattatagggctgagtgtggtggctcacgcctgtaatcccagcagtttgggaggccgaggtaggaagatcacttgaagccaggagttcaagaccagcctggccaacatggcgaaaccccgtctctaccaaaaaatacacacaaaaagttagctggtgttgtggcatgtagtctgtagtctgagctacttgggaggccgaggtacgagaattgcttgaacccaggaagcagaggttgcagtgagccaatattgcgccactgtactccagcctgggcagcagagcaagacctctgtctcgaaaaacaaaaaaaacggcaggctgggcgcggtggctcatgcctgtaatcccagcactttgtgaggccaaggcgggcggatcacaaggtcaggagatcgagaccatcctggctaacacagcgaaaccccgtctctactaaaaatacaaaaaattagctgggcatggtggtgggcgcctgtagtcccagctacttgagaggctgaggcaggagaatggcgtgaaccctggaggcagagcttgctgtgagtcaagatcatgccactgtactccagcctgggtgacagagcaagactctgtctcaaacaaacaaaaaaaaaaaattagcctggtgtggtggcgggtgcctgtaatcccagctacttgggaggctgaggcaggagaattgcttgaacccgggaggcaaaggttgcagtgagctgagattgtgccactgcactttagtgtgggtgagagagcgagactctgtctcaaaaaaaaaaaaaaaaattcatgaatttagtgcgggtccaataaaaatcctaataggatttttcatgtaattgacaaggtgattctgattcatttgatattgtaaaggacaaggaataacctttggagaacaagctggaggggagcttttctctgtgagttagtaaggcttattatgaagctgtagtcatgtaaaataaatgttcatatgtggtctctccctgccctgtccagtgtaatagctgctagtggctattgagcacatgaaatgtggctagtatgaatcgagaagtgctgtaaatgtaaaatgaacactagattttaaagacttaagaataaaaaagaatgtaaaatatatcattaataacagtttttttttttttttttttttgagacagagtctcactctgtcacccaggctgctgtgcagtggtgcaatctcagctcactggagtctctgcctcctgggctcaagcgattctcctgcctcatcctcccgagtagcctggctaatttttgtattttgtaaagatggggttgcccaggcttttctcgaactcgtggactcaagcagtccacctgctttgaccttccaaagtggtgggattacaggcatgagccactgtgcccggccatcatgaagaactttttattattattattattattattattattattattattattattatttggggatggagtcttgctctgttgcccaggctggagtgcagtggcacaatctcggctcactgcaaccactgcctcctgggttcaagcagttctgcctcagcctcccaagtagctggaattacagtcacctgccatcatacctggctaatttttgtatttttatagagacggggtttcatgatgttggccagggtcttgaactcctgacctcaggtgatccacccacctcagcctcccagagtgctgggattacaggtgtgagccactgtgcccagccaataacttttaaataatgatcaagtcaagtgcagtgacatatacctgtggtcccagctatttgggaggctgaaatgggaggactgcttgaggctgggagttcagggctgtggtgagctgagattgtgcctgtgaatagccactgcaacatagcaagaccccgtctctaaaaaacaaaataaataatggtcacatgttgaaaatatcatattttggatatattaagataaaatatatcattaaaattaattgcaccctatttcttttttttttttttttttttttgagacagagtctcgctctgtcgcccaggctgcagtgcagtggcgggatctcggctcactgcaagctccacctcccgggttcacgccattctcctgcctcagcctcccaagtagctgggactacaggcgcccgccactacgcccggctaattttttgtatttttagtagagacggggtttcaccgttttagccgggatggtctcgatctcctgacctcgtgatccgcccgcctcggcctcccaaagtgctgggattacaggcgtgagccaccgcacccggccccctatttcttttttaatgtgctactagaaaatttaaaatgacattgtgtatttctatgtaatatatacataattgtatttctcacatgtgacagtaagacccttgaaacagagtagagcctggaaacaggctaaacatacgtgggatcttggagtgtgacagccgtagcattatcaacctgtgtgaaatggatagaatattcaaaaaatgatgatgggacgattggcttactatatggagaaatataattagacacttgatttatagcatgtacaaaaatccagatggattgaagacctaaaaatagaaaactttactctttttagaaatcataaggactatctttatggctttgaaattggaaaggacgtggtttcaggtagcctttgctgtgtaacaaacccacccaaaatgtagtgacttcaaactgccacaatttattacttcctacgttgtgtgagttgggtgggtggttcctctactggtctcagctgggatccctcaaggggctgtattctgctggtgggttggctgtgcttgctgggccacctaggcctcgctctccccccatggcctttcatcatgtgggcttcttcatagcattgggatcttggggtaccaagagaatgagaatggaatccgcaagcccttttataagtgtgtatgtatgtatatacatttacttttcttatttcttgaatgtactaagactttttgttttgttttgtttttgagacagaatctcactctgtcacccaggctggagtgaagtggcgtgatctcggctcactgcaacctctgcctcctgggttcaagtgattctcctgcctcagcctcccaagtagctgggattacaggcacatgccatcacgcctggctaatttttgtattttagtagagacggggtttcaccatgttgtccaggctggtctcaaactcctgacctcaagtgacccacccgcctaggcctcccaaagtgttgagattagaggcgtgagccaccgtgcctggcctttttttttgttttttaaagagatggggtctcactctgttgcctaggctggagtgcagtgtttcaatcatagttcattgcagcctcaaactcctgggctcaagcgatcctcccatgtcagcctcccgagtagttgggactgcaggcatgtgccagcacacctggataatttttgtattttattatttgtagagacaaggtcttgctattttgcccaggctagtcttgaactcctggcctgaagtgatcctcctgccttggcctcccaaagtgctgggattacaggagtgagccattgtgcccagcccctgtaagacctcttgaagctgacactcacaaattgtacagcatcgattctgcctgttggttgaagcaagtcacagggctggctctgattcaggggctgcggaaatgagtctacttccttttttttttttttttttttttttttggagactgagtctttctcttttgcccaagctggagtgcagtggcaggatctggggtcactgcaatctctgcctcctgagttcaagcgattctttgcctcagcctcccaggcagctgggataacaggcacatgccaccacaccccactaatttttgtatttttgtagagatggggttttgccatattggtcaggctgatctcgaactcctgacctcaagtgttctgcccgcctcggccttccaaagtgctgggattataggcgtgagccaccgtgcctggcctactctatcttctgatgggggaatagtgaagtcactttgcaaaaagacctgccagaggataggcatgccaattacagatttcttaaggctcaaaaagcactgaccttaaaagcaaagagtggcaaatccaattattgttgacccttgaacaatatgggtttgaactgtgtgggtccacttatatgtgtttttttcaaccaaattcaggttgaaaataccatattcacaggttgcaaatttctgtatatggagggctgacacagacatgtgagttccacagggccgaccatgggatttgagtatgtatggacttgggtatacaagaggatcccagaaccaatcccccaagtatactgagggatgacggtccattcacatcaaaacttctggccaggcacagtgactcatgcctgcaatcccagcgttttgggaggctgaggtgggaggattgcatcaggccaggagttcaagttcagcgtgggcaacacagcaaaatctcatctctacaaaaagtaaaaaataaaaaaaaggttgggcgtggtggtgcatgcctgcagtcccagctgctctggaggctgaggtgggaggtgggagatcacttgagcccaggagttcaaggttacggtgagctacgatcatgccattggactccagctctagcctgggcgacagtgtgaaaccctgtctcaaaataaataacatccaaagttctatttctgaacacacccatttgacaaaatgaaaaagcaagttacagactaggagatggtgtgagtatatgtgggtgtgtgtgtgtgtgtgtgtgtgtataatttttttttttttttttagacagcatcttgcaccatcacacagggtggagtgcagtggcgtgatcatggctcatagcggccttaacctcctgggctcaagtgattctcctgccccagcctccttagtacctgggactataggcatgggctgccacacatggctaatttttaaaactttttttgtagagatggggtctcgctatgttgcctgggctggtcttgacctcttgacctcaagtgatcctcctacctcatcctccccaggtgctgtgattacagccagcctgggagatgatatttaaaacttactttagtatacaaatgtgtaaagaactataaatcctaagaaaaaggccaacaacccagcgggaaagtgagcaaaagacatgatcaggcagtttacataaccgaaagaaatttagttcatttaattaatgaaccaatgaaaatgaaaaacagtgggatatggctttataccatagactatctcagcccatgcaggctgctgtaatagaaggcttgaaaatgacagaaatgtgtttctcacagttctggaggctgggaagtacaaggtgaagatcctgcaggttggatgtctggggagggcctgcttcataaacagctgtctgttctctgtaacctcacgtggccggaggagcaaaggagctctcccaggcctctttctttttcttttttttgaaacggagtctcgctttatcacccaggctggagtgcggtggcgtgatctctgctcactgcaacctctgcctcctgggcagtcccaagctgggactataggcatgcaccaccacacccagctaatttttgtattttcagtagagacggggtttcaccgtgttgaccaggctggtcttgaactcctgacctcaggtgatcctcccgacttggcctcccaaagggaggattacaggcatgagccactgtgcccggctgcataattatgggcactgatctcattcatgaaggctctgcctttgtaacctaatcacccccaaaggccccgcctagcgggttagtattttaacatatgagtttttgggggacataaacatttagaccatagcacagactaacagaaattttattattttaatttttgaggagatagtgttttgctatattgtccaggctggtctccaactcctggtcttaagcggatcctcctgccttagcctcccgagtggctgggactacgggcacatgccaccatacccagataattgttaatttttgtagaggtagataattgtttatttttattgtttatttttgtagataattggttttttttgtagataaattgtttatttttgtagaagtgagggttttgctgtattgcccagtctggtcttgaactcctgggctcacaggatcctcctacctcaggctcccaaagtgctgggatgacaggcatgaaccaccacacctggcttccactttatttcttaaaagaaaatctgaggcaaacatggcaaaatgtgacgattccttaattctggtgctaggtttgcattattactcagtacttttccatgtgctaaaatatttcattaaaaataaatgagtatcttgagaatgtcataattttggtcatgtaggatattctaaaaatagccatttatactttagccaagacttggagtttaacaagattttctgagcataatttacacgttagccaataaacgggtcatcttggaattagtgggttgtatttgagatttcctggtggagtgagtctgtgggagaaaaaaatggcacgtcatgaatccttttttatttggaggatactctttagaaattgccagatgcaggtcgggtgtgacagctcatgcctgtaatcccagcactttgggaggctgaggcgggcagatcacctgctggtcaggagttcaagaccagcctggccaacatggcaaaaccctgtctttactaaaaatacaaaaattcgcgggtgtggtggtgggcgcctgtagtcccagctactcccgaggctgagccgcgctccagcctgggcgacagagtgagactctgtctcaaaaaaaaaaaaaaaaaaaaaagaaaatgccagatgcatcagatgcagactttcatgtgttacgtaaactcgaaaatggctattcactgcttttccctcccttattgcaggagatttgctctgacccatctgaagtccatatggctctgtatgatgaagacctcctgaaaaatcctttctatctggctctgcaaaagtgccgccctgacttgtgcagcaaagtggcccaaatccatggcattgtaagtgcactgagcctcggggttgtcctgaggcatgaatggttccagagatgtggtagactaaggctcagtttggagggagtttgttataaactcagcttaacaagctcccagcagtgtgcttggtctgtgagtgagcagcgaggggcccccatgagccgctccctccaggaagccttctgggactgcagtccaggctgtaatactttctctgaactcctggcccccgcctgtggctaactgtgccctttcgtggagcacccccagtgacacttggtctcacgctgcggtgctctcgtttctctcttgcctatggaggcttctccagggctaaaatgagttgtgctccctggggccttacgagtcctggtctgtctgggaggtgggtgctcaccctcatagaataagggaccgagtaaacacattcatacactgctttgaaaggtttttccaaagggaaagcaccatgatgaaagaacttttctggtagaggccacaacctcagaagccttcaggggcagccaggtaacaggaatgagaagcaggcaggagacgctgtcgcctgtcatggtgggggcatctgcctggacgggggcgggccccgcattgtgggtctttccagttctcaggtcagtgaacttggcgggcatcctacttagacggcactgggggacacagtgtcccgggtgcatttgtgtcatctgtggcctctgcttcaggagtcttccgtcttctttttgtctgttgtcccctactctctcaaatggatgtccacttctcttatcccgtggggcgactttacttagatatgtgaggtgcctgagggtttgaactgaaggagaagtcaggttagctgagtgtggcttcaggttctcagcggcctctcggacgccggaattgactttcatttatttttatttttatttattaaatttttttgagacagagtcttgctctgtcacccaggttggagtgtggtggcgtgatctcagctcacagcaacctctgtctcccaggttcaagcgattctcctgcctcggcctcccaagtatctgggattgcaggtgtgtgcaaccacgtccagctaatttttgtgtttttactagagatggagtttcacccatgttggccaggctggtcccgaactcccggcctcaggtgatctgcccacctcggcctcccaaagtgctgggattacaggcgtgagccactgtgtctggcctggacttgactttgattttgcccaggccaagctctgccatcagaaactgggtttcttttttttttttttgagacagagtctcactctgttgctcaggctggagtgcagtggcgcaatctcgactctctgcaacctctgcctcccgggttcaagtgatttgcctcggcctcctgagtagccgggattacaggcacaaaccaccatgcctggctaattttttttttttttttgagacagagccttgctctgtcacccaggctagagtgcagtggcgcaatctcgactcactgcaacctccacctccggggttcaagcgattttcctgcctgagtctcctgagtagctgggactacaggtgtgtgccaccacacccaactaatttttgtatttttagtggagacagggtttcaccatgttggccaggatggtctcgatctcctgacctcgtgatccacccgcctcggccccccagcgtgctggaattacaggtgtgagccaccacacctggcctaatttttgtatttttagtagggacagggtttcaccgtgttgtcccggctggtcttgaactcctggcctcaagttatccgcccacctccatctcccaaagagaagctgggtttcttgacatcttttccagtttttatgattagttttgtgattcatatttcttcaccacaatcttcttactttagattttagaagccaaaaagttcattattttaaaaattagaatatatagctctttccaaataaaaatctcataaaattcaccaaagacattcactgtcatctcttcatttcacagcaattattaaaagctgctgtatacaagatactttgcttgatggtgaggattcaccaagaaacagaaacacacatcactcttttttttttttttttgagataaggtcttgctttgtcccccagcctgggctagagtacagtgacatgaacacggctcactgcagcctcaaacctctagactcaagcagtccttctgcctcagcctcccaagtagctgggactacaagcatgtgccaccacacctggctggtttttattttttgtagagatgggggtctcactatgttgcccaggttgttcttgaactcctggcctcaagtgatcctcctgcttcagcctcccaaagtgctgggattacaggcatgagctgtcacgcctggccctagatcaccatctttaccctcatggagcttaaattctagtgcgaaagatggtcattcactgagcgagtgcatactaattacggtggtggtgagtgtcgcagaggaaaagtacgggacgcaaggtgggcatggatcagggagggcctggccgtactgcgggaatatttcctctcttcctgtcttcgttgtatgatattttaaactactgtctagacaagtgcatattttcatatatatctttatccagctttttagaactgtcacactgtggcatagttatttctgtggaagctctttggggaagctctatcttgctcagcatggtgttagtgagcctggcagctgccacttcaggcttttctttttcttttcttttctttctttctttctttctttctttcttttctttcttttctttcttttctttcttttctttcttttcttcttttttttttgaaacagagtctcactgtgttgcccaggctggagtatagtggctctatctgggcttgctgcaacctctgcctcctgggttcaagcgattctcctgcttcggcctaccaagtagctgggattacagacacccaccaccatgcctgactgatgtttgtatttttagtagagatggggtttcactatgttgagcaggctggtctcgaactcctgacctcaagtgatccatctgccttggcctcccaaagtgctggaattacaggcgtgagccactgtgtccggcctaacttttgtaatttttgtagagacggcgttctcaatttcttgcccaggctggccttgaactcctgacctcaggcgatcctcctgccttggcctcccaaagtgctgggattacaggtatgagccaccatgcctggccaactaagtgcttttcagctacaagtcatgggatcccactcaagcccactttagcaaaagggggattttgaatgaacttttctgccttgtcgccttcctttcggggacaccggagaatggagattcttcttaggctgtgccatccagggttgccccacagaaccccagaccctcagtccagctcctcctgagatccaaggcatccacaaggaactgctggggtccacatggggcagcagtgagcctcttgtcttcctcagccttgtttggtggacttgaatcagtgaggttgccaggcatgttggtgcaggcctgtagtcccagctactcaggaggctgaggcaggaggatggctggagcccaggagctctgggatgtcgtgagctatgctgattgcatctccacactaagtttggcatcaatatggtgacctcccaggaatgggggaccaccatgttgcccaaggaggggtgaacactgccatgctggaaatagagcaggtcaaaactcctgtgctttgccaggcacagtggctcatgcctgtaatcccagcactttgggaggccaaggcaggcggatcatttgaggtcaggagttcaagaccagactggccaacatggtgaaaccccatatctactaaaaatacacaaattagccaggtgtggtggtgcgtacctgtaatcccagctgcttggatggctgaggcatgagaatctattgtaccttggaggcagaggttgcaatgagctgagattgcgccactgcactccagcccaggtgacagagcaagactctatctcaaaaaacaaacaaacaaacaaacaaaacaaacaaaaaaccctcccgtgctgatcagcagtgggattgcacctctaaatagccactgcactccagcctgggcaacatagtgagacaccatctctaaaaaaaaagaaaaaaaagaatcagggaggccagcatctcagcagaaatcagcagagtgcaggagctgctgtcactgtcacactggtcaggtttgctggcccatgccggccccctcttgtccgtgtgaggagggacatggacccacacctgtccagtccgcagttgtgctctacctatgttcatagattgaaagaaaaagtcgaatatctcgatggtctccaggaaaatgccatcctttctgtcacctctaagggatccctgtggcctcagcagttgaatgccaaatatctttccatgaagtttggacattgtaccaactttatttcatttttaatattttggtagagatggggtctcactatgttgcccaggctggtcataaccttgtaccaagtttgactgcccttgagtctgccctggagatcagagtcctttatcaggctccaaaaaatgtgaaatcacttaaaaacatgtcttggccaggcatggtggctcacgcctgtaatcccagcactttgggaggccgaggcaggcggatcactaggtcaggagtttgagaccagtctggccaacatagtgaaaccctatctctactaaaaatacaaaaaattagccgtgcgtggtggcagatgcctataatcccagctactggggaggctgaggcaggagaatcgcgtgaacccgggaggcggaggttgcagtgagctgagatcacgccactgcactccagcctgggcagcagaacgagactctgtctcaaaaaaacaaaaacaaacaaaaaaaaccatgtgtctcccgcagagtgaaccgcaccacgcttctccctgcgtgcacgctgctgggccgcctcatctccgtgtggccctgcagcagtgtgtgtggggcagctgagggtgcagcttgactgctccttccctccccacccccaccccgtccccgcccccgccacgccacgcctcgaggcgccttccttcgcaggtgctccttttgtggggatgcccccacatccaggcaggtgtctccttcctgccctcctctgctatctgattggacagtggaagcgccttctcctgtgctcacccagatttcaaatttcaatttcagaggcctgtgacaaccccactgcttctaaaagtcacctctgtgcttacaactatccggctaattacacacctgtggcgtcctcagagcaggctgggcaggtctgcgtccctggggctttagtgcagagttgaaagtcctccaggtttcccaggtgcaccaggagactggcccctttgcctacaggaaaaacaaaaatttcaaaggagattgaacttggttcttttattgaggtgtctgatttaatggggtaagtaggctccgggggcctagtctgggagcctagcagcatgtcttctaagccccaggaactaactttcatccgagctaagggcgctgagacccctgctccagttctcagaatttatttagtatagatgcttccaacaagccgtggccatccactccacgccaggcaccgtgccaggtttcagggttacacgatcaatggggaacttggcacgccttcagggaattccagaacaggccatttgcaggccagaggaatatcaggacagaaggcagcgtgggcagttgtggagtgcttaatccagcctggggaagaagcaggagagtgccctggagtaggtgccactcaggcagattcttgccttttatttgacttttcttttcttctttctttcttttgaaatggggtcttgatctgtcactcccactggagtatagtggcgtgatcttggctcactgcaacctccacctcctggactcaagtgatcctcctgtcttagtctcctaggtagctgggactacaggcgtgcagcaccacgcctggctaatttttgtattttttgtagagacagggttttgccctgtcgcccaggctggtctcgaactcctggactcaagtgatccacccgcctcagcctcccaaagtgctgtgattacaggcgtgagccacctcacctgtctccttttgtttttcctcataaaatgcagctcctgcaggactttctttcccccaaccccacaccctacccccgggatggagtttcgctcttgtagcccaggctggaatgcagtggtgcgatctcggctcactgcaacctctgcctcccggcctcagccacctgaataactgggattacaagcggttgccaccgcgcctggctaatttttgtatttttagtagtagagacgtggtttcaccgtattggccaggctggtctcaaactcctgacctcaggtgatccacctgcctcagcctcccaaagtgttggaattacaggcgtgagccaccacacatggcctttctttaattactgtgatttaaaaaattctttctaaaggggctagaataaaccattttttggttaagccttgaaatttctgggtccccaccttctggtcaacgcagtaactctgaacttcgtctatgccggtaactctggaaagtctttgccagcagtaaaaactccacagctactccagaagtagtctgaagccccctaagggatagcctggaggccgttggcctagctctctaccccctatcccaggcaactcctccccggtctcagcaggattgctgtggggatggtgggtggagccagggagcccagcgttggcttctggttgctatgaaatgctctgggcagcaggggcctctctctttcttggcataggaggaactagagctcctttttatgtctgccagaaaactagttgggggaagggttggtcctgagggcccccgatttacccagtaaacatgcactgggcacctgcctcgtgtccagcagtgtgcttgacagtggggatgcagtgaatggggccagacgtgcattatgcaagtcagggaggcggagaaggtgatgcaaacaagcgggcagcatgtgggcacagtggggcagagttctctgaggccccttagaagttcctgcttcgaggccaggcgtggtggctcacacctgtaatcgcagcactttgagaggctgaggtgggcagatcacaaggtcaggagatcgagaccatcctggtgaacacggtgaaaccccgtctctactaaaaatacaaaaaaattagccgggtgtggtggcggacgcctgtagtcccagctacttgggagactgaggcaggagaatcgtgtgaatccgggaggcggaacttgcagtgagccgagatcacgccactgcactccagcctgggcaacagagcgagatctgtctcaaaaaaaaagaagttcctgcttcccagaggccacatgaaggccctccagccacggcccttccttgaatgggatggtgtgagtccttcatgctgcagctggagggggggccatctctgacttcaagcattaaatacccgaggactggctctttagatcccattgcctgtggcccactttggcctctaggatcttctttctttgtctgccaactgcagtggtgaggccacttgggagccttgaggtcatttcttctagcctaacatctaagggcctccctttattttaattttttattaaaatttcagattattatgtttaatttcaaacaaagaataatacaatggaccaggcacagtggctcatgactgtcatcccagcactttgggaggccaaggtggaaggatcgcttgaggccagggattcaagaccagcttggacaaaatagtgagatctcatctctacttaaaaaaaaaaatgctggtcatggttgtgtgcacctgttgtcccagttacttacgaggctgaggcaggaggatggcttgagcccagaggttgagggtgcagtgagctatgattgcgccaccgcactccagcctcggtgagagagcaagacactgtctccaaaaaaaaaaaaaaaaataaaagcgtaaagaaaagaatagaaggaaaccatcatccatgtgaagtgttcttttttttttttttttttttaaagacagagtcttgctctgcagcccaggctggagtagtgcaatcatgtgatctcaactcactgcaacctctgcctcctgggctgaagcacaacctcccgagtagctgggattacaggcacatgccaccatacctggctaatttttgtgtttttagtagagacagagtttcaccatgttgaccaggctggtctcaaactgctgacctcaagtgatctgcctgcctcagcctcccaaagtgctggcattacaggcgtgcgccaccacccccggctaatttttgtatttttagtagagccagggttttgccatgttggccaggctggtctcaaactcctgacctcaagtgatccgcctgccttggcctctcaaagtgctacgattataggcatgagccaccacgcccggccatgtttcttttttgaatggtgggagaaagtgtgattttttagcttcccttttctgtactttccaaatgctcctctcttcatctggacttgtccctgagcccctgggtccttataactgtgctgttaagaatagagagggagcctggggccactagcctgggggggacccagcgattgtaggaaggagccgtcagcctccacatctgaaggtggagaaggatttgtactgttcgcctcctccctctgcctgtggtggggtgaggctgattccatcacaacagcaacaacaacaacaacagcagcagcagatcacctcagctggcagccactgtggccgtgttggcaagggacctcgggcgttctctctgccagcaggtcccgctgtgtgtccagctggagcgcctttggggacaccttgttctgctgaggtggtaaatggcacgtctgtctaatgttgccccgaattgttttttccaggtcttagtaccctgcaaaggaagcctgtcgagcagcatccagtctacttgtcagtttgagtcctacattttgatacctgtggaagagcattttcagaccttaaatggaaaggtattcatttcttggtggatcagccagggtcacctactcggtgtttggggccagaggggaggaagagagtcccgttctcagcctttcacagctactggcaatggtggcatttgacacacactgcagccccgtggggggctggagggaccctgcctttgtggtggaggaaagggaggtagtgatggtaagctggaccccagctgctgccttggaggccgggaggtgccaagcatctctctctgatcccgtgatggggtttctgccgtgtgtcgctggaacacctcctccttgctgatgtccgagccaaaggaagttgttttatcccagtgccgtgaaaagcttgtcagtgtcttggtcccgaataggacatcagggatgaatattttagtttttaaaagctttttgtttcagctggacatggtggcctacgcctataattctagcactttggggggccgaggcaggagaatcacttgaggccaggagtttgagaccagcctggaaaacataacgagaccccatctctgccaaaaataaaaataaaaaaattagccaggcgtgatggtgcgtgcttctagtcctagctacttggaaggcacaggtgggagaattgcttaagccgaggagtttgagcttgcagtaagccatgattgtgtcaccacactgtagcctgggcaacagagtgagaccctgtctcaaaaaaaaaaaaaaacaaacccaaaaaacaatctttttgttttgaaataatttcaaatgttttagtaaagttgaaaaaactcttaaatgtgcttccccccaagctgttaacattcttgccacattggttttatcgctgtctctcaacacatattattattattttgaatctttttttttttttttgagatggaatcttgctctgtcaccaggctggagtgcagtggcgctatcacagctcactgcgagctctgcctcccaggttcacgccattctcctgcctcagcctcccgagtagctgggactacgggcacccgccaccatgcccagctaattttttgtatttttagtagagacgaggtttcaccatgttagccagtatggtctcgatctcctcacctcatgatccacccgcctcggcctcccaaagtgctgggattacaggcgtgcgccaccgcgcctggcctgaatcttttgagagtaagttgcaggcactgtgccctttagcccaagacagctcagtgtgtatttcccaagaacaggcattctcttatgtaaccacaacgcaatgatcacactcagataatttagcattgatagaatgtcctccaacatattgtcctcatacagactgtgctgattataccaattatatctttcatagcaaaaaaaacttcttcttagctctagaatcacacactacattttttttttcttttgaggcggagtctcactctgtcacccaggctggagtgcagtagcttgatctcagctcactgcaacctgcgcctcccaggttcaagtgattctcctgcctcagcctcctgagtgtctgggactgcaagcactcgccaccatgcccggataatttttgtatttttaatagagacggggtttcaccatattagccaggctggtctcaaactcctgacctcaaatgatccacccaccttggtctccgaaagtgctcggattacaggcatgagccactgcacccggcctggatcctttttaaatgttgcaacagaaaaaacattgagctgtttctttaggagaagaaattctgtgttctttgtgaaaagaaaaggtaagaaagctctccctatctaagagatggaagtaatcttgtgctgcagtgtggccagggctgaatcccacctgctactccctgcatggcttactgtggtcatggccgggtgctgggggcagaccagctgcgcaaagcccgactcctgtcctttttgtagatctaggtgtccaaaagagaacaaatcaactaagctgactgacagctggggtgagcagatctctagcaggaaaacagcagtgtgtcttgtgagccacagggcagagcagatgcactgacaaccccgtgcttcctctccctgtcacagcgccacaaacctcagctgccgcatctgaacacagcccctgccccagtgaggacactgtggccgggcttccctgactatggggatgccgggaaaaacagggccattcctgaatgggaataaaatctccctctctcagaacctacctgcttccgctttaaaagcaaaacaaaacaaaacgacacataccccatggttaacatcaacagtgaaaaaagctgacatcatgtgccttccaacaggatacacagagggagataaaacatccctttcagggcattcctatcagaaacgtgtaactgtaaaaccgtaatctaattgtcaggaaacatcagacaaaccctcccaaacacacggagggagagtctgcgatatgcaacaaaaatgtcaatgtcgtgaaaggcaaagaaagaccgaggcactgttccaaatgaaggaaactgaaaagatgaacaaatgcatcgtgtgggccaggtgtggtggctcacgcctgtaatcccagcactccaggaggccaaggcgggcggatcacctgaggctgggagttcaagagcagcctggccaacatgacaaaactgtgtctctactaaaaatacaaaaattagctgggtgtggtggtgggtgcctgtagtgccaggtactcaggaggctgagtcaggagaattgcttgaccctgggaggcggaggttgcagtgagccgaggtcgcaccactgcactccagcctgggtgatggagtaagactctgtctcaaaagaaaatagaaatgattcaggtatcttgcagccatagctactaggccaacaaagaggaaacattttagtatcaaaatgagcaaaacaggagagtatttgtgccccagcaaacccacattggggtgaaggccgtagggtctggttaagtgctgcatcgggggccaggctgagagtgggatgtggttgccccggctgctggtgcagtgatggctttcttgtttccaggatgtctttattcaagggaacaggattaaattaggagctggttttgcctgtcttctctcagtgcccattctctttgaagaaactttctacaatgaaaaagaagagagtttcagcatcctgtgtatagcccatcctttggaaaagagagagagttcaggtattctgggagaaaaaacctttttctcctgttttagaaaaatgtgtttgttgaacttgttcctgacttagctgttgaaaggttaaacaaggccgggtatggtggctcgcgcctgtaatccctgcactttgggaggccgaggcacaaggatcacttgaggccaggagttcaaaactagcctggaaacatagtgagaccctgtctctataaaaaaattaaaaaaatcaagccgggcgcagtggctcacgcctgtaatcccagcactttgggaggctgaggcaggcagattacttgaggtcaggagttcaagatcagcctggccaatgtggtgaaaccccatctctactaaaaatacaaaaattagctaggtgtggtggcatgcacctgtaatcccagctactcgggaggctgaggtaggagaattgcttgaacccagaaagcggaggttgcagtaagctgagatcacgccgctgtactcgatcctgggtgacagagtgagactctgtctcaaaaataaaaagtaggctgggcgtggtggctcacgcttgtaatcctagcactttgggaggccgaggtgggcggattacctgaggtcaggagttcaagaccagcgtgaccaacatggggaaaccccatctctactaaaaatacaaaaaaaattagccacgtgcagtggtgcgtgcctgtaatcccagctactcaggaggctgaggcaggagaatcacttgaacccgggaggcagagactgtggtgagccgagatcgcaccactgcactccagcctgggctacagagtaagactacgcctcaaaaaaaagataaaaataaaaataaaaagtaaaaaaataaaataattagccgggcatggtggtgcatgcctgtagtctcagttactcaagaggctgaggtgggagggtcacttgagcctaggaattcaaggctgcactgagccatgatcacaccactgcactctagcatgggctacagaacaagaccctatctccaaaaacaataaaataaattattattattattatttaattatttttgagatggagtcttgctctgttgccaggctggagtgcagtggcgcaatcttggctcactgcagcctccagctcccgggttcaagcgattctcctgtctcagcctcctgagtagcggggattacaggcgcccgccaccacacccagctaatttttttatttttagtagagacagggtttcaccatgttggccaggatggtcttgatcccttgacctcatgatctgcccgcctcagcctcccaaagtgctgggattacaggcatgagccactgcgcccggccaataaattatttttttaaaaaaggttaaacatcatggaaaatattcaagagccacatggagacctatataattgttttcagtggttcctactagaactttaaagtcactgggctaaggaggtgtggatcggggctgctgttgcacaggtcgggcattgcacaattccaggaggcagcattcgcatagacagcctacctgtgatcagcctgggatgtgactgttgcccccatgagttatgcaaagcagtagccccagctttgtctctgggtgtcagcttcagggctgtctcttatagcgcccagccccagcattgtgcctctttgagatttcgttatttttaataaataataagtcttcatttgccccagaaaattgagataataatgtgctggatgcacactgatgctcttattgtcaggaattggggtcttgcccatggtcccagatagtttggttttgtcccaggaagaggccttgagaggaccaggctctctggactccagggtgtcctgtaactgggctgttcttgtgtagtgtcttgaaataaggacatttgccctcctccccagagggcctagaccctgtaggataggacagagtcaggaaccagcagaggcttcagccggcctgacctgtttgtttctttttcagaagagcctttggcaccctcagatcccttttccctgaaaaccattgaagatgtgagagagttcttgggaagacactccgagcgatttgacaggaacatcgcctctttccatcgaacattccgagaatgcgagagaaagagcctccgtcaccacatagtcagtagccgtgctgtcctctgcctggcgtgccctgtctcggttcagtgcagggtgctgggagccctcagtttcctctggaactgcctggtgctgcctcactgtttgaagtcttttaaaaatgtttctctctaactataaaagtagtttaaccgggcatggtggtacaagcctgtcttcccagcactttgggaggccgagatgggaggatctcttgaggctgggagttcaagaccagcctgggtaacataaaaagaccccatcactacagaaaatacaaaaattagccaggcatggtggcatgcacgtgtattcccagctacttgggaggccgaggtgggaggatggctttagcccaggagtttgagactgcagcgtgctatagtcataccactgcactctactctgggcaacaaagtgagaccctgtctcttaaaaaaaaaaaacaaaccaagtggtaaagtcatggggaagtataacaatgagtattattatcctctgtgttaaccccaaggggaagtttctcctgcttttaatgcatatacacctaaaaaaaaagttgagaaaaatcacgtaattgacttcataaagcttgcgttagcacttgaagctctgtgcgccttacccgctccggctcccccgtcatggccttgctggtaagggtggcctgtccctctgctctatgtggtttaggactcagcgaatgctctctacaccaaatgcctccagcagcttctgagggactctcacctggtaagcagcaggacttctgagagggagaattgtggtgcacccccatgcaaattcaagccctttcactgtgcttttcttgccctctagaaaatgctcgccaagcaggaggcccagatgaacctgatgaagcaggcagtggaggtgagggtggggcggagtggctgggaggcacaccctgttgcccgctcacaccctgaatggggtctgttgattccacagatatacgtccatcatgaaatttacaacctgatctttaaatacgtggggaccatggaggcaagtgaggtaggttctcagttattatcacccaagatggaagccttcttctgtgctttttgagaaatttgaaggttcgttaaaatctgttgttaggatgcggcctttaacaaaatcacaagaagccttcaagatcttcagcagaaagatattggtgtgaaaccggagttcaggtaagggtttgcgccacagcggcttggtgtcctcagaggcaggggtgctgtcttctcccggaagcaggccctctcggtggcagaggtgacagctggtttgatgtggttagttctgaggagcagcgcagttacttgcaaccaaagataaagggctgccctttacaggtgactgtgtgtggccgtccccctcccacactgcaccagcacgccagctggatgggagccgctgggcacggggttttgtgcagctggtccccaagtgggcatgtaatttgcccatgtgggttctgcgtgcaggggacatcccacctgcccacccaagggaaccttgccatagagatacctacttaggagttaattcatttctttaatttttattctttttgagacaaagtctcactctgtcgcccaggctggagtgcagtggtgtgatctcggctcactgcaacctctgcctcctgagttcaagtgattctcctgcctcagcctcccgagtagcgggattacaggtgcacactaccatgccctgctaatttttgtatttttagaagagatggggtttcaccatgttggccaggctggtcttgaactcctgacctcaagtgatctgcccaccctggtttacaagtgctgggattacaggcgtgagccactgcgccgagcctaatttaagtttcattaggacacaaaaatgtttcacctaccacaaccctctttgggttgtttccctctaggaataggatttttttttttcagcttttcttgtacaactctatcacctggcagcctgaatgggattgaaggctcttctgttttgccgctgacttgagtcagatgacttctcagtatctgtttttgtgtttcattccttctggtttgttgtgagaagtgtagatcctgagatgtgttcttagatccaggccagagggttctcttactgtgctctgaagttgtcactttccaaattattttacagctttaacatacctcgtgccaaaagagagctggctcagctgaacaaatgcacctccccacagcagaagcttgtctgcttgcgaaaagtggtgcagctcattacacagtctccaagccagagaggtttgtgcttggaaaggggactggccaaggggtagatgctacatccagatgaaaaagcaaagagtgatgctgtcttaagggatttttatggggctgggtgcagtggctcacctctgtaaccccagtgctttgggaggccaaggtgggaggatcacttgaggccaggaattggaggttgcagtgagctatgatcacaccagtgcactacagcctgggtgatagagtgagaccccttctcaaaaaaaaaaaaaaaaaaaagaagtaaaagaaaacaagtcaagaaaaagtcagtaaggaagagacatagctgtatgtgtagataagggatgatcctgagtgtatggaatgaaataaacaggaatgcatatggtagacttccagccaacagcatcaaagaatgggggatagctgtttagccacgatatgatggtgagctcatagctgtcctggacagatgtgcaggaagcaacagcaggagcctctgggaaaagagactggctggcagggatgggaggaacattcacagtttgctcttttgtattgtttgaatttttaaatgtgaatgaattacttaaaatttcaaaatggaaaaaaagtgaaactccacatgggcagtggactccatgtctataaaatggaagtgaccttaggaaggaccttggtgactttaggaagaaagagactttaggtgatggctctgggctcatcttcattttttatcactgcagccacctccctgggctctttcagcgtccaagggggtggcaaggcatggtctgcttggagttaacatattttttttttttcttaagagacagggtcggctgggcgcggtggctcacacctgtaatcccagcactttgggaggctgaggcgggcagatcacgaggtcaggagatcgagaccatcctggctagcacggtgaaaccctgtctctactaaaaatgcaaaaaaaaattagctgggcatggtggcgggcacctgtagtcccagctgctcaggaggctgaggcaggagagtggcgtgaacccgggaggcggagcttgcagtgagccaagattgcgccactgcactccagtctgggtgactgagcgagactccgtttcaaaaacaaacaaacaaaaaaaagagacagggtctcactctgtcacccaggctgggtgcatttgtagatcactacatccttgaactcctgggctcaagtgatcctcttgcctcagcctcccaagtacctgggattacaggcatgcaccaccacccttggctaattttcatatttttttgtagaggtgggggtcttgctatattgcccaggctggcctcagactcctggcctcaagcaattctcccgtctcggcctcccaaagcactgggattacaggcacgtgctgccgtatctggctagagttactaataccttgttttggtcatgttctgaaattgctgggcattcttttccccctggacctgacatctgatcaggacgctgtaaaggagcttgtgcaatgacatttctcccccagtgtatgatctccctgatacgtggtttcacaaggtgtgcggtggtagggagttgatatgcttgtcagtccatttgaatctcatgatggcattgaatgtgtgtttcccctttgcagtgaacctggagaccatgtgtgctgatgatctgctatcagtcctgttatacttgcttgtgaaaacggagatccctaattggtaacattttcttttaagatactcttttgaaaatggcagtgcttggccgggcacggtggctcacgcctgtaatcccagcactttgggaggccaaggcgggcggatcacgaggtcaggagatcgagaccatcctggctaacacggtgaaaccccgtctctactaaaaaatacaaaaaaattagctgggcatggtggtgggcacctgtagtcccagctactcaggaggctgaggcaggagaatggcgtgaacccaggaggcggagcttgcagtgagctgaaatcgcgccaccgcactccagcctgggcgacatagcgagactccgtctcaaaaaaaaaaaatggcagcactgcactgtggtagttctaatgtaactctaggaaaagcccatcttcaattggacacctgttacgagctaggtgtggggcctccccttgcttcatccatccacttacagatggggaaaccaaggcccggagagcttacatttcttgttctggaatgagtgtctagacagtggttgagcagaaagctgattgccattctttctggccccaaaacccataatctctcccctggaacccacagctcagtttacggtaatcagcttgctaaagactatttcagggaactagctagtcattttacttgtgttcctaatcgcacacactctgcagagagatccaggggatggtggtcgtagcttcctgagcgaaccgactgactagatatttgatcagttgcccaagccaatgatattttttttgcagaagtgtgacttggatagacaacaacataacttttttcttcctttcattaggatggcaaatttgagttacatcaaaaacttcaggtttagcagcttggcaaaggatgaactgggatactgcctgacctcattcgaagctgccattgaatatattcggcaaggaagcctctctgctaaaccccctgtaagatctcacccctgccctggccttcctttgtgggcatcatggttcccttgatagggtgctggggttggtatgtgggcagacggattcttaaattgcctcccaggaatggggcctcagctgtttgagggctgtgagtcttaaaaatcactcagtgaagagaacaccaagcccccaattggtggtaaaaattggtgggttatcattgggatttacattgttaatatcctacttcattagtccccatcctctccaaagacatgtgggtgcaaagggaagccagaagtagggaatttggatttcttgaccttgatagtcaagaagtgatgtcacgggatccctggactgtcgcttttccagccggaaacctctgtggctggtggctcctttgcctgagttttgttcgggcctgctgggctcatttcacgctcttggcctggcaggctgcgctcggcttgtgctactggcctggatcccatgcctgccaagggcgagccaggtgtggagtggcgaggggtatgtgagcaagtgcagggtctggccactgcacacaaccaggtgtgccgactgaggtggggtgggcagctccaagttgcttgtacagggtcctgctccatgcaaggctgcagctagagcaggcgtactgtaggccgcttccacggtgggcactggggaacacagtggggcctggaagcttggagacaccaggaactgcagagccccaaagagggtgtcatagccctggctcggggaactcctaggttgggctccctgaagggccagagctcttctctcctctcgtcacctgcaatgtagtgagtcgggagcatgttttagctctctttatgttacagctctttcagtcctgccatttggtgggtcccgagttcttgtcccatgtcgaggaagaatgaggtacgtagactagtggagggtgagcaaggcagagaggagctttactgaacggcagaatagctctcaggagacccacagtgggcagcttctttccacaggcaggtcgtcctgacgagttaaagaggcctgacgtaggtagctccttcctgcagttggtagtcccgacatctgtctgagtctggctgagtccggggttttttatggctcagaagggagggagtatgtgctgattggtccataggtgggcctggagaaagcaccatgagttctcagtctgggccgtggactccacttggaactgacagcccagcccccaggctttaggctgtccctgtcttgaaggtggggcttcactgggcacctgcacctttccacccagaagcgtgtctgccttctgccaccatcaacatgctggccagtgcatccaggctgtttgtgccaaggggcatctgcaggcctgcactgagctgccctcagcccctaccttgactactctcccatgctcatcagcgcccaaaatcttggaggggtctgaggcatcaggaggctggtgtgtcagtgtcacaccaagcatgtgcacacatggctgggttgcaacagtacccgggcttggcctcagctttgctctgaaattgaagtcggtgccaggagtggggaggagcgggagcaggcacttacgagcctgcggcggcagggatgcttcctgggcccctgagagtgcagagattcctggatccagagctgcggctgggcggctgcagctgcgcctgggagtgcagggctcccgccctgccagctcagtaggagatgggggctcctgcctattcctggctcctgttggccctgcagagtgcacaaccctggccgcgcttcctccactgcagcttacgtctttgcagcagccactcccgatgggctgccactgccatctgtgagaccattaatgtgtgcaatttgaggactcagtggccttgccattgtttccttggtttttattgagcattggctggggtcggcgaggggatgtgattatatttctatgtgaatcgtgagaatcttgaaccatagttgtcctgctggcctgttttactacataccaatgagtaaaatgtgatcatacagaaatcacaaagttgaaatctataaaatgaaaagatctctgtattataaggtgagagtgccaaggattgaacattcatctttgtcagactttgatgtagaatctcccaaaataatgatgagctaaagcgtctgggagacagcatcagcctgtccaggtgctctcaggtgcaggcatttccaccccattcattcgttattgacacgttcatgcattttcagtctttttcctacccatgtatattttacataattgaaattatattgtgtgctgggccgggcacggtggctcacgcctgtaatcccagcactttgggaagccaaggcaggtggatcatctgaggtcaggagttcgagaccagcctggccaacatggtgaaaccctgtcactactaaaaatacaagaattagctgggtgtggtggcaggtgcctgtaatcccagctacttgggaggctgaggcaggagaattgcattaatccgggaggcagaggttgcagtgagctgaggttacaccactgcactctagtctgagcaacacagcaagactctgtctcaaatatgtgtatatatatataaaatatatatatatatatatagagagagagagagaactgtttttttcccaaaagaatagcttaattttttcctaattagaagactaatatttgcttacaaataatatttgcagtctataaaatggcagtgaagacaacaaaaacttcccataaacttactagccaggggtgacacttattaatattttagcatttgtctttttttctatgcatacacaattgtatcttttttttttttttgaggcatgtgagccagcattttattcgttcatttcttgcatgtgaagcactcctcaatcacatccttggcccgagattctttgccaaagtccttaactgctacatagctgcagctagccccttcatagggtctcccctctctgtcgttttacagaggccttacccattcctttcgtttctcattgtcatcaatcttaattagtttgacctggtgttcagcacctagggtctccctaatgtggcacatgcaggcttatcacagttggatgcaagcacaccaagatgggctcagcagtcgtctgaggctttggcagcttggcgaattccatgtgctaggccaccgtggatgaaggcgtccttcagcaccccttgtaaatcagtgttaacgtccattacaccgccagcagcaatgtcttcctcggccatggcagtgggtcacgggtgcagcagtgcaatgtcttcctcagccacggttgtgggtcatgggtgcagcagtgcaagaccttcctcagccatggcagtgggtcacaggtgtagcagtacaatgccttccttggctatggcggtgggtcacggacgcagctgaatcttgaacacacctgagcctctgcctccacgtgacttggcggtagcaaggaatgaacacagttatctttttaaccaaaattttagatcatgatctcgctgtactcgttgacagtattcaggtacttgttgaagaattaatctctgctcttctctgaagtctgatttaatcaccccactcagctgccagtgaaattgggggtcatccatcgcatctcggatgtggctggctgtggctcttctgaaaagtttctttcttctgccttgtttccatatttagggggaaatcagcaagattctagagtatgtatgtgggctgggtgcagtggctcatgcctataatcccagcactctgggaggctgaggcgggtggatcacccgaggccaggagttggagaccagtgtgggcaacatagtgagaccttgtctctacaaataaataaataaataaaaaagaatgcgtgtgtgtgtgctcttgtgtctctacctatgcgtgtgtgcagatcagaatttctgttcatttccaaggctggggagtaagagttgtgagtttgacttgttttctatgaggctgtgggaacttgtgtttctctcaccgtgcctgcggtggtttttgccctgccctctggttcttgcagggcaagaaacagattggtctgagagttcactccctggccggctttcctgccctgcagaggaatcactctgctgtgccttgctgggcccagggtgtctctggtcacctggaaggaggtgtccacctctcaaagatgctcccatccccttgctgctccctgtagcgtggctgtcttctgctttctcattttctgtggaggccttcaccaggttgtaaggaggtggctgaccaaacagtatacatcggcttctcacacctccttttatttcagaaaatattgcaggcacattggcagtaatatttgagaggttccttctctcgtgctggtgttggtttgagggtttgagtccagtctttctttttttttgagactgagtctcgctctgtcacccagacgggagtgcagtggtgcaatctcagctcaatgcaacctccacctcccgggttcaagcgattctcctgcctcagcctcccaagtacctgggactacaggcacgcaccactacgcacggctaatttttgtatttttgtggagataggattttgccatgttggctgggctcgtcttgaacccttgacctcaagtgatccgcctgcctcagcctcccaaagtgctgggattacaggtaccagccactgcgcccagcctgagtccactcctataggctcagatgtcttgggcatgtctgtttgtctctgcatctggggtgtaaggatgcccctaaggatagtgtttagtttggatgggaaagggagggtcacagcccaaggcacccctcttgttgtcagggtgttggaccctggttctgccctcctggatggagtatggttggttctggtgaaaccttgagacaggtatgcatcatcctcacggctggctgtgaagcccaccctgcaggtattgagagatgctcgtatatttactgtggcctgtaattgacggagcaggcgtcgtggcttccttgttgttgtgattctgtctgtatcatggcctctgtcttagctgctcactggtttaagtaatgaagttccctttaggaatgtagagagtcattgctatgtattgatggtgtttcctagggaaaaatcccaagtgtatctcctcacagcagaagaggtttctgaaaagtattaaggactaaatatgaggacatccagttagattttactattgattttatataatatagtttcatggaaattttctctgcaaaatatacttgagatgaccataagcttttatttttcttagagacaggatctcgctctgtcacccagggtggagtgcagtggtgtgatcctagctcactgcagcctccaactcctgcgctcaaagggatcctcctgcctcagcctcctgggtggctgggactacaggtgtgtgccaccacacctggctaattttttaattcttaaattttttgtagagatgaggtctcgctattttgcccaggctgagcttgaactcctgggctcatgtgatcctcccacctcagcttcccaaagtgctgggattacaggcatgagccaccacacctgctcaacattctttaagcatgttcataaatgaagacttcagctttctgaaaataaattactgggatgactctagagttacctttgtgaatgaaaaaaagagagaactttgaaagaatctgggttgggcctggtcactcatgcctgtaatcccagcactttgggaggctgaggcaggaggatcacctgaggccaggagttcgagaccagcctgggcaatgtagcgagaccgccatctttacaaaaaattagcggtgcacggtggcacacctttagtcccagctacttgggaagctaaggtgggaggatcacttgaacctggtagttcaaggctgtagtgagctatgattataccactgcagtccagcttgggagacagagcaagaccccgtctcaaaaaaaaaaaaaaaaaaacagataaaaaaacaagaaagaacctgtaccattcttgtctgcagctttgcatgcttctggccttccttacgttactgggtttctcatagaaaggatttaccaatttctttagtaagtccttgctgataccccctctcttccaatagctcattcttccctgaagattcagtcttgggagacctacctgtcttcatcactgctgtctaaatcgttaaccagagttgcggaaagagtgctggatttacccggataacaatgtgtgatgtttctctgaccctaagctcctcagctgtgaattgcggtgtaaagtggattgttagagctttatatggcacacagcagctgggggcagaagcgcctctcacaggtgctggtgttcatttgctaagttaaccctcctgggggactgctgggaggaccctgcatggcagaggaccccaggaatggcctatccccagagatgctgtcagctctatctttaggtggacctccaagtcaaaacttagagggctgtaaagagacatccttattccacaaatttgtcagggtttgggggttttctggcagccgctggctggagaaaattcccttgacttcccaccaagacccttttcaggaagcgaatttgtcattacatggtttggttgcaggtgctcaaggaagcattgaactgtcttgcgagaaatgatttcataaagtattatggaaagtatctagagttttgcctttttttttttttttttgagatggagtcttgctctgtcacccaggctggagtgtagtggcaccatcttggctcaccgcaacctccacttgcggggttcaagtgattctcctgcctcagcctcctgagtagttgggattacaggcgcccgccaccacacccggctaatttttgtatttttagtagagaggggtttcaccatgttggccaggctggtctcaaactcctgacctcaagtgatccacgcgcctcggcccctcaaagtgctggggttacaggcatgagccaccgcgcctggcctatttatttatttttgagatggagtctcgctctctcacccaggctagagtgcagtggtgtgatctcagctcactgtaacctctgcctcccaggtttaagtgattcttctgcctcagcctcccaagtaactgggactacaggcatgtaccaccatgccctgctaattttttgtgtttttaatagagattggtttcaccatgttggccaggctcgtattgaactcctgacctcaggtgatccgttcacctcagcctcccaaagtgctgggattataggtgtgagccactgcgcctggccatgtggccatattatttaataggcacatccaaaaagcaagacccctctctctcctgctggttgacagtgggaaattgagaccagcttgtgaaatggctttcctgcccaaaggcctcagataagacagcagggaattgggctgtgcaggcatttggtcagaggcttgaggaggaagggaggccacggcaatgtgagtttccatctggaggacaatggtgtgtgtgcgccgcattccacgctggagatggcacattccacatatacacgcagtcagggtgccgccaccatccccatcccccacagggagcaaccgtcaaagcctccacttccaggaagccttctccccacctgacgtcagcccgtcctccgtctcagtgagcaggtcccatatgagacgggagagaggcgcagccgatactgctctgaagagacagccggggttgttgctgaggtgctgggttttgaaggatctgcactgacatctcgtggtgtgtttggttttttccctgcaggagtctgagggatttggagacaggctgttccttaagcagagaatgagcttactctctcagatgacttcgtctcccaccgactgcctgtttaaggtgagataccaagacatctctgtgggtaaatgtgggtgaggaacactgcatctcttggtgcctctataaaatccatcagggttggccaggcatggtggctcatgcctataatcacagcactttgggaggccgaggtgggtgataacctgaggccaggagttcaaggccaagtgtggccaacatggtgcaacagccgcctctactaaaaatacaaaaattagctgggtgtggtgacacatgcctgtagtctcactattcgggaggctgaggcaggagaatcgttcgaacccagaaggtggaggttgcagtgagccgagatcatgccattgcactctagcctgggcgacagagagactctgtctcaaaaagaaaaaaaaaatgatcagggtggtggtctgcataaaccctgaagttccattctgtgctcagaatgggcagtaggaatgctgaggttttaaatttgggatcaaggccaggtggggtggcttacttctgtaatcccagcactttgggaggccgaagtgggaggatcacttgaggccagaagcccgagaccagcctgggtaacatcatgagtacccgtctctacaaaacaatacaaaaattagccaggtgtggtggcgggcacctgtagtcctagctgctcaggaggctgaggtggaaggatcagttgaggccaggagttggaggctgccgtgagctatgattgtgctgttgcactccagcctaggtggcagagtgagagcggcatgtttccccacctcccccagcgtgctgtgctgtagctgtgctgggcggcacactgtgggcgcaggccaggcctcttgctttctcagttcctcgcaatactactaattcctccaggccagctcagtggtgcctccgctggcagccctggcagagctgatgcctccgctgggctcgaggagcccgttgtcagatgtttatgggcgtgtgcactgggttgggaacacggtgcctgacttcctggtggtctggtcacctggcacatgggggcagctccctgctcagacactggccacaggcaggccgctgaggtgcccgcagggcagtccgtgagtgctgggcgagggcagagccccctgggggaggctgctgtgcttccaggcgacctggagccagagtgggtcctggggaatgagcacgtccaggaagcaccaggtgagctctgcaggtttgtgtgttgatggggtttcctgctcattgcagctattctctttcctttacaggctgatgctctattagaataaaagaggatcccctagtccatagcaagtataaaaataataataaataaaaaaataacaagatgaagctgggcatggtggtgtgcacttgtagtcccagctatatgggaggctaaggtgggaggatcacttgagcccgagaggttgaggctgcagtgagctctgattgtgccactctactccagcctgggcaacatagcaagaccttgtttctaaaaaaataaataaataaattctgttatttgtcaccctgtagggattcactgaaaaaaaaaaaaaaaaaaaaagaacacaagaggaacagggctgaggctttttctagtgaggtggcaaaatccacactgatgttcagagatgtgttgtctgcccgccattcctattgctttatggattttgtcatgttgtttttttgtttgtttgtttttattttttgtgacagagtctcactctgtcacccaggctggagtgtaatggtgcgatcttggttcactgcaacctccatctcccgggttcaagtgattctcctgcctcagcctcccgagtcgctgggattacaggcgtctgccaccacatccggctaagttttgtatttttagtagagacaaggttttaccatgttggccaggctagtctcgaactcctgacctcaaatgagccacctgccttggcctcccaaagtgctgggattataggcgtgagccaccgctccaggcatgtcattgtttttttaattatgggaaacttttaacatttccagaaatagagtagtagaatgagccggccaccattgtgcagttgtttcatctctcctcacctactttccctaccaccaagatgattacaaaggaaatgccagagtgcaaatcatttcatccataaacacatagatgagcatttctaaaaggactctcggccaggtttggtggctcacgcctgtaatcccaacacttcgggaggccgagatgggtggatcacttgtggtcaggagtttgagaccagcctggccgacatggcaaaaccccgtgtctactaaaaatataaaaattagccaggtgtggtggcagatgcctctaatcccagctacttgggaggctgaggcaggagaatggcttgaacccgggaggcagaggttgcagtgagctgagatcacaccattgcactccagcctgggcgacaggacgagactccatctcaaaaaaaccaaaaaggactctcaaaaaatttactcctaataattgagtaattccagcatgtggatagcatcttggatgtcacttttcagcacattgcatcaggtaaccagaaagaagtggagagacttctgagccaagaggaccatgataaagataccgtccaaaagatgtgtcaccctctctgcttctgcgatgactgtgagaaactcgtctctgggtaagagggtgctggtggaggctcagagtgccaggaagcaggagacaggcctcctggaccttctccactgtgcgctgtgtgactgcagataaggactgtcctccctgccccccagctgcctctgctgtacagtggagatgataacagctgcccctttggagaatcagataggttagaggttgtcaaagcacttgctcactggcgggctggctgccagggtaggctggttatagggcctgccccagcctcagaaagggggttttaggatgggaggaatgtcagtttttcccagtaacatttttggtttcccattatccttgtcaggctattttgctgggtgtggaggcctaaagggttggtgggggagagactccagggccaggtgcctctgttcctcatgctgggtgagcactgggacagtgccggagacacacatctcttgggtggcatcctgtgagccgccttctgtctgtggtacctgcctatctacctggtcagggagaggctttgctgtgccattcccctgtgtagttttctatctctttctgtattttaggaggttgaatgatccctcagttgtcactccattctccagagacgacagggggcacacccctctccatgtggctgctgtctgtggtatgtggtcctgggctggcccctaggggctgtcacagcaaagggatggtgcccaaggtgacccagcagagaggcctggctgatgggctgggtgggggttggcagttggggctgcatcgtgggtccaccctccaagggccggaaggagaagaggagcaaacgttccacaggcctcgacggccaccctgctgcctcctgcgctggctgagcccccctgcgtggttcccacggcatggaaacactgcctaacgctcccgcaggctgggggcccagcaagggaaggcttgaatctgaactatgagaacggtctcagaatcgtcagctcgcagttcttgtggccctgcctttaaaaaaatattattattgtcttttaaagtatacatttggctgggcatggtggctcatgcctgtaatcccagcactttgggaggccgaggcaggcaaatcacttgaggtcagacatttgagaccaacctggccgacatggagaaactctgtctctacaaaacatacaaaaatgagcctgttgtggtggtcacgcctataatcccagcttcttgggaggctgagtcagaagaattgcttgaacctggaaggtggaggttgcagtgagctgagatagcaccaccgcactccagcctgggtggctgagtgagactctgtctcaaaaaataaataaataaataaataaataaataaataaataaataaataaataaaataaagtgcacattcaagatagaaaacataaggtcctccagagtccccggccatccctgtctcccagagatcgttgtgattgatgagtgtctggggtgtctgcatgcttgtgtggatgtgtggacgcataaagtgtgtggtgctctagggctcataatattctgttgtgtgctatttttctcctagcactatgcaagaatatgtttacttgtcagtattttttaatggctgcataatactccatcttatgaactgatgagtcatggagcctgtggaagtctaagtctcttttccattattgtttattgctgagaggtggacttttgctgggtcccctccaaggcccaccccaacatgtctggagtctgcggagccttactttatattagctgtagttcctctctagcagaaaaagtatctaccgtgggtttcatgcccaggactaggagggtgcaatagtgttgtggttttacagttaaggtgtggaaggcctctgcgccttccttctccatcgtgacgtccttctgctctgcagggcaggcatccctcatcgacctcctggtttccaagggcgccatggtaaatgccacagactaccatggagccactccgctccacctggcctgtcagaagggctaccagagcgtgacggtgagcagtggtgcctttgtggcgggctgtcgctttgctcctgtgagcttggttctgcgtggtgactgtacggtcatgctggctaccctgcacccctgtctcctggtgctgtgcccccctcgttccacaccagctctgctgcagcagtagtcagggagtccaaggactcccggggtctcctgggaagactttctgagtctcctggacaagatcgttaggtttagatttgaaacttcctggccagatgtggtagctcacgcctgtaatcccagtgctttgggagcccaaagcaggaggatcgcttgagcccaggagttcaagaccagcctgagcaacctagggagaccctatctctaccaaaaaatatttttttaaaattatctgggcatgatggtgtgtgcctatagtcccagcaacttgagaggctgatgcaggaggtttgccagagcccagcaggtcgaggctgcagtgagcaatgatcgtgccactgcacttcagcctgggagacaggctgagttctctaaaaagaaaaacttcctgatcatatgggggaagaaaaggtggggctttagacttttttcttcagtctctcaagtgtcaggaatgatgggtgttggtttaatttgaatagtagcataaataagatcgaagatgggagcaaatgacctccccctgctaagactggaggccgggcctcccagggagccggctgtgccctgctcatcgctttcctttatctccgcagctgctgctgctgcactacaaggccagcgcggaagtgcaggacaacaatgggaatacgccactccacctggcctgcacctacggccacgaggacgtgagtggctcttgctgttccgggggggctgcgttcaccctttcccactcgtagagaagtcgggatttctcattaatgtattttgtgtcgataattattggaacattgggtgtgtaaatttttttaatatgaaagaatgttaggccaggcacggtggctcacgcctgtaatcccagcactttgggaggctgaggtgggcagatcatctgaggtcaggagttcgagaccagcctgaccaacatggtgaaacccccatctcaactaaaaatacaaaaattagcagggcgtggtggcgggcacctgtaatcccagcgactcaggagtctgaggcatgagaatcagttgaacctgggaggtggaggttgcagtgagccaagatggcaccattgtactccatcctgggtgacagtgagactccatctcaaaaaaaaaaaaaaagagaatgtttaatatattacagatgccatattgaagtaacaaagtttaaaacaagtcactcattatcttatcctgaagtcaaatcattttcatttctccttgctaccgtctggttcttacttgtgtacatattcaatttttacattttctgtttttattatttacttattatttatttttgagacagggcctcactctggcacctaggctggagtgcaatgatgggatcttgactcactgcaacctcctccttccaggttcaagcgattctcccacctcagcctcccgagtagctgggattacaggtgtgtgccaccacacccagctaatttttgtatttttagtaaagtcggggtttcaccatgttggccaggctggtctggatctcctggccccaggtgatcttccacctcagcctcccaaagtgctgggattacaggagtgagccaccgcacctggcctttattttttactttttaaaattagaaaaacaaattttttttgagacaagatcttgttctgttgcccaggctggagtgcagtggcatgattttggctcactgcagccttagcctcctggctcaagccatcctcccacctcagcttcccctgggactaaaggtacacaccaccatgcctggctaatttttatatttttgtagagaaagggtttcgccatgttgcccaggctggtcttacattcctgaactcaagtaatcctcccacctcagccttccaaagttctgggaatacaggcatgagccaccatttctggttcacttttataatgatatccaagaattgcgtaatttccattttcacgtcctgtttcaccactatgtgcttattttttcctacccgccctccttctggcttctctccatagtgatatatggatagatttacacacgtgtgtggggctcaggcctggccaggtggttgatgtatgaagatgacaccatgccctgtatgcttttatgccacttgctttcctaacttagctctacgttacagagatcctctaggtcagtccctgttgatctagcacattctttttttttttttttttgagacggagtcttgctctgttgcccaggctggagtgcaatggcacgatcttggctcactgcaacctctgcctcccgggttcaagcgattctcctgcctcagcctcctgagtagctgggactgcagacacataccaccacatccagctaatttttgtatttttagtagagacggggtttcaccatgttgaccaggctggtcttgaactcctgacctcaagtgatccgcctgcctcagcctcccaaagtgctgggattacaggcgtgagccaccgtgcctggccatctagcacattctttaatagctgcagtgatctatcgtgtgttgtgtcagtggtctccaagaccacccctgggctcagtgatttgctgggaggacttacagaactcagcatatagtcgcactcacagctgtggtttgttacagcagaaggacacagaacaacatcagcaaagggaacaggcacgtggtggagtccagagaggagagcaggggtgagcttcaaacagtctctctcggctgggcacagtggctggcacctgtagtcccagcactttgggagaccaaggccggcaaattgcctgaggtcaggagttcaagaccagcctggccaacatggtgaaaccctgtctctactaaaaaaatacaaaaattagctgtgtgtggtggcacacacctataatcccagctactcaggaggttgaggtgggagaatcacttgaactaggaggcggaggttgcaatgagctgagattgcactgctgtactccagcctaggcgacagagcgagactgtgtctcaaaaaaaaaaaaaaaacaacaggtctcttttcatggacccacacaggatgggctcagttcttccagcagtgagttggaacaacacacaggaagtgtggtccactcgggaagctcattaggaactcagtccccaagagttaatgaaggctagtcctgtaagcaccttctggacagcatgtaccaaaatgccatactcccagaagaaactcgggcgttcagcataaaccacattgtataaaacaattcaggcccagtgtgagccacctaatcagttagggaattttgggaacactccccacatccaggcacccatagaatgtttcaggccaacaggcagtcttgcaagcaggcctctcagtggttagcagtctcaggcctgctgtagtaactctgttctgtacatggagacatcacagtttttgcagccacttcttattgattggcagtttcatccttttgaaagcatgaggtgtcctggctgagcgcagtggctcacatctataattccagcactgtgagaggctgaggtgggaggattttttgagcccaggagtttgagtcctgcctgggcaacagagtgagaccctgtctctacaggaaaaaaaaaaaattaaaaaaaaaaaccatccaggcatggtggtgcatgcttgtagtcccagctgctcgggaggctgaggtgggaggatcgcttaagcccaggagttcaaggctgcagtgagctattattgcatcactgcactgcaacctgaataacagagagagatcctgtctcaaaaaagaaaaagaaaaaaaaaatgaatgagaatgaggtgtcctgatcagatactgtgacacttctgagttctgtctgttactgcacatttgcttggtgaggaggtcgaggagagcacggaccttgtcgaggcttggtacatccatgagcgatgccatttccccatctctttgcagtgtgtgaaggctctggtttactacgacgtggagtcgtgcagacttgacattggcaatgagaaaggagacacccctctacacattgctgcccgctggggctaccaaggcgtcatagagacattgctgcagaacggagcgtccaccgagatccagaacagactgaaggagacgcccctcaagtgtgcattaaactcaaaggtagctcttcccatctctgaggggcaagatgacttcgaaagaagatcgatgtccgtagcttaggtcttggcctactagacaaattgtgcattattgcctgagggcagaacttggcttgcaccctttctgccgcatgtgggacgtcatcattaatgggttttactgatatattatttttggtttgagtgggcgtttttctcagggttgttccaggaactcctgcaggcagagtttgttctggctgccgagtgctattgatttattggcaaatggagtgggtagaaacgaggctccgcaggggcagggactggggagggagcaggatgtgttggaactcttttttcccggtgcttcaccttcaatgcctagagtctttattgagactcggccagttctggacatcgagtgtggtttctttcatacataatttgttaatgagctcacctttttctggtagtaatttctggagacatagtttggggagcatgttgtgaagtgctcccctctcgtgagtcagtggggcttggaggtggctcgcagaggccagttctctgcactctcgtctcccggcagcagagctggtgaatggcatcgttagagaggcatgtggcagactgaccagggggagcacagggccctgtgaaatggagaccccagcatggacgtccagaatatctgcaagctgaggctcccctgagggattctgttccactccaggtctctaggggagccccgtttgtacaggcctgactttctgcctttttacaaaaatatttaattttttttgttgttttgagatggagtctcgctctgttgcccaggctggagtgcagtggcacaatcttggctcactgcaacctccacttcctaggttcaagtgattctcctacttcagcctccctagcagctgggattacaggtgcccaccaccacacctggttaattttttgtatttttagtagggatggggtttcaccatgttggctaggctggtcttgaactcctgacctcaggtgatccacccaccttggcctcccaaagtactgggattacaggtgtgagttattgcgcccagccccaaaatatatgattttagaaaagtaatagagatgagatcttagtgtgttgcccaggcttgtcttaaattcctggcctcaagtgatcctctcaccttggcctcccagggtgctggcattacaggcatgagccactgcgcctggccagctttctgccttttgatgttttactgctcccttttataatttccagctcttccaggttgttctttcagtttgttcacatcttattcttggagtagcacagtttgaatttgtttttatttttgttttctctaaacctctttattgaggcatgattggcatacagaaagctgtatatagtcagtgtatacaacttgatgagtttagagaagagtggacatccatgaaaccatcaccaccatctacgccataaacatatccatcacctccaaaagtttacttctgttctctttttttttttttttttttttttgagacaaggtttggctgtattgcccaaactggagtacagtggtgcgatctcagcttactgcaacctctgcctcctgggctcaaggcatcctcccacctcagctctcgagtagctgggactacaggcatgcgccaccacacccggctaatttttgtattttttatacaggtggagtttcaccatgttggccaggctggtctcaaactcgtgacctcaagtgatctgcccgccttggccccttaaagtgctgggattacaggtgtgagccaccgcccctgctttcatctttcttttttattgttttggtttttttttttgagacggagtctcgctctgtcgcccaggctggagtgcagtggcatgatcttggctcactgcaacttccacctcccaggttcaagcaattctcctgcctcagcctcccttgtagctgggaggtataggtgtgtgtcaccaagcccagctagtttattttttttttgtatttttattagagatggggtttcatcatgttggccaggctggtcttgaactcctgacctcaagtgatctgcccacctaggcctcccaaagtgctgggattacagttatgggtcatctcgcccggcttccctcttttttttttttttaaattattttgtgtgtgtgtggcagggacacagcataagaactacagtaaagcacagtttgtgaagggttagatccctgtttctggcttcaggggcctccggctgtaccccctgaatactgccaaggtcgcagctttctggcaggcagagctgactgggctgagcagtgccaccacggctggggctgctgggatgtcttgggaggagggttctattgccgtggcgtttgtttaccaaaggcccttccagagggagatctgcagaggaaaagagaggctgccttctcggcttggctctgagctgttcctacttgagacctgtgggtgctagaggaaaggccacacctcatgcctgtggacagacaggcctgggggctggatgcagtcacctttcaggctccatgcgggtctggcttctcttatcccttgcgtccatgcgtgggaagccctgagccctcccacgggacaggaggagccgtgaagggaggaagccccgacttcggggtgatcgtgcgtaagttcccacctgctctgggtcttggtttttctgtctatccaagggtgcgactgggccacgtgacctaaggctcactgcactgacattccgaggagctaggccggcagtggggcgtgtgggtgatggcactgtgctgagacgacccccatctcacggggtactgttggcatcccccttgtccccctagattctgtctgtaatggaagcctatcacctgtccttcgagaggaggcagaagtcgtccgaggtaagtcagccgggctgagcaggtcaggttaccttggagaccaagggcgccttctctggtcctcacgtgtccttgtgtcctgtcctctctctcgttggggctccttggctgcaggcccctgtgcagtccccgcagcgctccgtggactccatcagccaagagtcctccacttccagcttctcctccatgtcagccagctcaaggcaggaggagaccaagaaggactacagagaggtgaggcttccagaggaagggctggggaggggaggccttggcggccctgggcagtggtgtccagctgaagagccgtggcctgacaagggccgccctctcagcctgcttgcccatgctgaggccgctgctgctctgtggtggccgaggttggtgccttcaagctgggcccagcagcatctcgcggtgctgtatattttggtgtgcccttcatggaccactccctgagcagcaattagtgtggtagagtgcgtttgtgtattagagagaggataggctaagaagaagacaagtcaggtcatgtagaagtccgctgatttcagatcattttatttttattttttattttttgagataagagtctcgctctgttgcccaggctggagtgcagtggtgcaatccgggctcactgcaacctccacctcccaggttcaagcaattctcctgcctcagcctcccaagtaactgggattacaggcgtgagccaccatgcccggccagatctgcctcattctttagctgaggagtggactgttgaatggatgtaccaccttcgatggcccccccatgggtgctgaaccctcactgaccctaccatagtgtcccactacccacaagccgtgacatgctcttggaggaccaagtgagcttagctccatgcaaagccatagcagagacagccaagagacatggtccagagtctaacggagacctgaagttgtccctgggaggggtgtccaccctcatggtgtcccagctagcagatactgatagctgagttcagtatttctttttttttttttttttttttctttttgggacacggtctcactgtgtcacccaggctggagtgcagtggtacagtcatagctccctgcaacctcaaactcctggggattgcctccaaagtgctgggattacaggccgagccactgcacttagctaagtgtatttttctaaatcataggggtggctggcgtcttaggaaggacttgtgttccaaggcgaccatggcctcacctttccactgataaatatacatttatatgtatatacatataaatatacatatacatttatacaattccactgataaagttacagtttattattccctaaatggcagtgggttctgcgcacaccagcaacttcctaggatgccctccctgagcagttttagggacacatttacaggatactaaatcagccgggcgtggtggctcacgcctgtaatgccagcactttgggaggccgaggtgggcggatcacctgaggtcgggagtttgagaccagcctgaccaatatggagaaaccctgtatctactaaaaatacaaaaaaaattagccgggcatggtggtgcatgcctgtaatcccagctactagggaggctgaggcaggagaatcgcttgaacctgggaggcggaggttgcggtgagccgagattgcgccactgcactccatcctgagcaataagagcgaaactccatctcaaaaaaaaaaaaaaaaaactaaatcagacgttaaaagtccacaaatcaagccaatagattttcagaatgtttatattatttctattattattttattgttgaaatcatttttctaacattcttgttccttttattaaggtagaaaaacttttgagagcagttgctgatggagatctagaaatggtgagtttttagaagtgctttttattttatttttattttttagagacagggtcttgttctgtcacccaggctggagtgcagtggcgtgatcatggctcactgcagccttgaactcctggactcaagcaatcctcttgcctcagcctcttgaatagatgggaccacagttgtgcgcggccatgcctggctaatcataaacaaattttttgtagagataaggtcttgctatattgcccagtctgatcttgaactcctggcctcaagcgattctcctgccttggcctcccaaagtacttggattacaggtgtgagccaccctgcccagctttagaagtgctttttattataaaaagcttgttctagcttaaaacagccacccacctgtgtttcttgtctccggttcagtttcgggccatgtggactctgattttgtgcagagggcgctatgtttaatgcatatttggtaatggtgttgttatattttcctgacaagtaatgaggcagatcaacatacaggcacatagcgagtgtgggccctgcctttcagatgtccatattccaggagtgtgatgagacgttgccaagaccagagaccatgtccgaggcacagagtgtgggctcagagcccaggcccactagccagtgtgcaaggagggcagcttggttttaagagagggcagcgtcttggggagaggaggaagtagagaggcgaaggcagagcccagtggtgtttgtgaggttctgcagaagctgtggtcagctgggactcctgggccacgagagggggcctgaggcttgaggctctgaggagtcataagcaggtatctggataaagatggagccgccagccctgggctggcacctggagagaatgtcgtggcttgaaggaaggcgtctttcctaaccattaggtacatctgacagtgaaatgagtggacattggagacagccttccttagattctgacggacaggttcccctggcttgcctttggccctttgaaaggactgtgtcttccacttttttttttttttttttttgagacggagtcttgcgctgtcatccaggagtgcagtggcatgatctcagctcactgcaacctccacctcctgggttcaagcaattctcctgcttcagcctcctgagaaggtgggactacaggcatgcgccaccacacccagctaatttttgtatttttagcagagacggggtttcaccatgttggccaggctgggcttgaactcctgacctcaggtgatctgcctgcttaggcctcccaaaatgctgggattacaggcgtgagccaccatgcctgcccgtatcttccacttttaatggaggagggagtgaggtgctcactaagtgccctaggaccaggatgggtttatttttttgagagttttgctctgttgcccaggctggagtgctatggtgtgatcatggctcacagtagccttgaactcctgggctcaggcgattctctggcctctgcctcccagaatgctgggattacacctataagccactgcgcccagccctaggactagagttttaaagccatcaccctgaggcagcaccaatcttcctgtccttttttatgatagaagaaaataatctctggcataagctgtgaagtggaaggactgaggaaggcttcatgagggagcagaagccggttataaatggctgtggggttggagaaggaagcgtgggccctgattgggaacggttgatggtgtgtgtttaagatattgtgcatgcaaagacgctgaggatgtgttcctgtttccgttactctccatcaccaggtgcgttacctgttggaatggacagaggaggacctggaggatgcggaggacactgtcagtgcagcagaccccgaattctgtcacccgttgtgccagtgccccaagtgtgccccagctcagaaggtttggctttgtttctgttggtggaggtcagggaatgtaggcaatttttgtttttgtttttgtttttgttttttgagacagggtctcgttctgtcacccaggccggagtgcagtggtacagtcatgacccactgcagcctcaaccgcctgggctcaaatgatcctctcacctccgtctcctgactagctgagaccacaggcatgcaccaccacacctggctaatttgtttctttttgtagagactcagcctttctgtgttgcccagactggtctcggcctcccaggctcaagctatcctcctgcctcagcctcccacagtgctgggattacagacgtgagccactgctcctggccagcaaattcttcctttttccctcaggaaagttctcgatttctcagccagataattactgtactgcatgtctgtgaataggtattccccaagatatggtgggactcattagcctagggcgggtgccagctccctgcgtggcaggtaagcgagcagagatgtgtcccatgattagcgttttggctgctatctgggcccctgagtcccgtggcaggagcttatgaacagatgctcaagggtctccttccaggtacctaaagccccccagggaagctgcacgcatgttctgctgttgcttttactcaggtgagttcactcttcatggggactctccctccaagtgcagagaaatccccaaaccctctcccagctttccccaggggtaacatccttgcaaaactgtggtacagaatcacagccaggatatcaacattgatgcaatccgtggatcttagttcagatttccccagttctgcttgttctcgtgtgtgtgtatgtagttctgtacagttgtgccacatgtgtaggtttatgtatccaccatcacattcaagatattttctgtgacagatacttttatatactccttgttctttttatttatttatttttttattttttgagatagagccttgctctgtcgggcgatcttggctcactgcaacctctgcctcccgggttgaagcgattcccctgcctcagcctcctgtgtagcggggaccatagcacccaccaccacgcccagctaattttttgtatttttagtggagacagggtttcaccatgttggccaggctggtctcaaactcctgacctcaagtgattcgcccatctcagcctcccaaagtgctgggattacaggtgtgagccactgcgcctggcctccttgttcttttacagcctcttgttcttgttttgtaatgtctcaaaaagacagaacactaaactgctttatatctttgattaaattgaaacccaccccgccattcttttctagcccagtgttttagaattggtctttaaatcctttatcgaagtataattcacagacaataaagtctatgtatttatacaacttggtgagcttttacagatgtaaaacctgtgaagccatcaccaccatcaagacgcagcatgtgtctgtcaccggaaagcacagttctctcacaagaccaatcattcaaactgccctcttacagccacacccacctctctccctgccacgcccaccccaccatccccaaccgctggcaaccacttacctgttctccatttccctaatcctgtcacttcaaaaacgttacataagtggcttatgcctgtaatcccagcactttgggaggccgaggcaggtggatcacgaagttagaagatcaagaccatcctggctaacatggtgaaaccccgtctctactaaatatacaaaaaattagctgggcgtggtggcgggcgcttctagtcccagctactcgggaggctgaggcaggagaatggcgtgaacccgggaggcagggcttgcagtgagccgagattgtgccaccgcactccagcctgggcaacagagcaagactccgtctcaaaaaaaaaaaaaaaaaaaagttacataaatgtaatcacagtatacaatccttttgggattgactttcttcactccgtttgattccacactgttgcctagaatcaggtctgtttctccatggcggggtggcattccatttgtttaatggtggcatatactcactgtggaatgtccaaggacatgtagtttgttgctagtttggggaatattaccaataaaactgccacgaacaaacattagagtagacgtttcggtaagaacacaagttttcatttttctaggataagtgcccaagagtgcaattgtggagtcatatggtcattgcatggcaattccatggttcatttttataaggaactgacagtcttttcccaagcaggctgtatcattttacatgcccaccagcgatgtatgagtgatccagttcctcctcgtcctccccagcactgggtgtggtcattattttctgttttagccattcagataggtgtgtagtactatctcagtgtggccttaatttgcatttctctaatggctgatgctgttgaacagcttttcatgggcttatttgccatctgtatatgttcttcagtgaaatgtctgttcatttgttttgcccattttctaattggtttgtttttggctttatcgttgaatttatatattctagatatgtggatatttgttagatacgtgctttgcagacattttctttcagtctgtagcttgtctataatttcctcacatgggctttcacagagaaaaaggtttttagacatctcatttgtcagtatttccttttatggattatacttttggtgtcaagtctgagaattctttgccttgctctagatttccaactttctcctgttttttttaagttataattttatattttatagttaagtccatgatccaatttgtgttaatttttactcaaagtgtgagatttaggttgaggttcttctttgttttttcttgcctacaagtgtccacttgcgccagcaccatttgttgaaaagcctctccttcctcccgtgacttgcctttgcacctcagttggctatagattgtgtggatctatttctgggttctctgttctgctgcattgatctatgggcccatcctaccagtaccgcgctgtcttgatgactgatgctgtgtagtaagcctcagtattggattgaatgattcttcctaatttattcttctttgccaggaatatttcagctattctatggcctgtgccttgccatgtaaattttatttatttatttacctattgcttacttactaacttactcactcttatagtacccagactggtctgagctatatcaattttagaattagtttttgtatgtctacaaaataccttgctcggattttgataggaattacattaaacctatagatgaactggggagaaataacatcatatgactcaacgtatgttgagtcttcatgaacatggtacatctctccaagtatttaggccttctttgacttctttcatcaacattttgtgattttttttcagcatacagatcctgcctgtgtcatgttaagtgtacacctcagtatttcatcttctttcaagcagttgtaaatggtattgcatacatagcatgcattcatgtgttagctatctaattatagatgtgtatgtcccatactaagagaattaggctgggctcagtgtcatacacctgtaatcccaacactttgggaggccgaggttagaggatcacttgaggccaggagtttgagaccagcctggccaacagagtaagaccctgtctctaagaaactaaaaatataaaatagaaaatagaaaatgaatttggccgggcacgatggctcacgcctgtaatcccagcactttgggaggccgaggcgggtagatcacctgaggtcaggaattcgagaccagcctgaccaacatggagaaaccccatccctactaaaaatacaaaattagctggccgtggtggtgcatgcctgtaatcccagctactcgggaggctgaggcaggagaatcgcttgaacccaggaggcggaggttgcggtgagccgagatcgtgccattgcactctagcctggggaacaagagtgaaactccatctcaaaaaaaagaaaatggatttgactttataaaatagatagagtggtgttagcctttatattgtaggataattttaccatttctaaaaagaacttcagcgtgggtgactctaaggatattgaaaatgactaaagttttccctcacacatttttcagctgtgaggtaacatgtacactggggatgtgcaccttttgacctggccccctgctgctggatgcacatggtccagaacacaatttccccgaggtgggtggctatgaaaacacaggataagaaaggcagatggtgttccctagcatctggtgggaagtgatgaagccctcgggccctcagtacctgtgtgtggcgagattgctgcatctccgctgctgctgtttttgccatttttctcctccctgtgttttcccactttaattacacagtaaaatactgtggaactcaattgggtgaagtcttaggttccctgtacttctaaaacctcttattctctttttgtgatttctcaaaaagacacaccactaaactgcttcatgtctgtgattaaatgaaaatccactccccccatcctcttctagcccagtgatttattttattttattttattttattttaatttttagagatggggtttcactctgtcacccaggctggagtgcagtggcacaatcatagctcacttacagcttgggactcctgggctcaagtgatcctcctgccccagcctcccaaagtcctggaattacaggcatgagccaccacaccaggcctccagtggtgtttaatgtattacttcttttttttcttttttgagacggagtctccctctgtcgcccaggctggagtacagtggtgcaatattggctcactgcaacctctgcctctcgggttcaagacattcttctgcctcagcctcccgagtagctgggactacaggtgcatgccgccacacctggctaatttttgtatttttagtagagacagggttttgccatattggccatgctggtctcaaactcctgacctcaagtgatccgcttgcctcggcctcccaaagtgctgggattataggcatgagccactgcgcttggcctaaacttttttttttttttttttttagagacggtcttggtctgtcaccaaggccagagtgcagtgttgcaatcatagctcactgaagcctcaaactcttgggcccaagggatccttttgcctcagcctcccaaatggttggaactacaggcacgtaccaccatgctgggctattttattttatttatttatttattttttgagacagggtcttgctctgtcgccaggctggagtgcagtggcgccatctcggctcactgcaacctctgcctcctgggttcaagcaattctcctacctcagcttcctgagtagctgggactacaggcatgcgccaccatgcccagctaatttttgtatttttagtagagacggagtttcaccatgttggccaggatggtctcgatctcttgacctcatgatccacctgcctcggcctcccgaaagtgctggcattacaggcgtaagctaccttgctggcctattttttttatttttgtagagacagggtcttggctgtgttgtccaggctggtttcgaactcctgggcccaagcgatcctcctgcctcagcctcccaaagtgctgagattataggcgtgagccaccacacccggtctccagtggtgttttagaatttgtttttaaatcttttattgaaatataattatatacattataatttatataatttatatttacataaagcatatgtatttaaagtatacaatttggcaagttttacagatatataaacctgtgaaaccatcaccaccatcaagatacacaacgtttccctcacttgcaagagtttcctgtgagattttgccttcccccccactctgacccccccattcccccatcgcctctcccaggcaacccgtgacctgcttttcatcatcatggattagttaacactttcgagaatcttttgtaagtggaattctaacgcatgtcccttttcatgtctgccttctttgactcaggatatttttgagacccatgttggatcaggagttcattgctggatagtagttgattgggtggacacaccagaatttgttgtttcattcacctgttaatggacatctgagtagttttcctgcttctggatttgtaaataaagccattgtgaacatttgtgtacaggcctttgtgtggatatatacgttggtgggtaaacacctaggagttacaggcctttgtgtggatatatacgttgttgggtaaacacctaggagtataattgctggattatatagtaaggatatgtttaaccttaaaagaaactgccagttttccaaagtggttggagtagtttctgttccctccagcagggtttgagcattccagttgctccacatccctgccaacatttggtattttgactttttttttttttttggagatggagtctcgctctgttgcccagcctagccaacgtggcaaaaccctgtctctactacaaatacaaaaatcagccaggtgtggtggcacacgcctgtaatcccagctacttgggaggctgaggcaggagaattcgcttgaaccggagaggcagagattgcagtgagccaggctggatggagtgcagtggtgtgatcttggctcactgcaaccttcgcctcctgggtttgagcgattctacagcccaatgcatgcctgtaatgtagctgggattacaggcaggtgccgccacacctgggtaatttttgtatttttggtagagacggggtttcaccatgttggccaggatggtctagaactcctgacctcaggtgatctgcccacctcggactctcaaagtgttgggattacaggcatgagccactgtgcccagccttgagtttttaactttagccattctgataaatatgcagggtatttcatttagtgtgtgtatgtatgtgcacatgtgtgttttccagcttcttttttatttttgagatataatttacatataataaaattcagcctttaatttagcatacagtttttttttttaaagaggtaacatttttaatcatcaaaaagtaaaattattctcacctaaacccaagaatcactgtttcttatagcggtggtttaaacagaggtgcaaacagcaagtgaatctcgtcgcctttgcggggctgtggccatgcccctcaaaggaaatttggaggctctacagccctggtgaaaaaaaaaaaagtgaaattagccaggtacagtggcatacatctgcagtctcagcactttgggaggctgaggtgggaggaccacatgaacctgggagttcaagaccagcctgggccagctggtgagaccccatctctacaaaaaaaaaaaaaaaaaaaaattagctgggcacaatggcttgcacctgtggacctagctacttgggaggctgaggcgggaggatcacttgagcctaggaggtcgaggctgcagtgagccatgatggtggtgccactgcactccagcctgggcaacagagtgagaccctgtctcaaaaaaaaaaaaaggaagttgttttttggcatgccacatacttctaaacaaattggaatccatcctggatcccgccatgatcccgcattgtgtgtgggagctgtggggggcacatggtgccaatcactccagcccagtttcttcaatactgatgacgtttgtgtttccatcttctgcgcttcccagaggctggcgaaggttcctgccagtgggcttggtgtgaacgtgaccagccaggacggctcctccccgctgcatgtcgccgccctgcacggccgggcggacctcatccccctcctgctgaagcacggggccaacgcaggtgccaggaacgcagaccaagccgtcccgctccacctggcctgccagcagggccactttcaggttcgggctgtgtgttgggggtggtggagcagggtgtctgctttgggctaggaccttgtgcttggtaggaacgctgcaggggtttggtggctaccctggaggacactgctcccccgagccctgagattctgaggtgcacacggtaggccactcagcctcggagcacagagccttgatgctccctgggggtggagccagtccctgccccactgccactcccatctgggtgataccgaggttgtcattctgattcttgcccccagcaggatctggctcttgagctcgtgtggtggccaccgagcactgtccccatggtcatcttaccacctttacaccccgacagtgccttgctctgggccaaacagttcagcacttcataaagaacagtcagggccccatagaggggctcaaggaagaattttgaattttggagtgattaactttttgaaagtgctggggttttttgccttttttttttttttttttttttaagacatcgccttgctctgtctcccaggctggagcgtgggagtgcagtggtgcaatctcagctcacactgcagcctcaatctcctgggctcaaacaatcctcccatctcagcctccctccctagtagctgggaccacaggcgtgcaccaccacacctagataaatttttcttttttttttttttttttttttttttttttttttgtggagatggggtttcaccatgttgtccagactggtgttgaactcctgagctcaagcgatcctcccaccttggcttcccaaagtactgggattacagggatgagccacagcaccaggccctgcttttctttaaggaaaactgtgtgtatattttttcattttcctttatcagttctactgttaactttttaaagaaaggagccatatttcaggtcttgcatctctctcgccaacacctagcatagagcttcaggcatggctttcctaatctgtaaattcggagtggcgattgcagctctccctgaggtagaaaggatagaaaggtgaagtgagatcactgtcacccagcacatcgggtgaagtgagatcactgtcacccagcacatcgggtgaagtgagatcactgtcaccctgcgcttcaaccgcacagagcagccccgcagcagatggtagccctcccctcttcacctggtcccttttctcctgagagtctaaagtcttctcaataagctcagagacggctgggcgtggtggctcatgcctgtaatcccagcattttgggaggccgagacgggtggatcacctgaggtcaagagttcgaggccagccctgccaacatggtgaaaccccgtctctactgaaaatacagaaaattagccaagcgtggtggcaggcgcctgtagtcccagctgctcaggaggctgaggcgtgagaatcagttgaacctgggaggcggaggctggagtaagccaagatcacgccactgcactccagcctgggcgacagagcgagactctgtctggaaaaaaaaaaaaaaaaaagaaagaaaaaccaaaaagaacaacaacaaaaaaataagctcagagacaagtcaaaagaatatcaaacttgagcatttctctccagaaactttgttttcttattttatttatttatttatttatttttcataatttttctctggcaggaaatgacagaaattttgattaagtttgcacgttttccttctctggcccaggtggtgaagtgtctgttagattcgaatgcaaaacccaataagaaggacctcagtggaaacacgcccctcatttacgcctgctccggtggccatcacgagcttgtggcactgctgctacaggtgagggccccttcctgtcctcattctacacacctgcgccagttaacagggcgcctccacccagcgacccccgcagcgcactggggatggagaggcccggccacccatcaaccccaggcctctggggagaggagcagggcgtgcgtcttcccacacggggttctccgatgggaacagatggtgccccagcatctgggatgcggtctcaagggctccgacgctgcttttgccaagggtttgggtctcacctcaccgaccgggaatgtgtcacgctgttacctgagcatgggctgagtggccgcctctgtccctgctgctcttgaaaaaggttatgtgaatgcattagaatttcttaaagaagtagggaaaaaccaacctgtccatgactgtgctactcaagggaaactcattatggtggacttttgacaaatgtgtatagtttcagtgttatttattaatttttttttgagacaaggtcttgctctgtggcccaggctggaatgcaatggcaccctcacagctcactgcagcctcagtctcccaggctcaggtgcctcagcctcccagctaactgggactacagatacataccactgcacctggctagtttttgctgtttgtttttagtagagatgggggtctcactatgttgcccaggctggtctcaaactcctgagctccaacaatcctcttgcactggcctcctaaagtgctggattacgggtgtaagccacggggcctcgccaagtattgttttctctttttccgagatggagtctcgctctgtcacctaggaatgcagtggcttactctcagctcactgcaacctctgcctccggggttcaagcgattctcctgcctcagcctcccgaatagctggaactacaggcgcccaccaccatgcccagctaatttttttgttttttggtgtttttttttagtagagatgggatttcactatgttggccaggctggtcttgaactcctgacctcaggtgatccacctgcctctgcctcccaaagtgctgggattataggcatgggccactgtgcctggccccaagtattgttttctgtcttaatgttatttaatgtagaaacttatttactcaaactttgatttttaatggttgcataactatggatataccatagtgatttttttgaacctgtttctgctctgtacatttaagtggcttctgttttctctgctattaggataaatgctgcagcgaactctttgtctataaatctttttttctcagtattacttttcctccccaaattttaaggaaactttcagacataaaaaaaacaatgtgttttatagcgaatacctgtatacccacagccagattccatgctgacgtttcgtagcgttccttttgatcgtgtggtttctctttccagcacggggcctccattaacgcttctaacaataagggcaacacagcgctgcacgaggctgtgattgaaaagcacgtcttcgtggtagagctgcttctgctccacggagcgtcagttcaggtgctgaacaagcggcagcgcacggctgtagactgtgctgaacaggtaggtggagagggtcgaagagccgagggaatcctgagctcctcacagctccctctggatccctttgtttaagctggatctaaaatagcaacacctggcccttggcatcgccgggctgggcgtagttggtgtgccagaagtccacagcgtgggtagatggctggtcctcagtctcctggtcagaggtggtgctctgggaaccaggaatcattcttttcacaggtggttttcaaaggcctgagtggaggggcccccccctcagctagcagtagggctgtggtccggtagttacatagagtcaggcactcaggaaggagcaagtcatgatgttctggtgtcaccatcctcacagtgtgaacacagccgttgtcttagcagcacgatggagaaggtttgttttgttggtggatttaaaactccttgaggccaggcacagtggctcatgcctgtaatcccagcactttgggaggccaaggaaggaggatcacttgagcgcaggagctcatgaccagcctgggcaacatagtgagaccccctctctacaaaaaatcaaaaaatcagccgagcataggggtgcatgcctgtagtcccagctactcaggaggctgaggtgggaggatcgcttgagcccaggaggtcaaggctgtagtgagctgagattgtgccactgcactccagcctgggtgacagagactttatctcaaaaaaatgaaagtaaaagtccttgagtcctgtaggaatcgtgattattggcctactgccttctccagtgctgtggatgcttgcgtggagagcggcggggaagggtccttttcccctggcgagcggcagctctttctgttcctgttttcctgctgagtctttcttttgttttctacccaagatagacagcgagtaggctgttaagtgacacaactgagaagctaacatcaccatcaatccactccatggacaggctccttagagtaattttttgtttcttaagacagagtcttgctctgttgtggcgtgatcttggctcactgcaacctctgcctcctgggttcaagcgattctcgtgcctcagcctcctgagtagctgggattacaggcacgtggcaccacacctggctaaatttttgtattttttgtagagacgggtttcaccatattgctcaggctggtcttgaacacctgacctaactgatccgcctcccttggcatcccgaagtgctgggattacagacgtgagccactgtgcctggcctccttatattaattttcagtgacagaattgaaatattttaaactctcagtttagtactttcttaaatgattatgttgaattttttttggtttttaaaatttttaattttattattattattattttttgagacagagtctcaatttgttgcccaggctggagtataatggtgcaatcttggctcactgcagccttaacctttgggcgcagatgatcctccaacctcagcctcccaagtagctgggactataggcgtgtgccaccatgaccagctaatttttttttaatagagacagggttttgccatgttggccaggctggtctcgactgcctgggctcaagcaatccacccgcctcggcctctcaaaagtgctgagattacaggcgtgagccatcgcgcctggccttttattatttttaaatagagacagggccttgctatgttgcccaggctagtcttgaacacctgggctcaagcaatcctcccacctcagtctcccaaagtggtgggattgcacgcgtgagccaccgtgcccagttaattaatgtgtttcaatgagtacttactatatgggggccctcaacagcctcatgataagcatatgatagtagatcttattatggttgagctggttgcatggagtggttgaatccccagcgtggagtccacagagagggcagagcttttacccagtggtaaaagcagagccgggctccccatgcaggcctgcttttaccactgggctttatggcctccaagctccatttgtaattatttctgagctttttctgcccagtcacactaatactgacatttagatcaaaaacaaataataacctattaaaaaagaataaaaacattactgttccttttccctttcaaattgcagaattcaaaaataatggaattgcttcaggtggtaccaagctgtgttgcttcattagatgatgtggctgaaactgaccgcaaggagtatgtcactgttaagatcaggaaaaaatgtaagagtttacgttctttctgtcacgctcaagttgggtatatttagacattcatgagtagttgctggtgttcatttaattgtatatgtaaagtgtaattataatcatgcctggaggagatacaggcaccaaagaaatgtatgttacctcccaatttatcagactatgggtaagctttttttgttactagttttctggttgatggtaatgatgtttcctgaggaaataggatagaaactgtcaacactaccttgaaggttcaggtgtctgcctatggagatggggaacagtctctgggatagtttctttcatgcctcatgttccaaagtcaggtgttctgggcatttcctggacatccagggtaaatgctacctttcaagattttttttttttttttttttttgagacagagtctcgctctgtcacccaggctggagtgcagtagtgtgatctcagctcactgccagctctgcctcctgggttcacgccattctcctgcctcaagtagctgcctcccactctcaagtagctgggactacaggtgccagccaccacgcccagctaattttgtttttgtatttttagtagagaggggcttcaccgtgttagccaggatggtctccatctcctgacctcgtgatctgcccgccttggcctcccaaagtgctgagattacaggtgtgagccaccaagattttttatttagttagtttttttgagacagagtctcactctgtcacccaggctggagcgcagtggtgcaatctcagctcacgcaacctctgcctcctgggttcaagttattccccttcctcagcctcccgagtagctaggattacaggcacgtgccaccatgcctggctaatttttgtatttttagtagagacagggtttcacaatgttggccaggctggtctcaaactcctgacctcaagtgatccgccctccttggcctcccaaagtgctggagttacaggtgtgagccaccgcgcctggcctcaagatttttttttaagtttgtacgtgtacggaggttgattataattaaaacagcagttgccgaacagcagtgagactgaagtattttcttctttttaaaaagtttagaaggggtccttgttctacttttttttttaatttacaatatgaaatattatccagtgaggtatgcaataatgcaatacaataatatggataaacccattcacatatctcgataaccctgagactgtctcaccataattggttgtggctgggggagttaagggagttaaggttttatttttctatttcatgggggttctcataatacaggctgactaccccctatctcaaatgcttgggaccagcagtgttttgggttttggaatatttgcattatactcattggttgaggatccaaatcaggaaatcagattcttctgagcatgaagtcaaagagttcaaaatgtctcggattttgtagcttttttttgagatggagtcttgctctgtcgcccaggctggagtgtggtggtgcaatctcggctcactgcaacctctgcctcctgggttcaagcgagtctcctgcctcagcctcttgagtagctgggattataggtgcgtgccaccacgcctggctaagtttttgtattttgggtagagatggggtttctccatgttgcccaggctggtcttgaactcctgacctcaagtgatatgcccacctcggcctcccaaactgctgggattacaggcatgagccactgcacccagcctgtggcattttaggctttagatttttggattggagatactcaacctgttataaataggtactagctgtgtttctttaagcaaattcagtgcttcagtttctaaattttgtaaatctgagaatagaaagattgtgtctgtgctgtaattttaaaataatctttacaactgtttttgaagtttttagatgtttatctttttatctacagggaactcaaaactgtatgatctaccagatgagccttttacaagacagttttactttgtccactcagctggtcagtttaagtgagtatgaaactcaagttgatttctgtgcttttgcccctagtttactccaagctgcacgtaagctgcttcaattgtaattggttatggacaaatctgcacctactaatgtcaaaaatgctgccaccttgtggccaaccagagtgtttcatgccactgtcccaaatatttattttcgtttattttgggttttaggggaaagacttcaagggagattatggcaagagatagaagtgtccctaatttaaccgaaggttctttgcatgaggtaagttattaaacactggcttttaatcatattttctaaagcccggctttgtcaaaagtaatccatggtaaacacgtctccttgatcgtcatcttcattattccgtgcgccgtatgagttagcagcagttaaaactggaattatttcatgggacagtgtagagtacagacttcactgattgttataactaaaagtacatttctgagcagaggagtggaaagtgttacatgtgtgggaaaccacaggtcttggtgctcataggagatgaaacatcccacatttcactatggttttaatcaccaaagaaagaaaacgacagtttgtatatagatgggtaaatgatgtctccaagtatggtgtacagttgctcaattctttatgtggccatcttcccactacatttttttatttatttatttgagacagagtcttgctctgtggcccaggctggagtgcagtggcacgatctcggctcactgcagtctccacctcccgggttcaagcattctcccgcctcagcctcctgagtagctgggattacaggcatgtgccactattcccggctaatttttttgtatttttagtagagacgcagtttcaccacgttggccaggctggtcttgaactcctgacctcaagtgatctgcccgctttggcctcccagtgtgctgggattacaagtgtgagccaccgtgcccggaccctactgcatttttaaatcactcagaagcttgattgaaaacctgtgatcggagacagtgattcttctcagaaccacagctttccttgttgctgatgagaatttatagcatatgtagcataggcttgttggaacaaatacacaaaagttctaaattgttttagataattaaaatgattttaattaacatgactaattttgataccatatttagtcttatgtggtgttgctaggagacctgctgctttgtgggaaagccagaatcgttgaaatctgcctgagttccatcaagtgctagcttttcccttgctagctgtaggactttaggcaggtggcttaactttgctgatcctgtttcctcaggtgtaaaacggggataacaatagtagtacatgcctcctagagtcataaagattgtgaaaacaagtgaaacatttactctgacacatgtagtatgcacatgccatgttaccacgacagggatgtgagaattgaaattatgcctgtcaagcactgagcacattatgtgacactaggcactaaggggcagctgtcactgtcatggttgtggcttccagtacagtgaggacgtcaacggttaaaaatgtactttttctttagccagggaggcaaagtgtcacactgagacagaataacctgccagctcagagtggatctcatgctgctgagaaaggcaacagcgactggccagagaggcctggactgacacagactggccctggacacagacggatgctgcggagacacacggtagaggatgcggtcgtgtcccagggcccggaggctgctggccccctctccactccccaagaggttagtgcttcccggtcctaacaggaatgaggagttgttgaacccactgctaggaagcaaggatgcaacaagatgatgctgagcgtgaacacatctgagaactaaatgtgcttccatgagactggcttgagaagtcttcagcaccaagttcctgaaagcttttctgtggcaggaaagaatgcaacaaaaaagttaaccaccaccatctctctcctcttcaaagctaatgaatacaattgaaacagacaaaaattccagtagcatccagatccttaagccagaggtgcatgcttctttttaagtatgagggtttgttggtcacagtgggagaggtttcaccaccgcattctgacctcctcctcccaaaaggtgctaaacctctctgacctgtgtacattcacaaaccacagctagaattcctccacctaggattaagctggagagaagtaagtaatttaggtttcatggtactgtagaggccaggctgaaatgtcatatctgaaggaagaaagcagcagctggacaatgtttctttgcaaagcaacactcgaaccaaaagatgcctcaatcccattttgatattcattttagtgaaaggatgcatcagacctgttccacatcatgcacatgggaaagggtggttatcattttccttctaacaagtaggtacagatattcggttactacacgtgcacctgtagcagtatttctagaaacatccctttttgttgagaacctcccttgaatgtctgtcacactcacacctgacgggatggttactggattagagagtagatttggcacatcttttcttagtcttttgattcaaattcaaaacttaacagcacaaaccaggtcagagttactttcggttagaatttattgccatttattcctttttataaatttctatagattatactgttatttttatgttattggcctagagctacacgtatatgggtttgtcctgagtccgttttcaaatgaccttgtgatagggaaatggttttgtccatgttcttggaaatacttgtgtatgtacagaagaagggagggattatttttctacaaagtaatttatgatttctaattttctaatgtgccttggatatgtgccaaatgatggaaaagaaacagtaaactttatgattcttgactgtgtcatggtatttttttttagttgtttggctgcagatgatatgtttctcagcctgtctgctgtaaacatgtgctttgtgtgtgagaaaaagggtccccattgaatggatatacatttttcagttatagatgtgagattgaaacatgggagcttgatcacttagctcattattcatctactgaccaaggcctacttaacccagtaggcacagtgtcccgggcccacaaaaatgtttttctttggaaatcagaagaataaaatgaatacagcttcctaccccaaacaaacaggaaatgagccctgttgctttgctaatttctttgttctgatttttccttttccccttttttttttttttttgagatggagtctcgctctgtcacccaggctggagtgcagtggcaccatctcggctcactgcagcctccgcctcccaggttcaagcaattcttctgcctcagcctcctgagtagctgggactataggaacccaccaccatgcccggctagtgtttttttttttttgtttttttgtttttgtatttttagtagagacagggtttttcaccgtgttagccaggatggtctcaatctcctgacctcgtgatccgcccgcctcggcctcccaaagtgctgggattacaggtgtgagccaccatgcccagccttccctacttttaaacaaaaccaccttatagactgaagctgctgtggttctataccatcctaattaatacatcctatacagtttatcagcacaggtattctcaagatacaaatacacacatttgacaccacctaatatgttggggtagtgcaatataattttgaaaacattttcttgagatgatggagtctcgctctgtcacccaggctggagtgcagtggcaccatctcggctcactgcagcctctgcctcccagattcaagcaattctcctgcctcagcctcccgcatagctgggattacaggtacctgccaccatccatgcctggctaatttttatatctttggtagagatggggtttcaccatgttggccaggctggtcttgaactcctgacctcaagtgatctgcccacattggcctcccgaagtgctgggattgcaggcatgagcgactgcgcccagctgaaaacattttcacatatacccatttaatttcaacaatcactgtgaatggtagaattgtcaaatgaggaaacaggttcagaaaaataaggggactgcgagggatctcacagccaggatcaaggcctggttggcagtggcagctgcaagcttggtgtacccttcctctggagaggtaaatgctgtttctttttgagctattctggtcatcagtaatgttttccatcttaagtgactccctcgattatttttaaaaaacagttgtcatcctggccaacatggtgaaaccctgtctatactaaaagtacaaaaattagctgggtgtggtggcgtgcgcttgtaatcccagctacttgggatgctgaggcaggagaattgcttgaacctgggagagaggttgcagtgagccaagatcatgccactgcactccagcctggcaacagagcaatactccatctcaaaaaaaagcaaacaaccagttgttttttccaattgctttccctacccaaaacttgatgtgacagttgagaaattaatgcccctaatttccatttttgtggaaaaaagttttgaattcaaagtaacgcaagttcactgatttaaattagaaagtttagaataaccactctccactccctaaaatgtactccagcctcttattgccatcaggaacctctctccttctacacggaaccacttttcactctcaggtaggtgtctgaaagagtctgaccatctttaaacacactcacagcagttgccattaggacagtggttatcctgtgagaaagcacagaacttgtgaactgcctcatgtcctcctagcatttgtatgtaaatgaggcctaaagcaaaatttacctgtaaatgggatttttttcaaaatccccgaccaaattttttttaaattaccagtttaccctgacagaaaatccccagccagatttcatcttatgatcattcttttaaaaatatgttgatgttctcaacggttctacttatttataatgttagatattgttctatttcttcactgacaatagttgcaaatttcaaatatagtagaatctccagtttaaacatgtatcagtagtatgctggctaacgcagagactggggtttgcaaaccacatttcccttcatttttttactaatcctattcaccttgttaaatttatgaatttaatcctgtgctaggtctcacaggactacgacatttaaaaggttacaccaaacagctggttgatggttaagtttatgatttaaatatatgagcagtggcttgcacctacagtctcagctacgagggaggctgaggtgggaagatcagttaaactcaggagtttgaggccagcctcagcaacacagcaagtctccgtctctgaaaaccgtaacttatgagtgcaggttttcataacctagtggaaagaaagcacaacaaaagagagaacatttaagtcacctgcaacattatcagtgatatgttaccaaaatgtttaaatgctgaagtgtctcaactggatttgaaatcattagaagtcatttctcttacaaacatgtttattactgtagtagcattaccaacatgtctattttggtcattttctttttcagtcattatcactctagttattttggagggagtggtatttgttaatatcagtacctctgaaaaacaattataaatgagatcaaagctagcttttttttttctttgagatggaatcacccaggttggagtgcaatggcctgatctcagctcactgcaacctctgcctaccaggttcgagcctcccaagtagctgggattacaggtgtgtgccaccacgcccagctaatttttatatttttagtagagacagggtttcaccatgttggccaggctggtctcaaactcccgacctcaaatgacctgccagcctcagcctcccaaagtgctgggatcacaggtgttagccactgtgcctggcaaagctaggaattttcttacattaagtggaagtagtatctgcaggaagagaaagagcttacctgctttcagaatctacatcttagaatattagatgtgctcaaatgttgaacctgattcagtctgatggacaggttttaattccccttatgttattggcggctgctgctgctgctatatttttcttcctgaagagtgctggagcagcttctgtttccgccacggacacttttcctatctaatattcatggcacagttgcaaagggtagagtcatgctggtacacgtgcttaaaagcttttggtcagggaggagccaagatggccgaataggaacagctctggtctacagctcccagcgtgagcaacgcagaagatgggtgatttcagcatttccatctgaggtaccgggttcatctcactagggagtgccagacggtgcaggtcagtgggtgcagcgcaccgtgcgcgagccgaagcagggcgaggcattgcctcactcgggaagcacaaggggtcagggagttccctttcctagtcaaagaaaggggtgacagacggcacctggaaaatcgggtcactcccacccaaatactgcgccttttccaacgggcttaaaaaacggcgcaccagattatatcccgcacctggctcggagggtcctacgcccacagagtctcgctgactgcaaggcggcagcgaggctaggggaggggcgcccgccattgcccaggcttgcttaggtaaacaaagcagcctggaagctcgaactgggtggagcccaccacagctcaaggaggcctgcctgcctcagtaggctccacctctgggggcagggcacagacaaacaaaaagacagcggtaacctctgcagacttaaatgtccctgtctgacagctttgaagagagcagtggttctcccagcacgcagctggagatctgagaatgggcagactgcctcctcaagtggatccctgactcctgacccgcctaactgggaggcaccccccagtaggggcagactgacacttcacacggccaggtactctgagacaaaacttcctgaggaatgatcagacaacagcattcgcggttcatgaaaaaccgctgttctgcaaacaccactgctgatacccaggcaaacagggtctggagtggacctctagcaaactccaacagacctgcagctgagggtcctgttagaaggaaaactaacaaacagaaaggacatccacaccaaaaacccatctgtacatcaccatcatcaaagaccaaaagtagataaaaccacaaagatggggaaaaaacagagcagaaaactggaaactctaaaaagcagagcgcctctcctcctccaaaggaacgcagttcctcaccagcaatggaacaaagctggacggagaatgactttgatgagctgagagaagaagacttcagacgatcaaactacgagctacaggaggaaattcaaaccaaaggcaaagaagttaaaaactttgaaaaaaattcagacgaatgtataactagaataaccaatacagagaagtgcttaaaggagctgatggagccgaaagccaaggctcaagaactacgtgaagaatgcagaagcctcaggagccgatgcgatcaactggaagaaagggtatcagcgatagaagatgaaatgaatgaaatgaagcaagaagggaagtttagagaaaaaataaaatgaacaaagcctccaagaaatatgggactatgtgaaaagaccaaatctacgtctgattggtgtacctgaaagtgatggggagaatggaaccaagttggaaaacactgcaggatattatccaggagaacttccccaatctagcaaggcaggccaacattcagattcaggaaatacagagaacgccacaaagatactcctcgagaagagcaactccaagacacaaaattgtcagattcaccaaagttgaaatgaaggaaaaaatgttaagggcagccagagagaaaggtcaggttacccacaaagggaagcccatgagactaacagcggatctctcggcagaaactctacaagccagaagagagtgggggccaatattcaacattcttaaagaaaagaattttcaacccagaatttcatatccagccaaattaagcttcataagtgaaggagaaataaaacactttacagacaagcaaatgctgagagattttgtcaccaccaggcctgccctaaaagagctcctgaaggaagcactaaacatggaaaggaacaaccggtaccagccactgcaaaatcatgccaaaatgtaaagaccatcaagactaggaagaaactgcatcaactaatgagcaaaataaccagctaacatcataatgacaggatcaaattcacacataacaatattaactttaaatgtaaatggactaaatgctccaattaaaagacacagactggcaaattggataaagagtcaagacccatcagtgtgctgtattcaggaaacccatctcacatgcagagacacacataggctcaaaataaaaggatggaggaagatctaccaagcaaatggaaaacaaaaaaaggcaggggttgcaatcctagtctctgataaaacagactttaaaccaacaaagatcaaaagagacaaagaggccattacataatggtaaagggatcaattcaacaagaagagctaactatcctaaatatatatgcacccaatacaggagcacccagattcataaagcaagtcctgagtgacctacaaagagacttagactcccaacacattaataatgggagactttaacaccccactgtcaacattagacagatcaatgagacggaaagttaacaaggatacccaggaattgaactcagctctgcaccaagtggacctaatagacatctacagaactctccaccccaaatcaacagaatatacatttttttcagcaccacaccgattccaaaattgaccacatagttggaagctctcctcagcaaatgtaaaagaacagaaattataagaaactatctctcagaccacagtgcaatcaaactagaactcaggattaagaaactcattcaaaacagctcaactacatggaaactgaacaacctgctcctgaatgactactgggtacataactaaatgaaggcagaaataaagatgttctttgaaaccaatgagaacaaagacacaacataccagaatctctgggacacattcaaagcagtgtgtagagggaaatttatagcactaaatgcccacaagagaaagcaggaaagatccaaaattgacaccctaacatcacaattaaaagaactagaaaagcaagagcaaacacattcaaaagctagcagaaggcaagaaataactaaaatcagagcagaactgaaggaaagagagacacaaaaaacccttcaaaaaattaatgaatccaggagctggttttttgaaagggtcaacaaaattgatagactgctagcaagactaataaagaaaaaaagagataagaatcaaatagacacaataaaaaatgataaaggggatatcaccaccgatcccacagaaatacaaactaccatcagagaatactacaaacacctctacgcaaataaactagaaaatctagaagaaatggataaattcctcgacacatacactctcccaagactaaaccaggaagaagttgaatctctgaatagaccaataacaggagctgaaattgtggcaataatcaacagcttaccaaccaaagagtccaggaccagatggattcacagccgaattctaccagaggtacaaggaggaactggtaccattccttctgaaactattccaatcaatagaaaaagagggaatcctccctaactcattttatgaggccagcatcatcctgataccaaagcctggcagagacacaaccaaaaaagagaattttagaccaatatccttgatgaacattgatgcaaaaatccgcaataaaatactggcaaaccgaatccagcagcacatcaaaaagcttatccaccatgatcaagtgggcttcatccctgggatgcaaggctggttcaacattcgcaaatcaataaatgtaatccagcatataaacagaaccaaagacaaaaaccacatgattatctcaatagatgcagaaaaggcctttgacaaaattcaacaacccttcatgctaaaaactctcaataaattaggtactgatgggatgtatctcaaaataataagagctatctatgacacacccacagccaatatcatactgaatgggcaaaaactggaagcattccctttgaaaactggcacaagacaggggtgccctctctcaccactcctattcaacatagtgttggaagttctggccagggcaattaggcaggagaaggaaataaaagatattcatttaggaaaagaggaagtcaaattgtccctgtttgcagatgacatgattgtatatctagaaaaccccactgtctcagcccaaaatctccttaagctgataaacaacttcagcaaagtctcaggatacaaaatcaatgtgcaaaaatcacaggcattcttatacaccaataacagacaaacagccaaatcatgagtgaactcccattcacaattgcttcaaagagaatcaaatacctaggaatccaccttacaagggacgtgaaggacctcttcaaggagaactacaaaccactgctcaatgaaataaaagaggatacaaagaaatggaagaacattccatgctcatgggtaggaagaatcaatattgtgaaaatggccatactgcccaaggtaatttatagattcaatgccatccccatcaagctaccaacgactttcttcacagaattggaaaaaactacttcaaaattcatatggaaccaaaaaagagcctgcatcgccaagtcaatcctaagccaaaagaacaaagctggaggcatcacgctacctgacttcaaactatactacaaggctacagtaaccaaaacagcatggtactggtaccaaaacagagatatagatcaatggaacagaacagagccctcagaaataatgacgcatatctacaactatttgatctttgacaaacctgagaaaaacaagcaatggggaaaggattccctatttaataaatggtgctgggaaaactggctagccatatgtaaaaagctgaaactggatcccttccttacaccttatacaaaaatcaattcaagatggattaaagacttaaacgttagacctaaaaccataaaaatcctagaagaaaacctaggcattaccattcaggacataggcatgggcaaggacttcatgtctaaaacaccaaaagcaatggcaacaaaagccaaaattgacaaatgggatctaattaaactaaagagcttctgcacagcaaaagaaactaccatcagagtgaacgggcaacccacaaaatgggagaaaattttcacaacctactcatctgacaaagggctaatatccacaatctacagtgaactccaacaaatttacaagaaaaaaacaaacaaccccatcaaaaagtgggcgaaggacatgaacagacacttctcaaaagaagacatttatgcagccaaaaaacacatgaaaaaatgctgaccatcactggccatcagagaaatgcaaatcaaaaccacaatgagatatcatctcacaccggttagaatagcaatcattaaaaagtcaggaaacaacaggtgctggagaggatgtggagaaataggaacactattacactgttggtgggactgtaaactagttcgaccattgtggaagtcagtgtggcaattcctcagggatctagaactagaaataccatttgacccagccatcccattactgggtatatacccaaaggactataaatcatgctgctatatagacacatgcacatgtatgtttattgcggcactattcacaatagcgaagacttggaaccaacccaaatgtcccacaatgatagactggattaagaaaatgtggcacatatacaccatggaatactatgcagccataaaaaatgatgagttcatgtcctttgtagggacatggatgaaattggaaatcatcattctcagtaaactatcgcaagaacaaaaaaccaaacaccgcatattctcactcataggtgggaactgaacaatgagaacacatggacacaggaaggggaacatcacactctggggactcttgtggggtggggggaggggggagggatagcattgggagatatacctaatgctagatgacaagttagtgggtgcagcgcaccagcatggcacatgtatacatatgtaactaacctgcacattgtgcacatgtaccctaaaacttaaagtataataataaaaataaaaataaaaaaagcttttggtaggaaggggaaaaattcaaaacacagatctggccacttggctatgatactaaaacaacttacccaaatgttttattttgcataacaagtttatttttttaaaaggcatatagacaataaacaaagtaaataatcagatcttaacttctgtcctagacttgttccgttaagttctagtctgtgagcacttgtagttcaataatcgtcatcttcatcagagtccattacttttcttctgttgaactgggaggaaaattaaatgagtgtcagaacatttctaataaagcataactcagattttccgagaaaagatttctaccaattttagcaagacatttgtgtctttaaagcaacttagcgtgaactaaaagggtgggaatggagtcaagagcctataaaaattagaaccctcccccaacagattcagcctttctccccaaactttcacgtgtttgacaaaaggaaaatgtctctgggctgaaaaatatgtgtgg

SEQ ID NO: 408 - DNA, 4662 bp, Homo sapiens
accgccaacgtccacggagcccgcccgggaccctcgacgtgcgcctctgcggacggggcgcgcagagggagccccgttagcggtcccccgctccctcgtccatcctccccaggcgcactccgagtcacacgtcgtgtctctgcaccgccctggcctccacggtggctccctgcgaagctgagggtgcggtccccatcctccgtgggtgccaactccggggcaagcaggctgcagagccgcgcgctccgccttaggcgctgccaagggcggccgggtagggtttcctaggacccgcccaccccgctcgtcccggccggagctgccaccccctggatcagtggagatttgctctgacccatctgaagtccatatggctctgtatgatgaagacctcctgaaaaatcctttctatctggctctgcaaaagtgccgccctgacttgtgcagcaaagtggcccaaatccatggcattgtcttagtaccctgcaaaggaagcctgtcgagcagcatccagtctacttgtcagtttgagtcctacattttgatacctgtggaagagcattttcagaccttaaatggaaaggatgtctttattcaagggaacaggattaaattaggagctggttttgcctgtcttctctcagtgcccattctctttgaagaaactttctacaatgaaaaagaagagagtttcagcatcctgtgtatagcccatcctttggaaaagagagagagttcagaagagcctttggcaccctcagatcccttttccctgaaaaccattgaagatgtgagagagttcttgggaagacactccgagcgatttgacaggaacatcgcctctttccatcgaacattccgagaatgcgagagaaagagcctccgtcaccacatagactcagcgaatgctctctacaccaaatgcctccagcagcttctgagggactctcacctgaaaatgctcgccaagcaggaggcccagatgaacctgatgaagcaggcagtggagatatacgtccatcatgaaatttacaacctgatctttaaatacgtggggaccatggaggcaagtgaggatgcggcctttaacaaaatcacaagaagccttcaagatcttcagcagaaagatattggtgtgaaaccggagttcagctttaacatacctcgtgccaaaagagagctggctcagctgaacaaatgcacctccccacagcagaagcttgtctgcttgcgaaaagtggtgcagctcattacacagtctccaagccagagagtgaacctggagaccatgtgtgctgatgatctgctatcagtcctgttatacttgcttgtgaaaacggagatccctaattggatggcaaatttgagttacatcaaaaacttcaggtttagcagcttggcaaaggatgaactgggatactgcctgacctcattcgaagctgccattgaatatattcggcaaggaagcctctctgctaaaccccctgagtctgagggatttggagacaggctgttccttaagcagagaatgagcttactctctcagatgacttcgtctcccaccgactgcctgtttaagcacattgcatcaggtaaccagaaagaagtggagagacttctgagccaagaggaccatgataaagataccgtccaaaagatgtgtcaccctctctgcttctgcgatgactgtgagaaactcgtctctgggaggttgaatgatccctcagttgtcactccattctccagagacgacagggggcacacccctctccatgtggctgctgtctgtgggcaggcatccctcatcgacctcctggtttccaagggcgccatggtaaatgccacagactaccatggagccactccgctccacctggcctgtcagaagggctaccagagcgtgacgctgctgctgctgcactacaaggccagcgcggaagtgcaggacaacaatgggaatacgccactccacctggcctgcacctacggccacgaggactgtgtgaaggctctggtttactacgacgtggagtcgtgcagacttgacattggcaatgagaaaggagacacccctctacacattgctgcccgctggggctaccaaggcgtcatagagacattgctgcagaacggagcgtccaccgagatccagaacagactgaaggagacgcccctcaagtgtgcattaaactcaaagattctgtctgtaatggaagcctatcacctgtccttcgagaggaggcagaagtcgtccgaggcccctgtgcagtccccgcagcgctccgtggactccatcagccaagagtcctccacttccagcttctcctccatgtcagccagctcaaggcaggaggagaccaagaaggactacagagaggtagaaaaacttttgagagcagttgctgatggagatctagaaatggtgcgttacctgttggaatggacagaggaggacctggaggatgcggaggacactgtcagtgcagcagaccccgaattctgtcacccgttgtgccagtgccccaagtgtgccccagctcagaagaggctggcgaaggttcctgccagtgggcttggtgtgaacgtgaccagccaggacggctcctccccgctgcatgtcgccgccctgcacggccgggcggacctcatccccctcctgctgaagcacggggccaacgcaggtgccaggaacgcagaccaagccgtcccgctccacctggcctgccagcagggccactttcaggtggtgaagtgtctgttagattcgaatgcaaaacccaataagaaggacctcagtggaaacacgcccctcatttacgcctgctccggtggccatcacgagcttgtggcactgctgctacagcacggggcctccattaacgcttctaacaataagggcaacacagcgctgcacgaggctgtgattgaaaagcacgtcttcgtggtagagctgcttctgctccacggagcgtcagttcaggtgctgaacaagcggcagcgcacggctgtagactgtgctgaacagaattcaaaaataatggaattgcttcaggtggtaccaagctgtgttgcttcattagatgatgtggctgaaactgaccgcaaggagtatgtcactgttaagatcaggaaaaaatggaactcaaaactgtatgatctaccagatgagccttttacaagacagttttactttgtccactcagctggtcagtttaagggaaagacttcaagggagattatggcaagagatagaagtgtccctaatttaaccgaaggttctttgcatgagccagggaggcaaagtgtcacactgagacagaataacctgccagctcagagtggatctcatgctgctgagaaaggcaacagcgactggccagagaggcctggactgacacagactggccctggacacagacggatgctgcggagacacacggtagaggatgcggtcgtgtcccagggcccggaggctgctggccccctctccactccccaagaggttagtgcttcccggtcctaacaggaatgaggagttgttgaacccactgctaggaagcaaggatgcaacaagatgatgctgagcgtgaacacatctgagaactaaatgtgcttccatgagactggcttgagaagtcttcagcaccaagttcctgaaagcttttctgtggcaggaaagaatgcaacaaaaaagttaaccaccaccatctctctcctcttcaaagctaatgaatacaattgaaacagacaaaaattccagtagcatccagatccttaagccagaggtgcatgcttctttttaagtatgagggtttgttggtcacagtgggagaggtttcaccaccgcattctgacctcctcctcccaaaaggtgctaaacctctctgacctgtgtacattcacaaaccacagctagaattcctccacctaggattaagctggagagaagtaagtaatttaggtttcatggtactgtagaggccaggctgaaatgtcatatctgaaggaagaaagcagcagctggacaatgtttctttgcaaagcaacactcgaaccaaaagatgcctcaatcccattttgatattcattttagtgaaaggatgcatcagacctgttccacatcatgcacatgggaaagggtggttatcattttccttctaacaagtaggtacagatattcggttactacacgtgcacctgtagcagtatttctagaaacatccctttttgttgagaacctcccttgaatgtctgtcacactcacacctgacgggatggttactggattagagagtagatttggcacatcttttcttagtcttttgattcaaattcaaaacttaacagcacaaaccaggtcagagttactttcggttagaatttattgccatttattcctttttataaatttctatagattatactgttatttttatgttattggcctagagctacacgtatatgggtttgtcctgagtccgttttcaaatgaccttgtgatagggaaatggttttgtccatgttcttggaaatacttgtgtatgtacagaagaagggagggattatttttctacaaagtaatttatgatttctaattttctaatgtgccttggatatgtgccaaatgatggaaaagaaacagtaaactttatgattcttgac

SEQ ID NO: 409 - protein, 1044 aa, Homo sapiens
MALYDEDLLKNPFYLALQKCRPDLCSKVAQIHGIVLVPCKGSLSSSIQSTCQFESYILIPVEEHFQTLNGKDVFIQGNRIKLGAGFACLLSVPILFEETFYNEKEESFSILCIAHPLEKRESSEEPLAPSDPFSLKTIEDVREFLGRHSFDRNIASFHRTFRECERKSLRHHIDSANALYTKCLQQLLRDSHLKMLAKQEAQMNLMKQAVEIYVHHEIYNLIFKYVGTMEASEDAAFNKITRSLQDLQQKDIGVKPEFSFNIPRAKRELAQLNKCTSPQQKLVCLRKVVQLITQSPSQRVNLETMCADDLLSVLLYLLVKTEIPNWMANLSYIKNFRFSSLAKDELGYCLTSFEAAIEYIRQGSLSAKPPESEGFGDRLFLKQRMSLLSQMTSSPTDCLFKHIASGNQKEVERLLSQEDHDKDTVQKMCHPLCFCDDCEKLVSGRLNDPSVVTPFSRDDRGHTPLHVAAVCGQASLIDLLVSKGAMVNATDYHGATPLHLACQKGYQSVTLLLLHYKASAEVQDNNGNTPLHLACTYGHEDCVKALVYYDVESCRLDIGNEKGDTPLHIAARWGYQGVIETLLQNGASTEIQNRLKETPLKCALNSKILSVMEAYHLSFERRQKSSEAPVQSPQRSVDSISQESSTSSFSSMSASSRQEETKKDYREVEKLLRAVADGDLEMVRYLLEWTEEDLEDAEDTVSAADPEFCHPLCQCPKCAPAQKRLAKVPASGLGVNVTSQDGSSPLHVAALHGRADLIPLLLKHGANAGARNADQAVPLHLACQQGHFQVVKCLLDSNAKPNKKDLSGNTPLIYACSGGHHELVLLQHGASINNNKGNTALHEAVIEKHVFVVELLLLHGASVQVLNKRQRTAVDCAEQNSKIMELLQVVPSCVASLDDVAETDRKEYVTVKIRKKWNSKLYDLPDEPFTRQFYFVHSAGQFKGKTSREIMARDRSVPNLTEGSLHEPGRQSVTLRQNNLPAQSGSHAAEKGNSDWPERPGLTQTGPGHRRMLRRHTVEDAVVSQGPEAAGPLSTPQEVSASRS

SEQ ID NO: 410 - DNA, 4456 bp, Homo sapiens
acggcggagtaaggggtgggctatagggccagatcgccgcgcgagggtggtgggcatcgaggtcccagcagcggacgagggaggtgccgccgtcgcccaggatgggctgggaatgaagcgatgtagccttttaagagatttgctctgacccatctgaagtccatatggctctgtatgatgaagacctcctgaaaaatcctttctatctggctctgcaaaagtgccgccctgacttgtgcagcaaagtggcccaaatccatggcattgtcttagtaccctgcaaaggaagcctgtcgagcagcatccagtctacttgtcagtttgagtcctacattttgatacctgtggaagagcattttcagaccttaaatggaaaggatgtctttattcaagggaacaggattaaattaggagctggttttgcctgtcttctctcagtgcccattctctttgaagaaactttctacaatgaaaaagaagagagtttcagcatcctgtgtatagcccatcctttggaaaagagagagagttcagaagagcctttggcaccctcagatcccttttccctgaaaaccattgaagatgtgagagagttcttgggaagacactccgagcgatttgacaggaacatcgcctctttccatcgaacattccgagaatgcgagagaaagagcctccgtcaccacatagactcagcgaatgctctctacaccaaatgcctccagcagcttctgagggactctcacctgaaaatgctcgccaagcaggaggcccagatgaacctgatgaagcaggcagtggagatatacgtccatcatgaaatttacaacctgatctttaaatacgtggggaccatggaggcaagtgaggatgcggcctttaacaaaatcacaagaagccttcaagatcttcagcagaaagatattggtgtgaaaccggagttcagctttaacatacctcgtgccaaaagagagctggctcagctgaacaaatgcacctccccacagcagaagcttgtctgcttgcgaaaagtggtgcagctcattacacagtctccaagccagagagtgaacctggagaccatgtgtgctgatgatctgctatcagtcctgttatacttgcttgtgaaaacggagatccctaattggatggcaaatttgagttacatcaaaaacttcaggtttagcagcttggcaaaggatgaactgggatactgcctgacctcattcgaagctgccattgaatatattcggcaaggaagcctctctgctaaaccccctgagtctgagggatttggagacaggctgttccttaagcagagaatgagcttactctctcagatgacttcgtctcccaccgactgcctgtttaagcacattgcatcaggtaaccagaaagaagtggagagacttctgagccaagaggaccatgataaagataccgtccaaaagatgtgtcaccctctctgcttctgcgatgactgtgagaaactcgtctctgggaggttgaatgatccctcagttgtcactccattctccagagacgacagggggcacacccctctccatgtggctgctgtctgtgggcaggcatccctcatcgacctcctggtttccaagggcgccatggtaaatgccacagactaccatggagccactccgctccacctggcctgtcagaagggctaccagagcgtgacgctgctgctgctgcactacaaggccagcgcggaagtgcaggacaacaatgggaatacgccactccacctggcctgcacctacggccacgaggactgtgtgaaggctctggtttactacgacgtggagtcgtgcagacttgacattggcaatgagaaaggagacacccctctacacattgctgcccgctggggctaccaaggcgtcatagagacattgctgcagaacggagcgtccaccgagatccagaacagactgaaggagacgcccctcaagtgtgcattaaactcaaagattctgtctgtaatggaagcctatcacctgtccttcgagaggaggcagaagtcgtccgaggcccctgtgcagtccccgcagcgctccgtggactccatcagccaagagtcctccacttccagcttctcctccatgtcagccagctcaaggcaggaggagaccaagaaggactacagagaggtagaaaaacttttgagagcagttgctgatggagatctagaaatggtgcgttacctgttggaatggacagaggaggacctggaggatgcggaggacactgtcagtgcagcagaccccgaattctgtcacccgttgtgccagtgccccaagtgtgccccagctcagaagaggctggcgaaggttcctgccagtgggcttggtgtgaacgtgaccagccaggacggctcctccccgctgcatgtcgccgccctgcacggccgggcggacctcatccccctcctgctgaagcacggggccaacgcaggtgccaggaacgcagaccaagccgtcccgctccacctggcctgccagcagggccactttcaggtggtgaagtgtctgttagattcgaatgcaaaacccaataagaaggacctcagtggaaacacgcccctcatttacgcctgctccggtggccatcacgagcttgtggcactgctgctacagcacggggcctccattaacgcttctaacaataagggcaacacagcgctgcacgaggctgtgattgaaaagcacgtcttcgtggtagagctgcttctgctccacggagcgtcagttcaggtgctgaacaagcggcagcgcacggctgtagactgtgctgaacagaattcaaaaataatggaattgcttcaggtggtaccaagctgtgttgcttcattagatgatgtggctgaaactgaccgcaaggagtatgtcactgttaagatcaggaaaaaatggaactcaaaactgtatgatctaccagatgagccttttacaagacagttttactttgtccactcagctggtcagtttaagggaaagacttcaagggagattatggcaagagatagaagtgtccctaatttaaccgaaggttctttgcatgagccagggaggcaaagtgtcacactgagacagaataacctgccagctcagagtggatctcatgctgctgagaaaggcaacagcgactggccagagaggcctggactgacacagactggccctggacacagacggatgctgcggagacacacggtagaggatgcggtcgtgtcccagggcccggaggctgctggccccctctccactccccaagaggttagtgcttcccggtcctaacaggaatgaggagttgttgaacccactgctaggaagcaaggatgcaacaagatgatgctgagcgtgaacacatctgagaactaaatgtgcttccatgagactggcttgagaagtcttcagcaccaagttcctgaaagcttttctgtggcaggaaagaatgcaacaaaaaagttaaccaccaccatctctctcctcttcaaagctaatgaatacaattgaaacagacaaaaattccagtagcatccagatccttaagccagaggtgcatgcttctttttaagtatgagggtttgttggtcacagtgggagaggtttcaccaccgcattctgacctcctcctcccaaaaggtgctaaacctctctgacctgtgtacattcacaaaccacagctagaattcctccacctaggattaagctggagagaagtaagtaatttaggtttcatggtactgtagaggccaggctgaaatgtcatatctgaaggaagaaagcagcagctggacaatgtttctttgcaaagcaacactcgaaccaaaagatgcctcaatcccattttgatattcattttagtgaaaggatgcatcagacctgttccacatcatgcacatgggaaagggtggttatcattttccttctaacaagtaggtacagatattcggttactacacgtgcacctgtagcagtatttctagaaacatccctttttgttgagaacctcccttgaatgtctgtcacactcacacctgacgggatggttactggattagagagtagatttggcacatcttttcttagtcttttgattcaaattcaaaacttaacagcacaaaccaggtcagagttactttcggttagaatttattgccatttattcctttttataaatttctatagattatactgttatttttatgttattggcctagagctacacgtatatgggtttgtcctgagtccgttttcaaatgaccttgtgatagggaaatggttttgtccatgttcttggaaatacttgtgtatgtacagaagaagggagggattatttttctacaaagtaatttatgatttctaattttctaatgtgccttggatatgtgccaaatgatggaaaagaaacagtaaactttatgattcttgac

SEQ ID NO: 411 - protein, 1044 aa, Homo sapiens; identical to SEQ ID NO: 409

SEQ ID NO: 412 - DNA, 65547 bp, Mus musculus
  misc_feature (1)...(65547): n = A, C, G or T/U
taaaatgggggcatggggtgggggtgggggctccagggatcagctagatttgggtggaatcatttcttcagactgcctttggtgccctatatggagtgaacagacatctgttcacatcacctcataaagtcacacatgcatgcaatgctgagggtcaggctggcccaggacaagaaattgtcctatcagaaaataaagcataaaaggtatgggcagggatggctgtttggtacatgtttggccacttccagacttctgatgttcatgttacaaggccgcacccggccacccaaagaggcgtgcaaaatgggagagactgccccagctattagactaggagacctgggctcagagaggaaagactgacttggcttctcaggcaggaaaataactgagcgaacctgagtgttcccataaggaaagtcctcgctttgtgtgtgacctcacatactaaggaggttgtgagacttaaaagttgtggtaggtctctcctctctggaatgggcttgatgaagtagtactgccgtcccctcaccgtgccaccccaactgggaaaacagcttccgaggcacaagtcaacagaaaagaagattaaatgtcaggacctagagcacaccttcgcgattccttggtctctgctcaggaccaaggccaatgactgagatgatgacagggctcaggtcctaaaggccccatgaggaagcaggctagggatgttgacacctatataggtgcatgaatactccagacatctgtgcacaagtgtgcacaaccacatgtacgttcctatgcacatgtgctctatgacattctgtacttcaaaaacacaattacccaaagtcagggtctggtacttcctaacttccccccaggcaagacaaaggtcagatgtctccatgacccctcaaattatattttaaaaggatttattggcactgggcctatttgagaccttgaagtttcaaagacaggtggggacatggagaagtctggggctgggggaccagccgggattggcggcagttctggcccaaggagggctcaagatgcagggtgcactatagagtgcagagtggaagatgcacggggtggagttcagggtgcggaatgcacattgtacgtatggtggttaatattacatttaaaagtttagactcactgcttgaaaaaccaaagcaaaatatgcctcagacgaaagcccctagcttgtgtgggctgtacactaacagtccatctacttcctcattctcccagatattgaagactattctgaaattgattggccttgtaaaatttgctgtcctagcaaatttagttgtaagactaactgcgatttctgtttttgtaactaatcttgcttcctctgctcaaaggatgactaggacaacttcaagacatatatgttaaatttttatgctccggcctacatgtaagcaggctacatgcaatcttgtggggtttgcctttaaaatccctgggctgataatgcatcttggaagcaatctcaggagcacacctggccccaatcagtctgggtgccagtatctaaaataaaaaacctcttctgattaaaatgtattcatggtcacgcttaatctctgagcgactcccaggcccctaacagtagggtgcgcggtgtacggtgcaaaatgtgcactagagctcctgggcagagaccggttctctagaaggggaactcgcagacgaagtagaggcgccgctcacagtcatggtcccaccaagaaccgtcgtctgaggcctgggccacgcagttctccaggacgccgccattgggctgatccgggctgagtggatgtgttgccgcactaggctgggcgccggactccaggctgaatgcgcggtgccaggcgaagaaagacacgcgctggccgttctcgaaaaggtagagcccctcggagcgccgatcgtgcactcccagccacaccggccagttgtagggggcgagagcggcgcgtaagtaccggcttagcgcatccatttgctggcggtccgcaggctgtgctaagctcccacctcgcgccttgcaccgcgcctgcgccgccgcctgggtctcgaagtctcgcgagagcaggaagcacttgtggccaaggcgcaggcccttcaggcagcctgtgtgtagggtgaggcggagtcagaacgttgcgggtaggagggggcgaggccaaagctaggcctttaggtgatcaatgaggtggaaccaaggttgcaggaggggagagagggcgggtccggtaggtagagggaggagcctgagccgtcgagcggtgcctggggtggaggacggggccaggtgaaggagggtcataagaaggatggccaatgaggtggtggcaggcttactgaaggcggggccaaagagctaaggcccggaaaccaatgaagcagagccaggactgcagggggcggttttatagcgacgggggctaaaaagaggcggagtcaaagttagaaccgcggtgaccagtgaagccaagacgggagtgctgggggcgtggttaaaaggagacaaacccttcaggggtggaaaaccatcaggaggagccaaagcgctgaggacagaggaggcgtggatagtaggagggattagaacttctgtgaccagtgaggcctggccaggctgtcaggggcagggccaatgctttggtgggttgaaaagggtggggccaaggggagcctcgttagagcagtagtgtgttagtgaagtggagccagggccttcgggggcgtggccagggtgtaggcggttccagactatgggtggggctttcagggtgtggcacaggttggagcaagaaaagtctcacccacctcacaatccatctctagatgtgccagcacctcccagttctatgtggaccctctggtatcctgatacccgttttctccaggtcttcagacctccatgggtctcctcctcccacctaggccctctttgtgctgctgagactcaccctccaagcggccgtgctcctgctcagcacggtcctggacctccttcagggcttgcactgagtcgcgggtgtcactcgcagcatcccgcagctgccgcagcccctgggtcagctcaaccacacgggtgtccaaaacgtgcagacggacgtgcaattggtgtaggcctgcatcgaggctggccaagcggcccactgtgaaaagacagaaggcacaactagaggcacaattaagggctctaaggacatggagggcacggccctcagactcccaaaagcggattggatgaggcgatctgtgggatgtgtgaccatgtctatgaagttcagtgggttaaactcttgacaggcagacacatctggggaccttgggcccctttgatgtgtctggcctccgagttgggtcagtgcttgacagacaggccaccctggcttctgaatactcacagatgtaagtgacagtgtcctctggtgtgggagaagggctggggaaagggttgggactagaagaaggtgctgtggtgatttcctcttcctcttcttccccttgagtctctgtggtctcccagacctctttgtcttcagggttttcagcaagattatcctcatttcccaccccagtgggcagccctagggcctcctggagattctgggtcagagaatgcatgtcagtttccttcccgcctaccctctcagctcttttctgaacccattgttccatctaaacccccttacttttctttacccatctgaacacttcatctcaagcccacagtgcccctccaacactcaccttcaacatctgtgactcccgctctctctcctcctccagggcacctccccagcctccctcccactccctcccaggacctcgggctccatgaccaaaactcaaaagctgagggaccactagggcccccaagagccaggctgcctgcatccagctgggcttcccagcacccaaatagtagagaggtcagaatgccaggggtaggactgctgtatagacctagcaagtgtcccagtctggtgggcagctcacaagccccttggaccttctttctgccaggctttctcttctgccttccctcctgatctgctctgtctcaacttttgatctcctcagcttctcttggtgagtctccccgcccctattggcttccaggaggctctgcctctgtggccggaaacctccaacgttccaaagcctgatcccgccttgggtctacccacacccaccccttgccactttccagacctctgcttctgccctctttcctcccttttgcaagtacaagcacttatatggataaaaggaagatggggaaagttttccagggcatccttggtactggtaggcctcagccttggtccaggagtcttctcagaacaaagcaggctatgataggatgccagctttggactgttcacttctctctgtcttggccattcctgaggagggggcacactgcagagagtatgctaaggttgctattatcctgtggtcaccgctgaccacacagcctaatgaaggggactcttctaacattctcaggctccggggctctcccatcctctacccagatggcctgtcctggccctaccagcccttgtatgtggtgcctgcttgtggggatatgtgtgaacagcatgcatgtgtgctgcttaaaaggtgtaactacaagattctcctgcaggccaggccctgagcaggttgatgctggggtgggaggggtggtagtgagcccagtggttcccccatcaagggaggagaagggttgacagtcagagcaggtatctccagtatgtatactaaccaagcactggccgtgagtagagaaccctctgcaagctgccttatcccagcctagaccactgcagtggcctccccttactctccctccttctacagagcccctccaatctgggctgcttgcctgccgcagccagagcaatccttccaaaccataaatcagatcacattactccccacgcccctgcctcctcaccttcccatcagaagcaggagagaagccaaaccgcggtctcctcggtcctcagtgcagcctgcagggctggggcctgggagagaagcgtttttgctgcagtctcacctcatctcccctcaccctccatcaccactctgtccttcctagccttttcctccttctgcaaactcttccctcagctctttctcattactgaagaagcctcagctctgcccaccatgtgagatgctttctcaaagtgcccccttttcttctaggtatgatccaaccagtatgggcttgtttatttacatctgtctcttgcagaccaaggcatagattttggggctacttctgtatccccaaatcaaagcaggacttcctagcacctagttggtactcagttaaactgatgaataagaccaatgttacaacagcttggtaaaaggccttaaaaatcagacttttgtgtttaggttgcaccggagttctcaaggtgtctgcctgagtgcaggcgctgagggcattggaaggttccaatgccaggagagtagatggccatgccttacccacaccatgccaggctcatgagtcctgcagagctttagtcccgcaggtcctgccaattcatgagccaaagatctaggggcccagggtttgcaaggaaaaagcaaagaagctcagagaggagacatggcagccgtatggaggtcacgggtgtggcatcatgtaccaaggctgctggctccaagcaggtacctcacatctgccctcagctgctgtgagtcccatgaggggccttgtaaaggaacacaccagttttcaagaaagcctagtacgcagagggcagagtgaccttgggcagccaactgattctcggagcctctcggatgctcatctgtagcacggaggtctctcttcggaagctggagacctccatataatgcagaggggctttgtaaactgcagaatgcctcatagccgctcagtgtatgtaccagcaccagcagctgttctccatgggcgcagctgctcggcacctgggtgggtgcatcaagatgagggcctctctaagctgggtaccaactccagtttatcccaggatgccccagagaagctgcagctgaagacaaactcagaaactatctagaacaaccctctgtaggagctggtgttccctagtggccctggggacgctgctgggcaaagtggaagtcatggctgaagagggctgaaatatgctgaatgaatctgccttcctctgtgaatgtaccaggtaggagaaagctgactacctgcacacaattagctttgtgtgtccatgtgtgtgaaattggaggcgttatagaatgcagaagggtatacatcttcaggtatgttctttgaaacaccatagcaggcctgtggagaagatggagacagccttctgtgttcttcacccttgataccacctctttatagctgggtggcctgggccaaattacttagcctttctgtgtgctttgacaggaaagaagtcactgaacctggcacctatagtatactcaaggatagctgggggggtgggaggtgtgctgtgggcagggtgtacaggcaaacaggcaaaaacacctgtgatgaccagtggagtgggtgagctggctcggacagcacacaggtctgtctaccgtgcttcttgtaggtagatctaagtatgtagttggagtatggtgtaggtcaatcttgcagggtgctgtcggtatgctgtggcacaggggtgtgacattgtgcatgaagctgggtgtgtgtctctggttgtgtgtactgggcaagcatgccctaaggagtaggtagctgtgggtatgcttggtttacaggaccagcttgggggaaggggtatgtgcctcaggtacttccatgtatgtgagctcatatggaaagttgtgtgcatgtggggaggggtatgtgtgtgtgtgtcggggtggaggggtgaaggtacacacatttgggggtacaggaccagaatctataacccacagtattcgatttgggaacatacagactctacaaatacaaatagcaccccaccatgtgtagaaagggtggggagcaatctggaggaggggctcccctaggaagagcaggatcccactaggggtacatgggggtgagcaggggtggagtctgggtttgaggatggggcagtggagatgaagggtggaggagggcgagggggggggtggagccgcgcgtgtgttggggggagaatgggcgaggtttgggggctcaggaggggcgatatctctctgcgggctcccggagggaggggagagggcggagggaggggagggagggagagagaggagagcgagagagagagagagagagagagagagagagagagagagagagagagaccgggtgagggagagacagcgagtgcgaaagagagcgagccgggtggcagtggaggcgccgagcaggagcaggcggcggcgcggcggcccctggcagaggaggaggaggaggcagagccggagggagccgcggcgcccgtagcccggccggaccccagccccggggcgggcaaggaggggcgtgcgggcgcggcagaaaggggggcgcgctgcggatggccgggcccggcccgcggggggggtgaggtccgcggnnnnnnnnnnnnnnnnnnnnnnnnnnnnnnnnnnnnnnnnnnnnnnnnnnnnnnnnnnnnnnnnnnnnnnnnnnnnnnnnnnnnnnnnnnnnnnnnnnnnnnnnnnnnnnnnnnnnnnnnnnnnnnnnnnnnnnnnnnnnnnnnnnnnnnnnnnnnnnnnnnnnnnnnnnnnnnnnnnnnnnnnnnnnnnnnnnnnnnnnnnnnnnnnnnnnnnnnnnnnnnnnnnnnnnnnnnnnnnnnnnnnnnnnnnnnnnnnnnnnnnnnnnnnnnnnnnnnnnnnnnnnnnnnnnnnnnnnnnnnnnnnnnnnnnnnnnnnnnnnnnnnnnnnnnnnnnnnnnnnnnnnnnnnnnnnnnnnnnnnnnnnnnnnnnnnnnnnnnnnnnnnnnnnnnnnnnnnnnnnnnnnnnnnnnnnnnnnnnnnnnnnnnnnnnnnnnnnnnnnnnnnnnnnnnnnnnnnnnnnnnnnnnnnnnnnnnnnnnnnnnnnnnnnnnnnnnnnnnnnnnnnnnnnnnnnnnnnnnnnnnnnnnnnnnnnnnnnnnnnnnnnnnnnnnnnnnnnnnnnnnnnnnnnnnnnnnnnnnnnnnnnnnnnnnnnnnnnnnnnnnnnnnnnnnnnnnnnnnnnnnnnnnnnnnnnnnnnnnnnnnnnnnnnnnnnnnnnnnnnnnnnnnnnnnnnnnnnnnnnnnnnnnnnnnnnnnnnnnnnnnnnnnnnnnnnnnnnnnnnnnnnnnnnnnnnnnnncctctcagggcaccccctctctccccttagcccccccccccctcgccgattcctcagcccgtctcggtaccagctgcgtgccagctattcttagccgccgagcttttgattcatgccgccccggcggagtgtgcccgctccctccctcgaggccggagggggaggggccccgagctgtcctgggtgttggggcagtggagcccgcgctataggggacctagcctttgctgaccttttatcccacctgccacccctttcctgcagagctggggctgcaaaggggatgtcagccagggtcagccgagggggagtggctgaggtcacactgccaggcgggatgtggtgtagggcggtcagcagactgagctggaggcccgggtctcctccccagcccagcgggttgagccacaaggcagggtacctgggatggggtgcttcagagctcggtccccgcgagggggagggttcctcagcccgtggttagacgcctgctcgcctacagttcttggaactctcttccttaaacatttcgtctttccttccccaaccctccctccccccagcccatccccactcccccaaagtcagcagtaccctccactgcttcccatctccatggcaacggtgcaggagccgggcctggtgtggggtgggagggaccagaccagacattctgctttccggttctagagtggggagtagggggtggcaaacaggagagaagaggaccgcatttggaatggagccacccctcagtaggccactttgagagggacgaccctccccatctcctggtccccatattgttgcagctcacttcttagcttcctccccagacaccccacccaatccaaattctcctcggtggagcctccagtaccaagcagtgccagcccacccaccctgctgtgccattcctgaaacacccacaggtcacctgcagctgcccacacccacccaggccaccacagcttgtcacctggactttccagccagagccagggccagcctccctatccacccacacatcctcttcacacgccccagtaacctctcatcatgggtctcttgggcccagctcaggggaacttctcttttctgttcatccacccccactcgtgtccctccatcccctacagggacagctcattccccagcagcagccctctaaacatgtggtcagccacacttcagtgaagtcaccagctctcgggcacctcctgctgccccaggctcaaaactcacacctccatctcacctttactataaaagtcagtctccacctccctggggtgaaggggccaggctccggccaggagggcaggatgccggggtggattggtccacctgtctgtccttagctaattttagcttcatttttttgtagtttgacaaagtgggccactagctcccgcggtgattctgtgatttctaggacacactgggtcagccacaaagtggagcgcaggggggtggggggctgcaagcagggccaaggacagggaggagaaaggtgccaggaaggctgcagaggtggtgcaaacttgtctgtgcagggggctgagggcatgtctagtctcccttggctgcccctgtgtctgtccactggtactggtggcctctgagtggctcaacagtgaggatcacccttgcttttctcagctgcctgtgatgctgctgtcccccgtcgccccgtggccccacgatgacccacagccccgcgacaagcgaggacgaggaaagacacagtgccagcgagtgtcccgaggggggctcagaatcggacagctccccagacgggccaggaagaggcccccaggggactcggggccgaggcagcggagcacctggtaacctggcctctacccgaggcctccagggacgctccatgtctgtccctgacgacgcccacttcagcatgatggttttcaggattggcatccctgacttgcatcagacggtgagtggtcactcacctgccagctgacagacacattggccaagtctttccccactctcaatcccagatctagctggaatcttattccttttccaacctacccttgaccctcatacccttgacccaacctagccccagacatcctgtctcccaccagaaatgcctacgcttcaacccagatgccaccatctggacagccaaacagcaagtactctgtgccctgagcgagagtctacaggacgtgctgaactatggactgttccagccagccacctcaggccgggatgccaacttcttggaggaggagaggcttctaagagagtaccctcagtcctttgagaaaggggtaccctacctggaggtaagggcacagaactcttaacagaagtcattccctggaactcatccactccaactccaaaagaactccccagtgggctcttcaagacttcccagagtccaaatcaccagctgagttgcctctgatggtgacctttcctctccctaaactccttatgccatcaaatgagggaatcccaactacatagtagttctagaacattccatagatggggggggggggctgtcccatgcttatacttataaggtagggattatagtgccatagaccttaatgacccagtactcttggaaaggtcgcccctacctacggccatttccatgctaaccctgaactcattctgggaagacaagaggagggtcagacattgctccccaacaaagaatctaataagtctgtgtgtcccctcatattctacccctggcctcagttccgctacaagacccgagtctacaaacagaccaacctggatgagaaacagctggccaagctgcacacaaaggtgagaatgcctgctacccctcggcaccagagcaccctgtccgtcgccttccttcccagtttctgcccagcaaccattccctctgccaacgcctcaattatgccaagtccctgtttaactttgagggtgcatcctgtctgcagacacctattcatcttcatcacactcccttcccactgccctctgtggcctcacctgcccagactgatgccatctttgcctggtatggtcatgggtgctggtgctggtgctggtgagtgaatggatgggcgcacatgtggaggtcagaggacaacttggggaagtcagtattctctttccaccatagggatcctgacgatggaactcgtggttagacttggtggcaagcaccgttgcctgatgagccatctcactgatctcaccttgtttaatacagtcctcacggcctaggccagactagctggccaggaggatctggagaaatgtctgtctccaactccccagcactgtaattacaagtgcacacaagcacccctggctctcttacatgggctctggtgaatcaaacttggggctccatccttgcataacaagctttacccctagccctccgatctgttcttttaactctaccttctctgctcgggagcacttagggcccttttcttacttagtgcatcagccaattgtctgcctcgatagtatttcatagacatccacagttccccagacctgtgcctgtatctccacaggctttgctctttttttttttcctcagccacatttattctatttggtccttttcctcctgaccttgtctgctctggccctctaggagttgagaggaagttaggaggctgatctggccagagggaaataattcttgacatttaatgggaagaaattccctgattggtttttcctccaggcttctctctcccacactatccaccccgatcttccccgccccctccgtgccttctcctccctacctgtgccatccactgtgggagccagtggccatgtatggctcctttgtacatgtgacaggtgtgagctgagtcacaccgcagaaaaaaaacagcacaaaaattccactgcatccgtttccaacatttattttatttttaatggtgtgtgtgtgtgtgtgtgtgtgtgtgtgtgtgtgtgtgtgtgtgtgtgtgtgtgtgtgtgtgcatgtgaatgcagccacccaaagcagctagaaacgttagaagctggcatttacctgccattggcaggtgctgggaactgaactcgggttcctctgtaagagcagcaagcactcttaacagtttaaggcatctctccagcccccataatatacttttaaaattacgtccatttctttcttattgtatgtgtctggtaggggtggggttgcatgttcatgtcatggctcacatgtggaggtcagaggataatttctagagctcagttttctccttctctatgtgtgttctggggaatcaaattcaggttagcaggcttggccacaagcaccattaccgctgagccatcccaccacccccaggccatgggattttaattattttcttatggattgtgtatcaaaacagtgacattaagcatatattcctttgagaacacctgtcatcagtatggatttcaacacaattcacagtctccctttgtcttagagcttttattgctgtgaagagactctaataaaggacaacattttatagggtctggcttacagtgtcagaggtttagtcccttttcatcacggcgagaaacatggcagcatgcaggcagactggagaggtagctgagagttccacatccgcatcagacatcaggaagagagagagagtgagccactaaacatggctagaacatctgaggcctcatccccccagggacacacttcctccaataaggccacgatcactccaataatgccgttccctgtgagcctgtgggggtcattttcattcaaactaccctttgtattagaatattactttttagatggggtctccctgtatatagcctaggtgcgtctagaactcaccatgctcctgtctctgccctgagcactgagacaactgacatgaccccaccacaccagacttcctttctgcctttgcaaagggttggctgtgtatttccactgggtagtgctggctctcattgcagctttcttcactcagtctccctgatctccctgacaccccctgtctttctttgtacatgatttagactgggttgaagaagttcctggaatatgtgcagcttgggacgtctgacaaggtggcaaggctgctggacaaggggctggaccccaactaccacgactcagattcaggaggtaggaaggggtatgggccatgaaggactggggtgaggagcagggttgggtagagaggccggggacaccacctcaaccccagagggtgagaccgagggaccaaaggttgtcggggggagggtggctgagctaggaggccaggggtagagtctgaaagtggaggcaaaaggtatgcctctgaaggtcttctcttgcccttcagagacacctttgaccctggcggcccagactgaaggctcagtagaggtgattcggacgctgtgcctgggcggggcgcatatagacttcagggcccgggatggcatgacagcgcttcacaaagctgcatgtgcccggcactgcctggcgctcacggtgaggctgctgtagtccccagatgtggggccctttctcctttcccttctatttttccaaccctactctcttcaattctgatcaaaagaattcccctgatgtagatacctgtaatcctagcactgggaaattcaagactggcctaggttacctggcatcccatctcattgctccccaacccaaactccctctatgtccctaccacaaagtctgtcccacacactgacaagcacacagttccccagtcagtcttccagatgccccagcttagtctacaagttggtggtgactgagcccgggtaaatcccctccactaaagcttcctccctgagcattcagaatggcccccttccctctgcccagccaatgcacaccctatctccgccttcccaaagtacctgccgttgagggccctagaacacagaaagggagcccctgctgcttggggagatcatctccaagcacagctttaaaatcgcccctcccttcatccttcctagcctagcacttcacctcccaacacacacattctctcgcggacaaatccagacccttctcacacctaagatgcaaagcacaccttccaaaaaccagatgtggaggcacaagcctggcatctcagcactggggaggtagaggaaggagggtgaggggtgtaaggtcttgatagccaagatctggacacacacatacatacacacacacacacactacagagtgagtttgaggttaacggtggcatcatggcatcatgagactctcccatcaaagaaacaaaaggtgctttcccaaacaaattagccctttgtgcccagaaaaatgcacagaacaaattagtatgcagtgtgtgtgtgtgtgtgtgtgtgtgtgtgtatgtgtgtacataacaggcacatgcatgtggaacctatgagcaggcatgtacaagtgtggaagccagaggataaccccagctaccaattctcaggaaccagtcacggtatttctccagatggggctttcactggtactcagggctgccccattaggcttgtctggctggccagcaagccccagagatccacctgcctctgcctctccagcattgagactgcaaccgtgtgccactttttgacatggattattgagaccaagctggggcctttatgtttacatgacaaacacttcactaactgagctgtccaccccccacccacccacccccacccccagcccctgcatacagtcttattttaaaataatcttttttcttctgtctctgtcaggtcaactgatccctctttaggcataggttaggatgggctgattccaaaggctgagacacacccatattcacagacgcccgggttcactgatgacacctcttttcacaaacacttggcacgaacaattgctgtttatagccagaaccaatggatattgtttgcatttttgtctgtctgtctgtctgtctgtctgtctgtctgcgtggtttcagatctttgctatcaagccccttaaccactgctcacatcaggctgtctagttttaaattaattagaatggaataaaattaaaatcgaacttccttggactcaacagccagccaggtactcatcgcccccctgtggccaccatgttggatgacaccactggggacagttcactgtagtatcctgctgcacagagctgctatgggctctctgcacagggacaactgtcacacttgttcttatacaagcttagattcctcccctctctgcacccttcctctctttcccctagaactcccaccctgagggatgctggctcgacatgggttcaccccagtcttgcctttcctagtcttctgccctgggtgtctatatagcgctcctgcacttgactggggacattcttaacacatagacctccatccttccatctgtcttccctacaactctgccatgaattaagacgcctttggtcgtggacatcctccagtggctcatcgagagtcacccactagagaaaggttgagctgcatgtcagagcgggagggtcctgtgacgccatctgccttgtcttctcattgttcttaacggctaggactagtgcagattgggcaaagcctggctcagagtctacggactaccagaggggctggagagatggcgtagtcagtggagtctgtgcaagcatgagaacttgagttcaacctccagcacccaagcagagaagcagagcgtggtggcaggtgcctgtaacctcagtgccagggggcagagataggaggaccccgggtctcactagtcagctgttctatctggatccatgagctctaggttcactgagaggctctctcaaaaaataaagtgaagagcaattcaagaagacacatagcattgattcctatgtgctagcattcacatgtgagtgcattcatgggtgttcacgcttgctcatgtacacacacacacacacacacacacacacacacacacacgcgcgcgcacacacactcattgaagcagaaacgagacagatatgagcctgtatgtgtcattcaaggcttacctccctaccagccccttgaaactagagctgctatctgacctttcttcctgagttctctgtccctccttaggcacttctggaccttgggggctcccccaactacaaggaccgacgagggctgacccccctgttccacacagctatggtggggggagacccccgctgctgcgagctacttctgtacaacagggcccagctgggcattgcagatgagaacggctggcaggaaatccatcaggtatccagattcagtcccaagtactggggagagcttggatacctgggctctgcagcatccaaagggatgggatatcaaagagatggcaggtttccttacagagaggggagtggaatttcctcaaagaggaaaaggcagaaagaactccaggaatagataaatggatgaggttggttgcttgattcacctgaagggccagcctggggtatttatacagcgaagtaactgaatgcttagagtcaggaagctaaagtcctgggtctctgaacaagaatagagccaaaaaaaaaaaaaaaaaaaaaagaaggggacatggatgcagagatccctgacctcaaggaagagggccttggattcagatgaggtctaaccaggcccatgcactccctgtaccctcaggcctgccaacgagggcactctcagcacctggaacacctgctcttctatggggctgagcctggagcccagaatgcctcaggaaacacggccctgcacatctgtgctctctacaacaaggtcagctcaagcaatgtctacctgccccttcaaaggcacttgcttcataccagttcaagccctctccactccaacttcctatctctgcaacctctgctcatttaccattttcatccatctatccattcacctatctactatccactcatgtatccatccatctacccattcattcatccactcgtccacccacttatccattcatccacccacccactcattattcacccatctacccacccattcatcagtacatctagaaactcatctacccatccatccacttatctatctatcatctacccacccacccatctacaaacccatctacttatccatccatccacctatctactcacacatccatcatccactcatcatccatctacctatatactcagttatccatccctctgtctacccacccatctacccacacatctttctcccatccacccatccacctactcatccgtacatccactctcataaacccatcatccattcatttattcatctgcccacccatcatccatccatccatctacccacccatcatctacccatccatcatctacccacccatcatctattcagccatcatccacccatctgcccatcatgcttaatgagcttcttccctgtgtccggctccaagctttatactgagcttctgatctaatccttggtgctcagtaaagttatggagaatcacgttcccttgagagccatgtttggacttgggtggaggtgggtttctgaaggatgtcaagacagcagaggcagatgagtggagcagagtgctccaggaagggagcacaagctgtgtacaagacaagaggccaggcaagttcagtctgcagaggacagagctgtgaacacagtaaagcctggaggtgagagtgttgtatatttagcaatttaatgttgtatggagggtccctctccaggaattctggggaaagatgatctgtaaaaaggagacaaagctctcaccaaatgggtctgctgccagcaagagctgagacccctttgccacccaagtaccaagagacccccaggttggccaagcctcttggagctacagcccccacacagcaagattcttgcccttgaagagctgcttgggggacttcagggtagggagggcagcacctgctgggatgctgctgatctgctcccccccttcctccaggaagtcttccaaaacagccctagccccttctgcctcctgagaactcccagtgctggggatatggcgggtatccaagtgccgccttgtggcagcgagcaggatgctcaacgccaagggaggactggcgttccttaaacccagaaacacagtgctggcatttccttcccgcttgctgctgctgtctctactgctcctctgtgccaggtcctctgactctgaggcaggtgcttgacacagagagagaaagccccagctccacacactcaggaagagcccgaacaagtgccttccactctctgaggctttgtcctccctgaaatgggaaccgtgtcagctgattgaaagggatgagtggtcgcggacattaagtattcatccctagaagacagccgtgataataattgttattattagtatcatcatcagtgtcaattgccaggatgcggtcagaggctggcatccatctgagcagggaaaatcgagtgcagagaattatacagcagccactagtccccagagagggccagatgaacatgctgctttgccttcttcagttttcccccaccaacccccaccatctgtgaaatgggtcagtcgtgaatatccttcatacaaaaggtcaaacaggtgaacattctgcttgctatcagacccagtagatgattagcaaatatgagctcatcacccacttcgctccctgcctctgctcatcctggccatccagctgcctgtgggtacatcaataagcccattcaccacctatcctctacccactcacccacccagccgcccatccattcaaccatccacctactcaccatctatccgtccttcattcacctaatcacccattcatccgttaccaatgcatctatctattcagccacacacccactcacccatctatatatgcttccacccatctgtctgtccacctctccaccaccagtcaatctacccatccattcatctacacattgacttatccatccattaatacacccatccacctgtccatccatctgtttacataccggtccacctagccatctatccattcatctttctgcccatccatccattatccacccatccatcctcctggcaaaggtcagattttctaggctatgggcctctcaatggtgggaacaggatctggtagattctggttctatcccaacctcccagaacatggcaattattttacatccatgcatccatccctgaacccatccctccatctatttatatactgtctgtgcattcatccgcctatctggcccaggtctgaccttcaccctttgctgtctgtccccttaaccctgcaatatgtacatgtagcccctgctggtggtccagtctgtgtttctctctcaagagtggggagagattctcctagactgctctgtcccaagccgtcaccaaacagtaatcctcactgcattgtgtgcagtgagcagatgaatgaatgcatgacagattgaatgagtgatggaactgtggatggatctccagcagaactctgcacagctctgggctcagaactcttgacaggtggctgctgtttttgacagattgaatgactcaacaaatgaatgaataattgagtggcttgagcaaatgaagtttgattggcagctccacatcttccatcttcatctcttccaagtgcatttcctgagcacctactgtgtgcttgagctactcactaggacttggacatttaaacttggtcaggcacaggagagactaggaagcttgagcatcacactatggccccattgcccctcgaggtggactgtggggagtatgaaagcatgaaaaaaacatacatctgtggtagcatgggaatatgcagctatacatgcacgaggttgtacatgctacacacaacacagtcaggcacaaactggacttgctttgttatccagcaagtgatgttagcagtcagacccaaacagacagacactaggatctggagaccagggtcacaccctgcttgctccagtgactggctgcaagggtttaggcacgaatgttgcctgctctgatcccatcctgtagaataggcctgaattgagtgcagagtatacacttaacggggttcctatgaagagggtataataaagaggcacttcaaaattcacgttcaagggagccagagtggagtggaactgcaggccggtgtaggtttgttcaggccaagacaaagaccagatgatattcttccactgagtaaatgttcccggacaatccctgtaggctgggcactgctgaatgaggtgtcacgcacccatgcctctgtggtacctaccgtggaagagagccggtaacatagaatatgggatctctggcatacagtgttctgaaggaaatgggttaatattggcttagagaacacttatctatgcaagagtgtcagagagagagagagagagagagagagagagagagagagagagagagagaagatgtgaacgactcctgtcagcattcagcattcagactgaacaagcagatctccacgcatgtgaagccagcatggattgcacagctagtccaggctatcccaagaccctgtctcaggcaaagaacagaagacggatcagtgagggaaaagctctctgaaaagatggtgccttagtacaaaacccaagtgaagcgagagtatgtcgtgtagaaattgatggatgacgaattccaagaagctctttagatcagtaggtacaaagaccctggagcagaggttttcccattatgggaagaagtagccagcatggttggagcaagggaatgtggtaggtattgaggttgagatgggctagccaagtgggttgtttgggtgaggcctcgggtcatgtcagagacctagttcagctcagagtgatagagagtgctacgtgacagataggaatatgtatatcccccattatctcccacgtggccccctaccctttgtgctgtgtatactattccttctaagtctggcagagagtgcaatcaagacagacctagggcactggggatgatggcttggagcttaaaagcacttgcatgcaagcatgaggacctaagttcaaatctcaagaacacacacacacacacacacacactgatgtagtatgaatatgtgatcccacttctcctatagggagatggaaagtagagacaaagaacctcccctccgaaacaaacaaacctcatgggccaactatgatgacatggacaccatcagacaagagtctcaaacattgcctcctggcctccacgtaggcagtgtccctcacagaaacacattcacacaccacacacatatcgttcccacacacagacacacatgcacagacacagaccaggaacggaatctaaggtcaatcctttaccggcggcgtgaccttgaacgatgccgagaacttcgtttccccatctgtgagatcaccacggtgatttctgccgggcaggcgactcggtgagctcctttctgaagcttggtgactggcacacaagcaagaagcccttcaaagagctcagaggtgcttctgtccacacaggacacttagccacgtctggagcccagcccccttagcaggagacaacttgtggagtctggtggtagaaaggagagatactcagcccctcacagggtggagagaacagtatctgcaaccacagctcagacctctcctgccctaaaatgtcccttagaaaaaggttagctgcctctccccaacgcagcagacacagtaagggaaaggaagcaggcaattttgtgtctgcagcagattttatttaacctgaagtttctacaagtattatcacttcaatatgaaatcaacataaaattactaggggtatattttttgcatcctaagtccttgaaaccccatatttatttacacactgtattgtgtgacacgcaatgctacagaacctgcatgtgttaggcagccaccctacaccgagccatttccctcactgggggactctaggcagaggctctgcaactggtctacatcgcaagctcactttttactttttatcctgagacagcactttgctaagttgcccatgctggccttgaccttgtaatctcctgcctcagcttctgaagtaaactaggatgacagacgtgagccaccaggcctagcttcccagtgtgttttatgtacatagtccatctctcctccgactggccgcatttaaagaatgacctgccttgtcgaggggctgctgtccccgtgctggtttaggtcagagtatttctgaagtccccagcaacacagctctgttactcactctaacttactattcattttcctctcctcctggaccactggctgtcatgctcaggagacctgtgccaggatcctcctttatcgtggagcaaacaaggatgtgaaaaataacaatggacagacacccttccaggtctggggttctgggttaatcgccagtgcagggactgggagagggacacagaagaccaggggccaaaagcactacctgtgagggatgctgcatggtctgggagaaggaagagggtcggtggggtcagtgatgtggatagagggttgattgagtgggaggccgggatagaggggttcaagatgccacctgtccgtgctctctcctgagcatccacctcccgggacccctcctgcaggtggctgtgattgctgggaattttgagctgggggaactgattcgtaaccatcgggaacaggatgtgggtgagtgagaagaagttagggtaaaggagaaactgagggttcatattagggagtacagagttggtggcctgattgaagggtgtcaggatggcacatagatgtttggggggggataactcagcgggtcaccaccctcactgtctcatctctacctttctctctctccctccaccgcttgcccttacggttcccacctgcctctgtttccccatcctacctgcctgcccctgaccaccactgttcgctctcagtacctttccaggagtcccccaagtatgcagcccggcgtcggggacccccaggcgcagggctgactgtacccccagcgctgctgcgagctaacagtgacacgagcatggcgctgcctgattggatggtgttttcggccccaggggcctcatcctctgggacccctggccctacctcaggatcccagggccagtcacagccctcggcccccagcaccaaactcagtagtgggaccctcagaagtgccagcagtccccgaggagcccgggcacgctccccgtcccgggggagacatcctgaagacgccaagagacaacctcgaggccggcccaggtaggcaggactaagccccgccccccaaacttgccattctagagcccacacagccaacccagctgtccaccttctgtcccaggagtggtgggttccatacctacctgcagctctaattgtctcatgagtaaaatgagggcgttagggtaggtacctcactcctggcatggtaagacagaaccctagaagaaaaaggccgcaacctatgaggacagacagatggcagggtgaagagagaggaaagagagcagaaataggggcttggggtgggcatggactttggaagcaatatacaaggctgtgtacgagtccagggagggagctctgggagctgagaggacaggagaagaggccgtttctgcggatgtcaggaagaggaggcccaccaggtatgtctcaggtcccaaggaagtggagaaggctgggaacagttggctgtggccttggacctgccccaggaggaagctaggagtcactgaaggctcatgagctgtgcgatgtgccagagcagcttcaggaagctgaatcagactgtacttgcagaccgtgggaggggtggagctgggagccttaaaatgggagtggggcgtgcatctggtctcccaaggacactagagcttggaaaagcactcaatccctgtccccaccctgatgctctgccttacttccatccaaggacccctgtccctccagaagtgccttgtccctccactctcccctgcctctcacaacttctgtgtatgcagctccagcgggacaccccgagatgggccggctgggggaactgggggctcagggggccctgggggctccctgggcagcagaggcagacgtaggaagctctattcagcggtacccggtcgctccttcatggcggtgaagtcctaccaggcgcaaggcgagggggagatctctctgagtaaaggcgaaaagatcaaaggtgacagagtggggctgggtgggggcagggtgaggggaagctcaaagaccgcctgtgccctctgcactctggggactttaaagagccctgagaggccccttttggcttggaggagagagaggcactatatgggacagtgtgaagaagagaggagatgagcatggattgtcccatgtgtgaatgaatgtttgaatgcatgtgggcacatgtgtgtgctggtgtttgtgcatgtgtgtagtgtgtatggggaggccggaggttgacatcaggtgtcttcctcagtcagcctccacattttcttttttgtgagagagagggtctctcactgaaccctcactgactcaaccaggctggctacctgaaccaagcaagctccaagaacctacctttctctgcttccctgctgggggttacagattctcacagctgaatctgacctttcacatgggttctagggattcaagttcaagtccttaagcttgtgcactaggtccttcgtctcctgggccattttcttggctcccagagcttttctttttgaggcagggtcttatgttgcccaagctcttctcaaactcacttaataacacaagttcaccttgagcttctgcctccacctcctgactgctggagttacaagttaccatgcctggccttctctctggaggacagtgaccatagcacatagactgcagccttcaaagcatgagcagtgtgtgttcctggataaacgggtaccttggagatagagagtcatgtggaaggcaatgtaattcagagcaaacagggtaattttctaccagattctagcctgcccaggagctctgcagtgtggtagctgagcagcagggctgtttgcattcaaagcttggccccaccacctcttagaggaaagagttctagcaaccagcttctctgaacctcagtttcactgtctttaaaataagactctagggagaatcatgaccgtcactaagtctcttaggcccaggctttgatggtgcatgagagccggccttcctccacataagctctcagaggcagactagaggtggctggacaagcaaggccagtccttccacggggcatagatatgaggaaggccttcaagggtgtttagaggtcctcatccagcaagatggatcttttgtgggctagttgtctatcttcccataaaagacaaggataggaaggtcaacggtgtgtgtgtgtgtgtgtgtgtgtgtatctattatctattatgtctatattgtctgtcatgtatgtatgtctcatgtatctagcttacagtctatctattagatttatctatattatgtacatatcaatccatcatatatctatctccttatttgtatatctagcaatctatgcagatgtcagtcttgaggtagtctcacgctgtgcccagcatagccttgaactcactctatagccaagacttgtcctaactgtcaacagtcttcttgccttagcgccctgagtgccaggatggtatagatgaactagcatgttttggttttcgaacattctgtaccatttatgtagcaaactcttccatggtctctttgtatcctcagctactagggtgcttcaggttttagggatatctggatatcttatccattcagttcacttaaggtcatctggcctctctcaaagcaccattttctgtcaagtccttcattaaaaatggtgggagtttgtttggtttacgtgtgtgcgtgtgcatgtgtgtgtgtgaatatgtatggtgaatgtggaggccactgtctggctagttctttttttttttaatttatttatttattatatgtaagtacactgtagctgtcttcagacactccagaagagggagtcagatctcgttacggatggttgtgagccaccatgtggttgctgggatttgaactccggaccttcggaggagcagtcaggtgctcttaaccactgagccatctcaccagcccgtctgcctagttctttgaggcagagtctaggctgaaagccccagcaatcctgtctccacccatcttatcttagaactgggattataggcatgcatgggacacatagcttgttacatgcatgctgggtcctgaactctggtcctaatgactgtgcacaaatgttcttaactactaagacacctctccagcccttcttccctttctgagaacttgtctggaggctctagcaggggacttcaaatatccacatgctcttgattgaagaatggctctcctctgtgaggaaaggccattctcctagtccgagtgcatacttcaagagagatgcacatggagcagtaagggaggaaagagatacctgcctagccagccaagccagccagtccatccaaatgaaccctggaagtcagtgggatgagacatgtcacagtggggctgccttcacatccacttccactactttttcaataatagtttcagtttatatgtatacatgctttgtctacacgaacgtatgtgtactatgtgcatgcccaatgctatggaagtcaaaagagggcatcagatcccctggaattgaagttactgatggttgtgagccaccatgtggatgataagaatagaacctgggtcctttacaagagcagtccgagccatctctccaagccccacctccctatttgtttgagacaaggtatctcactatgtagctaactgggaactcactgtgtagagcaggttgtttttagacttgtaataatcctcctgtatcagcctctggaatgccagggttaaagacatatgcccccatgcccagcctcttctgttcaagccccttgatcgctgtaggtgttcctctaagggcggctaatctagaagctcttctagggcaggaacttcatgggttgtgtccaactgtgtctgtcctggtacttgacacttgatcagcactcagtatgtgttttgtgagcaaatgattgatctcaagcagtcaggcatggcagaaccaactgagagcccagatccctggatgccctcttgtctaccctcatctatgacctggggctttcactcatgtcattgccctgtatcttcgggagcagggggaggtgtgtagggagaagtgtcaaggagccacatggcaatttctttgtcatctgagctatggtggagacttttcagtgtggtcctcagtgtgtgtgtgtgtgtgtgtgtgtgtgtgtgtgtgtgtgtgtgtaaactatatatacagttgtgtgcttatgtatgtagaaactagaagtcaaccttcagtgatgttctttagggccaatccttcttgctttattgagacaggatctctcacgaccctgaaacttgtcaagtaggctaggttggatgacctgcaagccctagcaatctacttgtctctacctccccagccatcagattgcagtgtgtaccactgtgtccagttttcatggttctagggattgaagtcagattctcaggcttgtgaggcaggtacttcatctactaaactacattcccagttcttcagcctcttctttcttcttcttcttcttcttcttcttcttcttcttcttcttcttcttcttcttcttcttcttcttcttcttcttctccttcttccttcttccttcttccttcttccttcttccttcttccttcttccttcttccttcttccttcttccttcttccttcttccttcctcctccttcctcctccttactcctccttcctcctccctcctcttccttcttcttccttcttcttccttcttcttccttcttcctccttccttcttcttccgttcttccttcttcttccttcttctccttcttcttccttcttcttccttcttcttccttcttccttctttcttcttcttctcttttcagtagttagaattgaggaggcaagcactccactattaagccaagcgttccagcccctcactgggggttctaggcaggggctctaccactaagccacattcctagccttcacttttttattctgagacagcatctcaataagtcacaaagattgactttgaactcactctgcaatacaggcatctcttaaattttcaatcctcctgccacagcctcttgagaagcctgtgctaccagccccagcttgcctccagcttttttacccagaaagagttggagaaaatactgaagatacagaaaagacagtgtgtctgttgctattagcatcattctctgaatgggaattcagagaactacacaggcttgggttaaaatcctgccctgccagtgactactagccttctaatctggggcagatggcaagcggcattagctctctgtgcttcggtgtccttgtcactaaatatcccttcccagagttctggcctggagtgagctctcagtgtccttgccatctatctttgcttcaacaccagatacggaacagaatggtgatgggtggcaagacaggtccactaaagggctgaagttgtcactgcttagagcagtgggaggggggatgccaagagagcatcctatggcaagaggggcagagttggggaggagctgggcagagacttcagggagcagcagggctaagagtgggcacagctgtcttcagaagagccagcggagccacggggctttgggggcttaagaaaacactccactaggttgtaggtggtgaccaaaagggacaaggaccaagggaggacggtgccacagaacctagtctgctccccaaatctacctgatatgcacctcttatgttaaggaagttcacatttaagaatgtcccaacttagctccccatcatggtctcccccatttctcagaccttagggttttttggggggttttggttttgggtttttgtttgtttgtttgtttgtttgtttgtttttgtttttgtttttttgttttttgctttgaggcagggtctcttgtagcccagactggctttgaactctcaagtactgagaatgacgttcaagtccttatccctctgtctccaagcctgggggtatagatgtgtaccaccacaacagttttgttttgtttggagtttggagtgtgatatatgcatacttttgtacaggtgcacatattcagagggcagaggagggctctgggtatcctgctgtatcactctctgacttatcccccttaagacagggtctctcacggggcttggagctgggctaggggtcagcagaccccagggatctttctgtttcctaacaacagtgttaaagttgtgtgtggccacacgcagtttctgtttgaccttagctgctggcatccaaactctggtgcttagggttgtacagtacattcttacccactgagtcatcgtaccacttcctacccctaagtttttgttttgatttttgatagggtcttgtgatatagcccagattagcctggaaatcacatacacaaatcctgcaccagatttttctttttagggttttttttttgtttttttgtttttatgttgtgtgtatgaaccttttgcctgtttgtgtgtctctgcaccactataagctcctggggctgtagtcacagacagttgtgagccaccatgtggttgttgggaatcaaatccagactctggaagagcaacccgtgctcttggctgctaagccatctcttcagccctcattcttcttgaaggatatctttgggtcttgggacaacaggacagtgtgcaccaagtgtattgggagcaaaagagaagcccagaaacctcaagaagggcctggggttcagttgttagagggattagctagcacacacaaagccctgggttcaattcccagcaccacataaactgggtatggggtgcatgatgtcactccagcattgagggggtgaaagaaggtggatccaaagttcaaggttgtgatcaactataagtgagtttgaggctgacctagagtacatgagaacttgtctcaaaaatatggtggggcagggagaggaagaaaaagaagaggaggaggtgggggaaagagaggaaaaagaaaaagaaaatttaaaaaggcagcttaaaacatttccttgttcccactgtcccatccagtgctcagcatcggggaaggaggcttctgggaaggccaggtcaaaggtcgagttggctggttcccttctgactgcctagaagaggtggcaaaccgttcccaggagggaagacaaggtaacaagaaactttctccctcatgccctacagtcttcctatccctcctgccctgcctgataggagtggggcgcacaagtcggggagtaggctttgctgtttacaaagtaaaggctcaatgctttatgtccctgcagaaagccgaagtgacaaggcaaagagactcttcaggcattacacagtgggctcctatgacagcttcgatgccccaaggtaaatgtcctcacacccttaggtgccccacctctcccagctccctgcacactgcacacttgaagcctgcttcttttcttggtcaacttggaagccaggagaaggcagaattctgttaacgtaacagccccatctcaaatctgcttctggcagccactgagaccatctagtgtgggctgggtgtgtctggggccctgggttcttgtgtggggactggttagatgccctggtcttcttcctgtttccctgtctgtgtgcagtctcatactgttggacacatgtacatcctgtatgtcacaccagtgggtggtgggggaggcaggtggaatcaatatgaccccatgggtggggacagagagaggggcacactgacacctgtcccctccttggctgctggctgacttgcttctgaagtctgatcgatgggattgactcagggaggtgagaggggcggggcagggtggggattgggccaggaggggatgcttgtatatggggggatgagaatgtgtttgtgtgcatgaccagagttgaggggtcccagcgtgtgggcgtgtctataccagtgtgcatgacgcatccgcgtgcatgcatgggcagaaggcccttagtcggatcactgtaaataaccctaacgaaggctgtgtgctacagccctcggtgcatatgggtacatttgtgtcggtgttgactgcgtggctggctttgcaacatgtgcgcttctctgactgtgggcaagcactgccagaggtgtccatgtgtctgctcacacgtgaacaggtgacagatctctctacacaccccgtgtcactgtgtgttctttggtggccccagtgtgcgtatgtcttctcttctatgattggtctgaaattcagaacctggaatgctgagggagggaagggcagaggaggggcctcagggctgtgctctggagaaggaatgtcataatccaagatctaaccgaggacaccctcctctgccaccccatcccaccccaatccagggaaggatcttcctgttcacagtatccctccattaaatgtatccaaacctgtgtctgtgttctggccagtggggggaaggtctgggttgggggaggagaaaggaaggggtggttgacagggtggggcttgggtgccagtcaccctgtgccccagggtctgaggcaaatcatcttgtgcctgttcacggggtatgtctctggctctgggtcctgggtgagtatggaggctccctctaccccaagtcagcctctgtctggggattctgacctgggcctgcctggtcttgcagaggtgtcattctctccaaagactgagtggagagggggtctcttcaaccccagactccatcctcttttcctaataacgatcctgtcttgaagccttgcaatttttgtccttttccctcctctcccggggctgaggtccatccaagcccccttcagtcatatcttcttgcctttgctctacctgacccagtctgcagtttcctggtttgcctgtttacaccttgcatcttactgtggtccctagcatctcaactggagctgagccatgtttgcttgtgtacctaccccatggtgtgtgccaccatgtgccaccacactcctcctacctgggggtgcggtgggaggtccatggctctctaatgagttgtggtatatgtgtcctctcactactctctgggttctgtgttttgggttccagttgaatgtcttggctcccctcaacccacccctgcaccctgcctttccctactattttggggatgagctgtgtgtctgtctgcgctgagggtgagctgtttgccctctcttggggaggggtctatctctctcacccttgggtgtcccttgtcctgaaagtgtggttctgtctgtctgcgcgtccccgcacgcgatggcgtgccatcttatgtgatgtgtggcgctgcgtccttctccccgcgctcccgctctctggctcgctctctctgcacctgcgcggagaggactctggaaaggggggagtatggatgggggggacagaccggaagtgactccctccccctccagagggcacgatacaaacagaagaggagacggaagaggagagaggacggggaggaggagggggaggggagaggagagaagggcgcaggaagaggggcaggagagagaagggcaggggacagagaaggggagaggcggggcgcagagcgggggacggagagcgagcgcaaggagagaggaagggcaggcagagagggaaggagagagaaagagaaagcgtgagcgggagaacgacagaaggaggcagcagagacagagaagagaacggaaagaaagcaaaagcagaaagagaggagggaaaagagaaagcggagaggacagaaagacgagagagagggagagggggggaagagaagaaaaaacagcagggaggaaggagggggagaaacggcgagcagaaggcaagagagaagagggaagcagggagagaagagaagaagaagagagagcgaggacaagaggagagagaaggagagcgaaaaaagaggaaaaaggagagaagcgacaggagggaacggaggaaagagcacggacacgagagaagagaggacagagaagacaaggaagagaggaaagaggaaaaggaggaaagcgggagcgggaaggaagagaaaaaaggaaaagcgacaagcacgagaagcaacaaggaaaggagaaagaacggcagacaagagggcgaaagaggagaaggaaggagaaacgaaaacgaagaaaaaagagagagaacaaaaaaaggagagaagggcaagaggacnnnnnnnnnnnnnnnnnnnngtagcagataattacatagtgtgtgtttcttttttctctccgttttgtgtgtcttgtgttgtcttgtctctatgtgtccttttggtcgtgtcgtctgcgcggtgtgcttcgccgctcgttgttcgtctgtctttgtgctctgttgtccgtttcgttcttgctgctcctcctctgtctcccggtgtccgccctttttggtggtgcgcccctttccgggccctccccttccggccctgctacatagcggggcctttgggccgaccggggttcaccgacggaccgcgcgcgcacggcgccgcgttgtgcggggcgcccgatcggaccctgccgggccgggcccggtgcgatggctttgtctgcggtcgggggtggccccggcgggggcgccctgccccaaccgccccctgcgctatcctccagctggcccgcgctggggccccggaggcgcagcgtctggtacatttacaggtaaccgcgcaccgcccgctcgtcccccgcacgaccctccgtgcgtttagggctccccaaacctgtcccgtgtcctcttcgtagcctcccttccctaggcctgagcccttccagaccctctctcagcagctcagcaacccggttctcttccacctccctccttcttgtgcttcaggcgctgctccagggcctcctctgctattcaccaagacttttgcctcccctcgaacccccacgaaaggaccccactacagctatactctgcaacccactcttgccctttctggcacccctagctcccctactctaaggagtacttccccagggccccaaacagataccccgggcccccatccctccaatcctccgcatccccgcccctcttcctggagtcagcaagtccccccattcatacccctgtctcccattcacagtctgtccccccacacacacacctccatcacacaagcatcccgcccccggccttccctccccttctctttttccgctgcgtgtcactgtgcggctgtgcgtgtgtcagtgatgtgtgtgcgtatgaccgcctgcgtgtgtgagagacagacagagatggggaggctgtgggctcccagcccaccccccacctatgtccatctgtgtgtccctgcgtgggggtgtctgtctctgtgtgacttggagccatagcgaggctgtctggggactgtgcgtgtatgtgcgcctgtgtgtgtctgtgtgcgtgcgcgcacacgtgtgatagagtgcatctgtcccagagactgcggctgtgtttcccaacacccagcctcctaggcctggcctgccccctcttccccctcccccctccccagtttgccctgtgtttctgtccccgcgtaccctgctccgtgccctccccaggagtctgtgcatggggaggatcgaccctggaccccgaggttctgccctctgcggggatgggggcacgtgggctgaacctcggcaagcttctgcatggggctctggcacctgcctgtgtgctgttctcagcatggggacaggggctggctttcttgcatgcgggggccctgtgcaggccgtggagaggcccgccgagatgggaacacagggagggaacgaggactggagaatgcagtgtggatggcagccggctccaggctgtggcatcctgagtgggcaagagggacctggggtgggggtggggagcggtcgcgccgcagtctccatgagggaaccagcaagccctggagaccttctctgggacacggcgggatggcctggggaaggacatggtgccagctcctcatgggcaggtagtccgcaccgcgaaccttggtgttgtgagtggactcagagggagcgggggtggtggtgcaaaggggattgctggatagaggggaaatgggacgcgtgggtgctggagaggggttgggtaatggcgtttgcgggttctgggtgccaagaaaggtgctggggtgagaatggaaggcaggcggtaggaagaggattggggggcggggacccagccggcactaccgcctggtgtatgggaggaatgtgagcggaagaggctgctaggaaaaccagcatggaccaaggagaaagagctttccgtagtgggcaggcagtgtgaaaggaacgtgggtgttattgggggacatcatgagcttctctgtacaggagagaagagaatgtggaaggctgagggtcaggaatttcggagaggaggcaggcagggtgaggaggtggcagatgtacgaagaggtcacttagaagaagggatgactgggtgcaggggtggtctcctggtatagcatacattatgggcaccctcagactggccgactgatggcatagttttgggagccatggaaatacaggatggtgtgcagcgagatgtaaatcagaaggatggagtcaatggcaggaagctgagagagagacaggagagcaagtaggacatttggggatgagggtaccacatctggcagggacatacacagtgtaaactgtggaaatagacagtgctgcagcatggtggactccatatgagagggtcctgtggttatgggggcaggtggtgctgctggggtctgtggcttgggggggggcagcttgtggtcttgacaattctaggtggtgtgagatcttgagcaggtccttgctctgtgcctcacttaacctagcattaaaggtggggacactcacagtcccatctaggagtgttgtaatgacttaaatattaaatgacccagagagtgattagtgttgcctggatcttgatgggttccttgtgtgactggcagaagtcaggataaaccccagaggctggagggacagttgggggttgtcttagttagggttttgattgctgcaacaaaataccatgaccaagaagcaaattggggaggaaagggtttgttcgatttacacttccacagtactgttcatcactgtgggaagtcaggacaacaactcaagcagagaagaatcctggaggcaggagctgatgcagaggccatggagggctactgctgactgatgtgtttcatataccttattcagcctgctttcttatagaatctaggaccttcagctcggggatgcccccccccacacacacacaccatgggctgggccctccctctatcaataagtacttatgaaacagtacttcagataactctagtttgtcaagttgacataagactagccagcacaggggtctcctgctaagcttgggggtaaaccatgtgtctgaggtatttaggcagtgtgacatgaaaggaattctagctgcagttacccagatattttcttgggcatcaaagaatgttatttgtcagctgagcagaacagtgaacactttgaattccagcattcaggaggcagaggcagccagatagatctttgtgagttcgatgccaaccttgtctatgtagtgagttccaggacagccagagctgcacagtgagctgtatgtggaaaacaaacacaaaaggatactgcctgtgtctctggagagtttcttaacctttctgtgcctgacttactcacctgtaaaatggaaataaatggtatttatgtcttcttccaagactggctctgaggagggggctaacgcagtgggtctgtagtgaagggtttcccatgctgccaggccagcagcaagcacttgacctcagcatatggacaagaggcctgttcatatctgaagacaagacacttggggtaactgaggcttgtgtgtagagctggggttgaaagagatggcagagtttgatgtggtggctcacagccatcaccccaacactaggaaggctgagtcaagaggattgtaattacttatagagcagcctgggctggagacagagagagagacagagagacagagacaaagacagagagacacagagatttcagaacatggggaaggtgagagtggcaaggaggtatgaatgactgaaggtgactttgccttggtggggtgtaaaggcggagcctgaagggcactatgacctcctgggaaggttcttgggaatgtggagaagctgtcagagtagtaaggacataagaggttgtcatagtgtgtcaggatgaggctaccacagaatagacagtcagagccaagcttccttgacctcccagactgtcccttcaccttccctccagcctgcttagacctatttctcccatctacccttaaccttcctttcttcagcccaccagccttctcccaatatctgctccatgcagcttcaaagactgctgggggtggggcaattggagagggctgagggagaggaggtagaaacctgtggacaggtttattgacctctggataagtgcagaggctggaacattcctcttcatgcatgcatgatggggtattcattaagttccacaaggagggaggcagcacctggacttgtgcagaacactcactgctattcaggtgcatgggttttaccatggaagctgtggggggtcatgggagcttacacagacactgatggaaggaggtggcaccacaatgcagtaggcacacaattaggtgttattcccgtgtgctgggaggtgctcagagggcgtgtgatgggaatacactgatatcaaagtgagggggagtcaggattggggcacactgggatgtgtggaggtgtcactgaaatatactggagtacttgtggagggctgttagctgagtacgtgggggtgggtaattgggggagcctgcatggatattattggagtagcttagagccatacaatctaactgagattcggtgggggtgaggagtgtctgagcattgctgcgatacagagagtgcagggcaccagccctgggttctagatgctttctagatgctagcagagactgcagtgaatttggttctggtaatactgggtattcggaaaggaactggcttgaggtagagcagtttaggtgtccctgttcatgttgggaggaacatggctgtggcttgctgaggggtagagtgatctaggatcagaggctgtgtacaaccagcctgagcaagcatgggagtgagggctatgactggggttttatccgtttcctctgtgtttatggtttatgtcctactgagatgtgctggtgaggtactgagctttagagctgatatcacattcagtggggactggtgcttattttttccagtgccagagatggaacctagggccttagtgattgctaggcaggagctttaccatagatccaaaccccagcccctcactgggggattctatgcaggggctctaccactaagccacaccccaccccctcactgggggattctaggcaggggctctaccactgggccatgcccccagcccctcaatgggtctctagacaagagctttactgctgagctacatccctagctctcttcttacgttattttatggcatagcatccctaagttgctcaggctggtcttgaactttcaaacatacttcctcagcaccccccctccaggagctgagaagacaggcttgcatcatcaggactggtcattggtgtgtgactccatgtgtgacttatcacttgagtcttatcgagagacggcagcagtcggcacggtccaccggaactttctatacgtgacgggactgttctgtgtcagcaccatagttaggaacgttgtgtggccatcataaccgaggaactgacactttaaatttaatcctgattaatgttgataaaaatagtcatgtgcaactagcagttatcatactgggcagggtgatgcaaacattcttttggttggctctgatcctctggtcctctggagcgttattgtagtgagggaatgagatgtgttagtacatttgctctcttgacctaacaccttggcctagggacacggggtgggctctgtgctgctaaaccctgtgtgtgtagtgccacacacaggcactgtagtgtgtagtgttccgacctcccctacagtctctttaggcaggcccccatgacggacttggaaattgaagcacaaaaaggttaaagccataggttcaaggtcacaggcaggaagctgccagccaggacccaagcagggctgtggtaattcagagcctctttctgcccaccccactgggtgcctggtgcaccgtgggctcagtaacagctctgctgaatggatgggtggatggattcacggaaggatgaatgaggaaagagtgggtggaaacaagagcaccccgggctttgagggggtgtcttgagcataagtacagactggatggggcgaggaactgcagtgaatggtctctaagcaggggctggggtgccccgtgatggggtggagcaccaaccctgtgcctcatgagcccttctccacccccacccccctcctgcctcctgccagtgattacatcatcaaggagaagacagtcttactgcagaagaaggacagtgaggggttcgggttcgtgctccggggggccaagggtgagtgctggccagggaggggatgggagatcctctgacccaaaaagcagggcctggatagggaggatggaaaaagagaagggacccctcacacgcccttaagcccacccattgccccaccctggggtgctggtccctcagctccagtgagtcctctgtgacttgggtctgagccccatcccctgctcggcctctccaccccctcccctccgaccccgccggctcctccccgtctgcagcgcagacccccatcgaggaattcacccccaccccggccttcccggcgctgcagtacctcgagtctgtggacgagggtggcgtggcatggcgggctggactacgaatgggagacttcctcatcgaggtgagccctggccacactgtcctcctggggcccctgatgatgacccctaagtccaaaagctatgtgccacttctggtggcccgtccaccccactcagtctgtgggaccacccacacctttccagcaactcttcctagacccttgaaaggtgctcaggctgggtgcggggggctcacacctgtcattccagcttagtcaccccaggaccactgctgccaccactagttcaagaccagccagggctacctagtgagtacaggccaacctgggctacagagtataactgtagctaaagatgaacattttttaaaaagcatcacagaattgtcccccaacatatgcaatacaaggacatgatgggtgtgggggtgcaccggctagcccagtcagtcctggggatgtggggactccagagaaccatggagggaagggggtggggtaggaggtcacagttggggactctagatctaaaaagcttctatccttcctccatgacacaggtgaacggacagaatgtagtgaaggttggccaccgtcaggtggtcaacatgatccgacagggaggcaacacactgatggtcaaggtggtgatggtgaccagacacccagacatggatgaggctgtccacaagaaaggtatctcttcccagctatggccttagctcagtcagtagagcactggcctagcacacacagagcctgggttccagtcccagaactgcagaaaagggcattttggtacacacctgcaatcctaccgtctaggtagaggcaggagaatcagaagtccaaggtcatcctgagctacttagtaagtttgagctagcctgggctacaggagagttggtcttaaaataaaggagcttccccagctctctgcggagccaggcctgggtatcccactgcttagggctactctccaaactcccacaaggccctcctttcccctcaaagcctgcctgttcagaacctttctggggagaaactgaggcagagagggctcagcatgctggggtgctgttctcagagttctggaagcacagtgaaaggagtgggtgtggaggggtctcctccctgcaacactgacacctcccacccaccccgcctttccagcatcccagcaggctaagcggctcccgcccccagccatctccctgcgttccaagtctatgacctcagagctggaggaaatgggtgagcctgtggggccggctggccgagggccaggggcggccaggggcaaggggctggaccacccttgactttgtcagtgttgttagtcacgaggggtccttgtcctcctcctgtcccgcccctcccccatgtccttgggccagattccgtggcctgcctgtgtgtcactgggaagtttttgagagtctcctctctgccctcttgtatctctgtttctctgtcctgggtctctgggggtctgtatgtgtccttctacggtgggcctctctctccttttgtcccttcccctccttctactgcccccaccccatcctcttactggccccttcccctccttctacttgctccttcgacccacagaggaaggttagctgctccttgtaggcagattctcatgacctggggtgggtcttatttccccctacctggggccacttgggcaggtgactgactattccacaccgggggtccctagggaggtgggaattccaaagaggggtccttcacgtccccctgatgtcctaactcttggctcctctgctgtctacccctgggctagtctccccctggaagaagaaaattggtgagtgggttcaggtctggtgggagggtcccagtctcccaaccccagcggcggatttacccttccctcgaccccggcccctcactgcccccacctcgcgctggccacacctgctggtccacacctgctggccatgccctctgcagaggtacccttgagcttcatccctcccctttgcccacagaatacgaacaacagcctgcagcagtgcccagcatggagaaaaagcggactgtgtatcagatggcactcagtaagaagccgcagcatgatgccctagtcccccacctctggggctgctgcatgcattctgccctcctccttcccgtgtgcccttcagtcacccgtgagctcggcacgcagggccctggaaccctgggcactacataccgtcacggtgccacctactctcctgtgctttgtcatccctgggccgtgcctgctgggctgatgtctccacacagagacagagataggaccatgtgagctctgtatcttaccccagggcaaccaggtctctagtgaggcaaggcgactttcactttcactgtctctgaccgttctcacttccccacagacaaactggatgagatcttggctgcagctcagcagaccatcagtgcaagtgagagtcctgggcctggcggcctcgcatccctgggcaagcaccgacccaaaggattctttgccactgaggtaggtgtgtgggaaggaaactaaggaaagactcccaaatgtcttctacatctctccccattctgaggattctctctctctctctctctctctctctctctctctctctctctctctctctctctctcgctctctttctctctctctctctctctctctctctctctctctctctcgctctctttctctctctctctctcactctctctctttctcactctctctcactctctttctctctctcctctctctctctcctctctctttctcactctctctcactctctctttctccctcctctctctctctcactctcactctctctccccctacacacacacacacacacacacacacacacacacacatatatcttctccctccttctctctccattctgtttgattatttgtttgttttatgacagggtttctctgtgtagtcctggctgtcctggaactcattctgtagaccaggctggcctcaaactcagatcctcctgcctctgcctccagagtgctgggattattggtgcgtgccacgaccagcttcccctctattcttgatgtctctgcttcccatgttaagtctcatccccctcttcccttcccaccttagagatctcgcataagacaaaaggatgttgcagagatgtggcatgaaggtccacaacccctatctcagaccctggggagctgagctaggagaggggctgtgagcttgagatcagcctgggctatgtaaggagaccttgtctccacacaaaatgtaatgttgtcatagttacagacccccatcacggtcctagatgctcagcaaaggctagatgctgtgaacacattgatgcttgggcccaagacacagctcagtggttgtgagtatgcactgcttgtgtagaagattggatttcagttcccagaatccgcactgggctgctgacaacagcctagaactctagctgcagattctgtttccctcttctgcccgcttaaggcacagcacagtcccatacacagacacacacataatttttcttaaaatacagttgaaaatgatttaaaaagacacctaaggccgacctctgacctacacacacacaccacatacagtgaaccatttggcctgtgtgccgtttccacctgccctttcccacaggcaaagacctgatctgtatcaagaattcaacatctttccggtactgtgttccacacagattagctcattcctgtctttagaaccttcttgtgaggcaccacgcagcaggggttagctcatttacaggtatggaaatgaaactcaggaaaggcccaagcccagcctgggccatgccctgctggctctgtctgacccatgagtttgatccttggacaccaacacatccacatcagaactgcctgtgctcttctgtctcccagccgtcacccctgaaggcgacccactgcctggcatcccccttagcctctgccctctgactgccacacctacagcctggtggccaaggggcatttactctaagggtcaaaccttactcaaggggagcccagaatctgcttgacagattggtttgggctttctcagaactatctgtgagatagttaactatgagaacgaagtttcccaggacttactgcatctcagccttctctcatagatcaagtacagagcactacttataaagacaagctgtgatacggacaagagccagccacactaagacacccaaaatataagctctcatgcattttaccaccatgacatgcctccagctccttccctgggggattctaggcaggggctctactcctgcccctcactgaggagattctaagcagttctcaacatgtgggtcataacccttctcacaggggtcccatatcaactatcctgcatatcaaacatttacatgacaattcatgacggtagcaaaatcatagctataaagtagcaacgaaaataattttatggggggggaggggtcacaacacatgaggaatggcactgagaaccactggcctagccagatgctgtatcgatcagtcatacttcccttcctaggggattctaggcattgactctttactaagacacacacacacacacacgcacacacacagagagagagagacagagagacagagacagacagacagacacacacacacacacacacacacagagagagagagagagagagagagagagatcctcactgaaggattctaggcaggggctctacccctgagtcacaccccagcccctcactgggggattctaggctggtgctctaccactgagccacacccccagctcctcacctggtggatgttaagtaagtggtgtaagggctacatgcccaacattcaaaataatgtttagtgacttttgaagtcagaagtggtggcccacacctataatctaagcactccagggactgaagcaggaggatttccatgagttttaaggaccaacctagactgagcctatctcagaaaaccaaaagataaaacagatttgttgctacagcaatatcagtgcctcctggccagcacattacacagggagactgagctgtggcacctaagtgctctagctgcagagtccacagcagcctagggactatctgtaggaatgagccgctgagatgggggtcaggaatctccatgatttctgtgggtgatgcagccaccaacttcactgagactagcagagctgatgccaacagcctcaggggagaaagagctgagttccccactgcatgatgtggggacaggggtgtcatttattccctcaggaccacacactccatcctggagttcccaatctagaggccacttctctggctggtggagtgccctgcaggccccggccctcccttcctgcccatccttggtttctctagatgtctacattgttggttatctgctgtgccatcctgcacacaagtacagagtattcctgtatttgtttaagatgaaagaaagaaaaagaggaggcagaaaaaggagggaaagagaaagaaagggctgaagaatggaggaaggagaggagggaggcaggaagagagagagaatctaggacaaagaagaaagtgaggcgggcagggatgggaatggcaagggcacttgggccttgcagcaagctgtgtgttcaaatcctggttcctctccctacgtggttctgagctatgctacctcatccccagtgtgcttcctactctggataattggtttggatctggcagcactcagtggagtcaaatgcggtcagctccagtccaacagggctctcaacaaactggcagtcctcttctgtgtgcgactgtgccagccctctgatctcagcccaacaccatcctcagagtctgacagcatggcccccacactgtcctccgacagcctcagctctcatccaacccgtctcttatgcgtgtgtgcaagtgtgtgtgcgagtgtctgtgcacatgtgtgcatgtgcctgtggaaagcaggggcagtctttggtatccatcctcgggcaccaatcaacttgtttgttgaactctctcaaaatcagagacatatggtgtgtgtgtgtgtgcgcacgtgtgacatgcgtgtagtgtgtggtgtgtgtatgtgtgtgtgatgtatggtgtgtgccatatgtggttatgacatgtgtggtatgtgtgcaccatgtatggctgtggtacacgcagtgtgatgcattctgaaaccagaccaggacaggtattttcctccctctaccactgtctggtccccatgagacagagtctcactgaagcacagttcacagttttatctaaattagctgtctatcaagcgctagggacccacctcttccccctcaccacacaggcacccaatgctaataatacaggcatggacagccaggcttggatttttatgtagcttctgatgatttgaactcaggacctcatacctgaagaactaacttacccacctaaccatctccccagcccctcacccagtcagagtgttttcccttagtctgcaaacagtgtcctcccctcaggcagggttcccctcaaaacctgctcttctccctaggagctttttctgacattctcattacctcacccttcctcattcagttccagacactctgacacaacttctttcacactaatctttctactatgatgctcgcccctcccttttactacttcctctctcctgcccaccccctcctccatcaacatgttcctctccattacatggcccctcccccatctccctggcccctcctccatcgcatggcccctcctctatcaccacagtccgtcccccatctttctggcctctcctccatcacatggtccctcccccaccaccatggcccctcccccatcagcttgatccctgtaaggagcctgtccccagactctcatactctgctgctctaatgggataacaggcacttaaactgtccctgggttacttgggacctgtgaaaagcaccctccacagtgtctctgtctttctagggttggacttattttgttttcttgcatgttttgttgtttttctgagacagagtcttatgccgtagctgacacttccttgaattcacttgtagaccgtgctagtctggaattcatggtaatcctcctgcctcagcttctccaaatgacaggttccatgtcatacaagactccatgttctgttctctaatatacttatatcctgcctttcatacagccatgccttgtggaagtgtccttgtcagtggaatgaacaagacaaacacagaaatagacagttctaagccaggtaggccagtgcagcgacagggcttttaagacccaggaaagccttgaattcctcagactaccactgccctctagaatagtccacacttcttgtcctgtatggagttacagtcactctggattcaaacacaaccagtgttgtggatggatggatggatggatggaatgacagacagaaggaatggtcagtggaagaagatgatgaatagaatgatggacagatagaataacagatgaatagccagacaaacgaaatggtggatggaagatacacggacggaatgatggatggatagaatgatggatggatgcaatgacagacagtagaacagtgggtggatggtcagacagatgggtggaaggatggatgtgtgcagtgatggatgtgtggaatgatggacacgggagcagacagacagatggaatgataaacaggtacaaatgatgaattgacagaacaatggattggtgaccagacagacaatttttttttcttgaatgagttgaaactggggctggaaagatggttccattgctaagagggtttgctgtgtcaccatgaggatgggagtttgggttccaggcttggatagccctgcagcccacccacttcccccacatatgcaactctagctcttgtgcctttctccggcctctatgagcccctccagcatgcgcgtgcgcgcgcgcacacacacacacacacttttaagtctgacgtgagctgcagctgctgggaatcagaactgggtcctcatgtctgtatgtgtggcaaagcgtattactgactgagcaatcgctccagccctgatttcttttttgaaagattccgccaactctggaaaagagaccagaaaggagtgaaggagagaggaaacaacaaagccagaggggtggctgccaccacaggccagaagagtgtcaatgggacctgggtacaggccacgactgcaggtggtacctgctttagtgggactgctcggctgcctgcttttcttttctttctcctgactgcttccccagagaattctcccaggacttgctttctagcttctgtgtgcctcgtctctgccatgaaagagctcagaggagaaagtaatttccttttggagtgtggagaactctgactgatccctcttcgctctcttttctctcttcctctaactgctgccccgaagtcgagctttgatcctcaccaccgctcccagccaagttatgaccggccttctttcctgcctcccggacctggccttatgctccggcagaaatctatcggtatgtcccccagaaaggaccgtagcccaggggcaggagaggactgtctaggtttggaaatgtgctgcagcaccacatccgaccctggttagaggaggtcgggtttggatgaattccaactttgcttctcgcctgcgggactgcgtgggtggtctctcggcttcctgaccttcatctagaaaaccggggtctttggtgtccagaggaaggattgttggtagcatgcgggtagtaagtggaggcagatccttgttgagagagaagctagctacttcctaggcgtctctgtgtaaaataatagccttttcttcttctcaagcacgctttaaactcgctccaagtcaccattatcatggattcaggcctttgactaattaggaaatggctccccctcctggccagagggtgaaattccactgaatttctcttgcgcctctgctgttgtatagcttgtatgcagaaggagctgggccagtccctaattcctccattggtcttacgtatctcaacaggggctgcggaagatgacagaccctacctagcacccccagccatgaaattcagtcgtagcctgtcagtcccgggttcagaggacatacccccaccacccactacatccccaccagagccgccctatagcacacctccggccccctcctcttccggccgcctcactccctcgcctcggggagggccctttaaccctggttccgggggtccccttcccgcctcctcaccttcatctttcgatgggccatctcctcctgacccccgtagtgggggccgagagaagagcctatatcacagtggcgccctaccccctgcccaccaccacccacctcatcaccaccatcatcacgccccacctcctcagccccaccatcaccatgcgcatcctccccacccaccggagatggagacaggaggttcccccgacgatcccccacctcgattggctctgggaccccagcccagccttcgaggctggcgaggtggaggacccagcccgacctcgggggccccatcaccttcccaccacagtagcagcggaggcagtagcggtcctgctcaggctcccgccctgcgctacttccagctgcccccgagggcggccagtgcggctatgtacgtaccagcccgctccggccgcggtcgcaaaggcccgctggtcaagcagaccaaagtggaaggcgagccccaaaagggcagcctccctcccgcgtcctctccaacatccccggcgttgcctcggtccgaaccacctccggccgggccgtcggagaaaaattccatccctatccctaccatcatcatcaaagccccatctaccagtagcagcggccgcagtagccagggaagcagcacagaggctgagccccccacccagcccgacggcgcgggcggcggaggatcctcgcctagccctgcacctgccacgtcccctgtaccgccgtccccgtcgcccgtgcccacccctgcgtcacccagcggcccggccaccctggatttcactagccagtttggagcagccctagtgggcgcggcgcggagggagggaggctggcaaaacgaagcccggcggcggtccacgctattcctgtccaccgacgcaggagatgaggatggaggcgacagcgggctgggcccgggggcgcccccgggtccccggctgcgccattccaaatccattgatgaaggcatgttctccgccgagccgtacctccggctggagtcggggggcagcagcgggggctacggggcatacgcagcgggcagccgagcctacgggggcagcgggagcagcagcgccttcaccagcttcctccccccgcggcccctggtgcatccgctgaccggcaaagccttggatcccgcctctccgctggggctggccttggccgcccgggagcgggccttgaaggagtcctcggagggcggggtcacccctcagccgcccccgagacctccatcaccacgctacgacgccccaccgcccacccttcaccaccactcgccccattcaccccattcgccacatgcgcgtcatgagccagtgttgcgcctctggggagacccggcgcgccgggagctggggtaccgggcaggcctagggagtcaggagaaggcccttaccgctagtccacctgcagctcgccgctcgctactgcaccgtcttcccccgacggctcccggggtcgggccgctcctgcttcaactggggccggagcccccaactccccatcctggggtgagcaaggcctggcgcacagcagcccccgaggagccagagcggctgcctctgcatgtgcgattccttgaaaattgccaggcccggcctcctccagctggcacgagagggtcctccactgaagatgggcctggggttccgcctcccagccctcgcagagtcttgccaacctctcccacttccccgcgaggcaacgaggagaacggccttccgctactggtcctgccaccgccagccccttcggtggatgtggacgacggcgagttcttgtttgcggagccgctgcctccacccctggagttttccaatagcttcgaaaagccagagtcgcctctcacacccgggcctccccacccgctgcctgaccctccctccccagctacccctctacccgcagccccacctccggctgtggccgccgcccctcccaccttggactccacagcatccagcctgacctcttatgacagcgaagtggccacgttgacccagggggctcccgcggctcctggggaccctcctgctccaggccctccggccccggcagctccagctcctccagcaccgcagccaggccccgaccctccacctggcacagattctggaattgaggaggtggacagtcggagcagcagcgatcacccgctggagaccatcagcagtgcatccacactcagcagcttgtccgccgaaggaggaggcaacacagggggcgtggctgggggcggggccggggtggccagcgggacggagctcctggacacctacgttgcctacctggatggccaggccttcgggggcagtgggactcctggcccaccatatccccctcagctcatgactccttctaagctccggggcagggcgcttgggactagtggaaatttgagacctggtcccagtgggggacttcgagatcctgtcacccccaccagccccaccgtctctgtgacaggagctggaacagatgggctactggccttgagtgcttgttctggaccctcaacggcaggtgtggcagggggtcccgtggcggttgagccagaagtcccgcctgtacctttgcccactgcctcatccctgcctcggaagctactaccatgggaggagggtccgggaccaccaccaccacccctgccagggcccctgtcccagcctcaggcctctgccttggccacggtcaaagccagcatcatcagcgaactcagctccaagctccagcagtttggtggggcctctaccgcgggaggagctctgccttgggctcggggaggcagcgggggcagcacagacagccaccacggaggagccagttacatcccagagaggacctcctccctgcagcggcagaggtgagcagaggcctgtggctggtgggtggctgtggcaagtgctggagcccaaggtccccatagagcctcggagttacagaaaacaaactgggctgtcttgcaggaatcggacctctaagaagcacactttcagctccatggtcaccataacccatggcccaagatgaatggctacatgtgtttattttgtttttgatggtcctggagatcaaacctaggacttcaggcatgctacacaagtgctcaactactgagccactgccacaactgccccccacaagtgggggaaggctagtcagaggctctaccacagcaccacaccccagccccttactgggaagttgtaggcagggattcaaccactgagctacacccccagctgtattatgttttgagtcagggcctaagtcactttgactggccttgagcctttgtagcccaggttgggtttagacttctaattttcctgcctcaacttccccagtaactggaataacagacctacaccaccaagtctagctacaaaatattaacaacagcaaccaaattggagtaactgaaggtgtgcgtggtgctttactgcagcaggtagatgacatgcgccccttcctccgtaggagtagggcacagggtgcctagaaagggattgggcagttgctcccaacaggatagaggagagcagagcagctgtggacccactagatgggaagatatgggtctatgcctaagttcccccaaacagttgttctctctgtgaagccatgacccatgctaacaatggctagcctggatggggtctggggaggcagtgaggggagtttgaaattcttcctctccatctgcagagcgcactataattctgttccctgtggattcatatctccttggagatatgaaacaactcactcatgttattcacgggtgggcggaggggcgccgcatttaatcaccataggcacagattagatgttgaacacagcagtatgcctttatccagtgtccaccttgctcctagttgagtaaggtccagctgctacatccccagcccctcgctggggggatcccaagcaggggctctaccactgagctatacctcaagctaaacagtaggcacaataattacagatacccccacaaaacaacacaagacctggctggttagagttatctcagatgaggccacctggctgtgtaagggaccagtgagccacccagtgggaagttcaaaagtcctgtggtgcagccacgctgaagggagctcaagggatgaggggaaccttttctccccttgtttcttctctctttcatctccctctcttcacctttctctctctctgttctctgtccccatccccttccatctctctcccccttgaatgcccaccctctatttgttgttgtttttgtttgtttctgtctccctgtcttccactctgctataactgaccataacaaaacaaaacaaaacaaaaggcagtatagaatagtggttaagagctcagactttggtgacttctaactgggctctgccactccctggctgtgtgtccttaggcaagtttcttaagctctctgtgctcttgacgatagtagtaactaaccttccacgggggctgttgtggggattaaattgagatgtgattcagaaagccttgagaacgatgcctgacacacatgagcagcagcaagtggtggcgggtgttattgctatcacttaatggttctttttcttccatctctcttggctatcaccctctccctgtccttcttctcacccttcacttctgccctgacattcatctgaccctcccttaccaccaccacccaccccatcttctccatctctctgcccccacccttgtgtctctccctctgaatcatggcttctgcctttttcaccccggccctgaacacttcctccaaaccctgcccctccccctgtcgccccacccccacaccccttgtcacattccaggctctccgaagactcccagacctctctcctctccaaacccagcagcagcatctttcagaactggcctaaaccccctctgccaccactccccaccggatctggggtctcctcttcaacagctgcagccccaggagctacatccccttcagcctcatctgcctcagcttccaccagacacctgcagggtgtggaatttgagatgcggcctccgctgctccgccgggcacccagcccctcgctgctgcctgcctcggatcacaaggtcagcccagcgcccaggccctcttctttgcccatcctgccttcaggacccctctacccgggcctcttcgacatccgtagctctccgaccggaggggcaggaggctcggctgaccccttcgctcccgtctttgtgccaccacaccccgggatatctgggggtcttggaggagccttgtctggggcctctcgctccctatcacccacccgcctgctctcgctgcccccggacaagccgttcggcgccaagcctctagggttctggaccaagtttgacgtcgctgattggctggagtggctgggcttatcagagcatcgagcccagttcctggaccacgagattgatggctcccatctgcccgccttgaccaaggaggactatgtggacctgggcgtgaccagggtgggccaccgtatgaacattgaccgggctctcaaatttttcctggagaggtgatggctggcctggacggaccagcccgtccataggacccttgagcctgctgacctcttgacctctgacccctctgaccatcattctctcccctctcccctcagggggccagggactctgctaaaactgtgcctggccccatctccccaggcctgactgaggtccccaggtggacccgatgcgggccagacaatggcacctcgcaagaggtgggcagctgacacaagactgcaagtggagtagagggggggattagacaaaaatgacaaaggggtactgaagaaggagggaaaggccgactgggggtggggggacagacagagccatagagggtcagcccagagcctgacctgatggggtcctgggaaggtgtgccctccgattccatcattcgcgcccctcaaataacccttttcacctctccaggcccctcagtcttccctctctccgtggcacactcagctgcccagcccccggcctcttgcacgcctgttccccttcctggctgcagtttttgcacaagcttgccccctggctnnnnnnnnnnnnnnnnnnnnnnnnnnnnnnnnnnnnnnnnnnnnnnnnnnnnnnnnnnnnnnnnnnnnnnnnnnnnnnnnnnnnnnnnnnnnnnnnnnnnnnnnnnnnnnnnnnnnnnnnnnnnnnnnnnnnnnnnnnnnnnnnnnnnnnnnnnnnnnnnnnnnnnnnnnnnnnnnnnnnnnnnnnnnnnnnnnnnnnnnnnnnnnnnnnnnnnnnnnnnnnnnnnnnnnnnnnnnnnnnnnnnnnnnnnnnnnnnnnnnnnnnnnnnnnnnnnnnnnnnnnnnnnnnnnnnnnnnnnnnnnnnnnnnnnnnnnnnnnnnnnnnnnnnnnnnnnnnnnnnnnnnnnnnnnnnnnnnnnnnnnnnnnnnnnnnnnnnnnnnnnnnnnnnnnnnnnnnnnnnnnnnnnnnnnnnnnnnnnnnnnnnnnnnnnnnnnnnnnnnnnnnnnnnnnnnnnnnnnnnnnnnnnnnnnnnnnnnnnnnnnnnnnnnnnnnnnnnnnnnnnnnnnnnnnnnnnnnnnnnnnnnnnnnnnnnnnnnnnnnnnnnnnnnnnnnnnnnnnnnnnnnnnnnnnnnnnnnnnnnnnnnnnnnnnnnnnnnnnnnnnnnnnnnnnnnnnnnnnnnnnnnnnnnnnnnnnnnnnnnnnnnnnnnnnnnnnnnnnnnnnnnnnnnnnnnnnnnnnnnnnnnnnnnnnnnnnnnnnnnnnnnnnnnnnnnnnnnnnnnnnnnnnnnnnnnnnnnnnnnnnnnnnnnnnnnnnnnnnnnnnnnnnnnnnnnnnnnnnnnnnnnnnnnnnnnnnnnnnnnnnnnnnnnnnnnnnnnnnnnnnnnnnnnnnnnnnnnnnnnnnnnnnnnnnnnnnnnnnnnnnnnnnnnnnnnnnnnnnnnnnnnnnnnnnnnnnnnnnnnnnnnnnnnnnnnnnnnnnnnnnnnnnnnnnnnnnnnnnnnnnnnnnnnnnnnnnnnnnnnnnnnnnnnnnnnnnnnnnnnnnnnnnnnnnnnnnnnnnnnnnnnnnnnnnnnnnnnnnnnnnnnnnnnnnnnnnnnnnnnnnnnnnnnnnnnnnnnnnnnnnnnnnnnnnnnnnnnnnnnnnnnnnnnnnnnnnnnnnnnnnnnnnnnnnnnnnnnnnnnnnnnnnnnnnnnnnnnnnnnnnnnnnnnnnnnnnnnnnnnnnnnnnnnnnnnnnnnnnnnnnnnnnnnnnnnnnnnnnnnnnnnnnnnnnnnnnnnnnnnnnnnnnnnnnnnnnnnnnnnnnnnnnnnnnnnnnnnnnnnnnnnnnnnnnnnnnnnnnnnnnnnnnnnnnnnnnnnnnnnnnnnnnnnnnnnnnnnnnnnnnnnnnnnnnnnnnnnnnnnnnnnnnnnnnnnnnnnnnnnnnnnnnnnnnnnnnnnnnnnnnnnnnnnnnnnnnnnnnnnnnnnnnnnnnnnnnnnnnnnnnnnnnnnnnnnnnnnnnnnnnnnnnnnnnnnnnnnnnnnnnnnnnnnnnnnnnnnnnnnnnnnnnnnnnnnnnnnnnnnnnnnnnnnnnnnnnnnnnnnnnnnnnnnnnnnnnnnnnnnnnnnnnnnnnnnnnnnnnnnnnnnnnnnnnnnnnnnnnnnnnnnnnnnnntctctacctctccagtgctgggactgctagtgcaggccaccatgactggctctatctatctatctatctatctatctatctatctatctagtgttagcttgagtgctaggaatccaacgtatgtacttgtgcttgcaaggacatttttctaagccatcatctctagcccctgcaagacgacattgtagacaagagggtattgtctatgagggcacataggtctacatagtacatatattattatgtgcagcaaatttaatggacatgcaattggcctgatgtttcctagactcagggaagggagcagccaatgagatgggataggccttcgttcatggttttactcctaggggaggggttcttggtgagtgacaagaaagtgaacaggaaactccattgtcaatgaggaagcatggccaggggtgggggtgggggtgaaggagcggggacgagggaacgggggagggattggatgggggagcggggtggagaggagagaccaagcaaaaagagaaacaatagcaaaagaaaaatatacaaagcaaaataaaaattaaaaaaaaaaaccctagaacacacaaatccaaaagggggaaaaacctgaaataaaagccctagaactgtcttccaagggggcgggaggggacttgaaaggagttgagctcgtcctgcaaggtcgcagggataggttgtgaccaggttggcgtttctggccgagtggatgagagtggaggttcgccccgccccccacgcccaacacgactttgccgagagaaatggcttttgtatcaggtcattctttataattaaactcacagtatccaccccctcgagccggccccgcctccttcctagggaggccacgccttctcgtttcgccgggtctgggggcggggtgcagctggaacccgcccccgctgtgcgtcaatcttcgtcggcaggctccgccccgagggcttcgagcatgcgccttcggaccagagagcggcgcaggtgcaaacggtagtcccccagcagtaaatcgtcgtggcgcaccagtgggtacgcggttccacggagggtgagcccggagcgcagcaggcgtgaccgcgtctggaagtctgtgacggtgatgagccacctgtgggcgaagtgaaggcccagagacgtctttgggttcaccctggcccccttcgcttgcgggcgtcactgcggtcttctcagctggatcgttcacctcacctgggaatgcgccaggtcccgccctcgctactgtctcctcagactccgctagaaaagcccttcagcataggacctgcccccacaatgtcatcctgactctgactcctccctaaatgctacccagcccaggccagccctccaatgctatcttcattctgattttgccaaaagtgccgctcaacctaggacccgtccctctgagtggttctgggcctcaaaactcactgttccccttcaccttgacctcatcctctcacctcgcctcttctcaactcactctaggctccaagtctttcagttgcttttagctccatccctcactggcctctacactctgacttcaaccaccagcctcctctaggttccacgccctctgtgtccgtccccccaccccccctgtgtcctcccccctccgtcccccactgatgctaggctccgcccctctcccactctcactctaattccgcctcccagctcagtttatggagcattacgctccctggctgcatctctcccaattacgttcctcagcctctcaccctagaccactcccatgcatggtctcacctgtccctgcggcccgcagtaccgcagatgacattcatattctcgtagcggatgctgttcacgcgcccgctttccatggccccgggcagctcggcctccaaagcctgcagcacctccacgtgcgtaaagtcttcctgcgtgggcatgcatcaacttcagcccttatctcctaggctggagcctggtccaagactccacctacagacccgctaggttatgacactcttgtcaaaaggggtgaccacaggtgtctctcgggtgtgaaggcatctgctactcgagatcattctgaaaaactagactaattaaattgtaataaccgccctacagggaaactctcccagagaccagccatggacagtgctttacagttctggaggattctatttgaacaggtgatttcaaagttaaggggctgcagttatcagaagggtcagaagaaattgtttgagccgggtgtggtggcgcatgcctttaatcccagcactcgggaggcagaggcaggcggatttctgagttcaaggccagcctggtctacagagtgagttccaggacagccagggctatacagagaaaccctgtctcaaaaaaccaaaagaagaagaaggaggaggaggaagaggaggaggaggaggaagaagaaggaggaggaggaagaaggaggaggaggaagaagaagaagaaggaggaggaggaagaagaaggaggaggaggaagaagaagaggaataaggaagaagaagaggaagaagaggaagaagaggaggaggaagaggaggaggaagaggaggaggaagaggaggaggaagaagaggaagaggaagaggaagaagaagaagaagaagaagaagaagaagaagaagaagaagaagaagaagaagaagaagaagaagttgttgtttgaggagatgtgccatagtggaaaagtgcgaaaaacagctgtccaagtatatataatcactgttgatgggctggcttcctggtttagtgggtaaagacgcttactgtgtgaaccttatgacttgagttcaatccctataacctgctataggtggaaggagagaaatgagttgtcctctggcctccacctgttaggacagtctggaaggcctcttcctcccacccatgtgctaaccaggcctgctttagcttctgagctggaaagagatgcctcgtacctggggcagtacactggggtccctttcttaaagacaccaaggaaaggagagatgaaatggggacaacagccccccatgaaagagtaaagtcacatagacttctaaagggatgccttaaagcttgcacctagtatacagtaggtgcctcttaacgccagacacaagcaatcatggtctcctctgtgtgtgtgcgtgtgtgtgattttgtttttttgttgttctctttgagacatgagctcaggtagcccaggctagtttcaaactcaccgtgtaactgaggctgaccttgaactgctagagtgctgcagtaatgaacacagatttaccatgcccagtccttaacctgaattaaaccgccggccacctcaggtctgatccgctgatcccatcaccacctgaactgtgcagagagctgggccactcaccgaagtctccatgcaaaggcagaggggctgggcagagggtggttctgagaattttcggatacacgggagctcccgatccagcgcctcatattccgagatgacctgccgcaggtactgcttcctgtgtgtgtgtggaggagagggaaagaaagaggagaggggaggagaaggatagagggcaaaggaagggaggaagggagaacaaggcaaggaaagggactctcaggtcaggggctgctgctgtcacctctgcaggagctgtcacaggtcgcgggaccagggagtactcacgaggacttggcaggcttgcccaggctccgagacatggactcctccatagactcgaggtcaacaaggaaggatcctagtaacaaaagaacccagtgtcacctgccaagaaccctttgaggccataactctttccagaagagaatcacccagcagtgtgcataccactcaggaaagttagatctcaggggctaggctctgagatatcatctggaagctacaggatccacccttccattacggcgctgagactgtttcctggctaggtgcagcctgaaggaagcaatgcaagagaaaaataacactctgcaccagaaacttttttttaagatttatttatttcatgtatgtgagtacacactgtcttcagacacaccagaagagggcatcagatccccattatagatggttgggagccaccatgtagttgctgggatttgaactcaggatctctggaagagcagttggtgctcttaaccactgagccatctctccagccctctgcaccacagttaataccaaactccagcctgctggttggaacttgactgataagttcctcacatatgacccctttcttgcccactttaccattagctgatgggcctctcgtttcccttggctagtcattggcacacatgacctattctctccctcttctcttcagctgtacaggcacaagggtgtctagcctccctgagcagctcctttgtggcctggcaaccaagttctcaccaacggtgtaagcgagagggagcactgcaactttagggttgtccacatagaggattgtccactggctgtggtagtgtgcagacctggcagcacagcacaaggaaggctgtggcaagggggttatcatgagttcaaaggcagtcaaagtcacacaggaactgtgggtcagcctgtgtctcacgggaaaagtgtggggaagagagagaggggaaggaagaggaggacggggaggaggaggagcaagaggaggagggggaaaaagaggaggaagaaggagggagagaaggaaggaaggaaggaaggaaggaaggaaggaaggaaggaaggaaggaaggaaggaaggaaggaaggaagctgtttgatgtttggctcttccttcagatgggctggaatgtggatggagtaacccagcttcaaccatgttggatatgctgagcaacagtgcactggaccttaggcccacaagttgtcctatagagttcaagcagcccacaatacactctttgacccaaattaatgtctgccttctttatgttacagtgtttcaaggcagaagagagaagagttgcccctgacagcccaaggctataagatgttcctcctggcctaatgattatccctgacatcaattccagacagagccactagagcaagacactcagatgagagcatgatgcagttacatctgagcaacgagcagacacataactattaaacacttcaactacaggaattatataacagcccccactacctggctcagagctgagggctggatctcccatcagcaccctgtgctgaaagccctcagatgctccagcttgcatgtgaagtaacacacttccttggtgggcatgcgttcttctagatgtggtgtgggaatctggtttgatggcaacatcccaaggccctttgtagccctggctgtcctggaacttgctttgaggaccaggctgtccttgacctgagagattcacctgcctctgcctctctgcctcctctgcctctgcctctcttgctggggttgcaggggtacaccactgctttaatctgcattttaacagaatccataccttactgcctctttttcatcttcccttctgtcctacttcaaacacagatgttttccagaatgtgtcactgcaacgggccaagcccttcgtgacagtgctagggaccaaacctgggtcttttcacagtgctgggcaggtgctccaccacggagatgactccagcccctcacaggggactctaggccagcactttcttgttactgtacatgcctcatcatggcgtgccactttgtcacttgaagcaataccacgttgtctccacatcactgagctgaccaatctccccgagaatactgcagaatctctctctctctctctctctctctctcacacacacacacacacacacacacacacacacacacacacacacacacaccctgtgctttgctcaagtataccatacaggtacatttaccttaatcaattaattagctaccctaattccacaatactttgtcactggttgtcaccacatttctaagcagcatgagggccatttgctcaactgttgtgagtgtgtgcgtgtctgtgtgtataatgtgggtgttggggttaccttttcttcacattgtaggaaggtatacctctgtatttttatttgttaatttttgtaaatactgtgaaggtcgaggtcagacagccctcacctgcctaaaggcaatctagaattgtactgatttgttgtaataaagagcttaaggccagtagctgggcaggaagtggagggtggaatgggaccccgaagattcagagaatggacccagggaaacaatatagatggcagtggagcagagaggcacagagctagaggccctagctagaggtctaagctttagactatataaaagcctccgtgtcatcatcataccactgagactccaagaaggtaccgctctatgcatgtgcacacgtctgtgtttgtgtgcacatgtacatggaagtcagaggccagtctcaggtgttgttcctaaggcactgctcactttgtgttttgagacacagtcaaccactagacttgccactgttcagtgagccccagggatctacctgcctcagcctgtgcagtggcaggattacagctgtgcaccaccacatctgctttgttgttgaaagatttgcttttaattctaattgtgtctgagtgtgtgcagcccacacacatgtgaatgcctgcagaggtcagaagagggcatcagatcttccagaatggttgctagctgcctggtgtgggcactagaaagctctgcaagagctgccgagccacctctcctgcccatttccttttgtttaacgtgggttcttgggggttgaacgtgggcccttatgcatgcatagcaagcgctttgctgactgagccatctacccttttaatcatgttttgaggcagggtcgcaatctacagcccaggctggccttgaactcatggcgatcctcctacctcaacctcctgagtgcaaggatggtaggtgtgctgcagcgtgcttttgccatcagtgttgtcattttaaatgtattttatttttaattttgtgtgtgcacgtgactgacaaacgtatggaggctagaagtgggagtcagatctgctggagctagagttgcaggtggtagggagccactctgcatgggtgatgaaaactgagcttgggtcctctgcaattgtgagctgcgagcactgagccacctttccagtcaaagcctcaatattcttgccctagaatccagcagagtgccaagtgcagagctggtccaggatgagtgttacctggaaacatcccaaggaacatgcgttgcatccattgtgtgattgtgtgagctgcttgacaccaaactctgtcaaaccaactggaaattaaaacaaaccaaaaaataaaaataataaataaattaataaaaacaagcaaatagattgggatgtaagtcagggatttatgtccagatttagacataagaatctaaataaatactacacaagagaaactcctggaagattcatgaattttgtcagctgtcaccgtagcctggtggatatatatgtgtccttaaaaagtcccagcaatttgaatggggctaaagaggtagctcagtcagtggtgtgcttgcaattgtgtgacaattggttttaattgtggacttgacacaatatagaatcaccttggaagaaagtttcagccaggaactgtccagatcaggttgttctgtgggtgtgtctgtgagaattggttatgctaactgaagtgggactcacacccactgtgggcagcaccattccctgcacacgggatctagactgtatgaacaagggaggagacagcatgcagagcagcagcatgcattcatgggtggattccctgctctctgctcttgccagcccatgtgatatgaccagctgcttctggttccagacaccttcacttccctgatgtcatagacctgggattttgaaccaaatagtccctttgtcccttaattttgggggggggggaatcaaagtatt

SEQ ID NO: 413 - DNA, 5843 bp, Mus musculus
ctcagctgcctgtgatgctgctgtcccccgtcgccccgtggccccacgatgacccacagccccgcgacaagcgaggacgaggaaagacacagtgccagcgagtgtcccgaggggggctcagaatcggacagctccccagacgggccaggaagaggcccccaggggactcggggccgaggcagcggagcacctggtaacctggcctctacccgaggcctccagggacgctccatgtctgtccctgacgacgcccacttcagcatgatggttttcaggattggcatccctgacttgcatcagacgaaatgcctacgcttcaacccagatgccaccatctggacagccaaacagcaagtactctgtgccctgagcgagagtctacaggacgtgctgaactatggactgttccagccagccacctcaggccgggatgccaacttcttggaggaggagaggcttctaagagagtaccctcagtcctttgagaaaggggtaccctacctggagttccgctacaagacccgagtctacaaacagaccaacctggatgagaaacagctggccaagctgcacacaaagactgggttgaagaagttcctggaatatgtgcagcttgggacgtctgacaaggtggcaaggctgctggacaaggggctggaccccaactaccacgactcagattcaggagagacacctttgaccctggcggcccagactgaaggctcagtagaggtgattcggacgctgtgcctgggcggggcgcatatagacttcagggcccgggatggcatgacagcgcttcacaaagctgcatgtgcccggcactgcctggcgctcacggcacttctggaccttgggggctcccccaactacaaggaccgacgagggctgacccccctgttccacacagctatggtggggggagacccccgctgctgcgagctacttctgtacaacagggcccagctgggcattgcagatgagaacggctggcaggaaatccatcaggcctgccaacgagggcactctcagcacctggaacacctgctcttctatggggctgagcctggagcccagaatgcctcaggaaacacggccctgcacatctgtgctctctacaacaaggtggctgtgattgctgggaattttgagctgggggaactgattcgtaaccatcgggaacaggatgtggtacctttccaggagtcccccaagtatgcagcccggcgtcggggacccccaggcgcagggctgactgtacccccagcgctgctgcgagctaacagtgacacgagcatggcgctgcctgattggatggtgttttcggccccaggggcctcatcctctgggacccctggccctacctcaggatcccagggccagtcacagccctcggcccccagcaccaaactcagtagtgggaccctcagaagtgccagcagtccccgaggagcccgggcacgctccccgtcccgggggagacatcctgaagacgccaagagacaacctcgaggccggcccagctccagcgggacaccccgagatgggccggctgggggaactgggggctcagggggccctgggggctccctgggcagcagaggcagacgtaggaagctctattcagcggtacccggtcgctccttcatggcggtgaagtcctaccaggcgcaaggcgagggggagatctctctgagtaaaggcgaaaagatcaaagtgctcagcatcggggaaggaggcttctgggaaggccaggtcaaaggtcgagttggctggttcccttctgactgcctagaagaggtggcaaaccgttcccaggagggaagacaagaaagccgaagtgacaaggcaaagagactcttcaggcattacacagtgggctcctatgacagcttcgatgccccaagctggcccgcgctggggccccggaggcgcagcgtctggtacatttacagtgattacatcatcaaggagaagacagtcttactgcagaagaaggacagtgaggggttcgggttcgtgctccggggggccaaggcgcagacccccatcgaggaattcacccccaccccggccttcccggcgctgcagtacctcgagtctgtggacgagggtggcgtggcatggcgggctggactacgaatgggagacttcctcatcgaggtgaacggacagaatgtagtgaaggttggccaccgtcaggtggtcaacatgatccgacagggaggcaacacactgatggtcaaggtggtgatggtgaccagacacccagacatggatgaggctgtccacaagaaagcatcccagcaggctaagcggctcccgcccccagccatctccctgcgttccaagtctatgacctcagagctggaggaaatggaatacgaacaacagcctgcagcagtgcccagcatggagaaaaagcggactgtgtatcagatggcactcaacaaactggatgagatcttggctgcagctcagcagaccatcagtgcaagtgagagtcctgggcctggcggcctcgcatccctgggcaagcaccgacccaaaggattctttgccactgagcccagccttcgaggctggcgaggtggaggacccagcccgacctcgggggccccatcaccttcccaccacagtagcagcggaggcagtagcggtcctgctcaggctcccgccctgcgctacttccagctgcccccgagggcggccagtgcggctatgtacgtaccagcccgctccggccgcggtcgcaaaggcccgctggtcaagcagaccaaagtggaaggcgagccccaaaagggcagcctccctcccgcgtcctctccaacatccccggcgttgcctcggtccgaaccacctccggccgggccgtcggagaaaaattccatccctatccctaccatcatcatcaaagccccatctaccagtagcagcggccgcagtagccagggaagcagcacagaggctgagccccccacccagcccgacggcgcgggcggcggaggatcctcgcctagccctgcacctgccacgtcccctgtaccgccgtccccgtcgcccgtgcccacccctgcgtcacccagcggcccggccaccctggatttcactagccagtttggagcagccctaccgtacctccggctggagtcggggggcagcagcgggggctacggggcatacgcagcgggcagccgagcctacgggggcagcgggagcagcagcgccttcaccagcttcctccccccgcggcccctggtgcatccgctgaccggcaaagccttggatcccgcctctccgctggggctggccttggccgcccgggagcgggccttgaaggagtcctcggagggcggggtcacccctcagccgcccccgagacctccatcaccacgctacgacgccccaccgcccacccttcaccaccactcgccccattcaccccattcgccacatgcgcgtcatgagccagtgttgcgcctctggggagacccggcgcgccgggagctggggtaccgggcaggcctagggagtcaggagaaggcccttaccgctagtccacctgcagctcgccgctcgctactgcaccgtcttcccccgacggctcccggggtcgggccgctcctgcttcaactggggccggagcccccaactccccatcctggggtgagcaaggcctggcgcacagcagcccccgaggagccagagcggctgcctctgcatgtgcgattccttgaaaattgccaggcccggcctcctccagctggcacgagagggtcctccactgaagatgggcctggggttccgcctcccagccctcgcagagtcttgccaacctctcccacttccccgcgaggcaacgaggagaacggccttccgctactggtcctgccaccgccagccccttcggtggatgtggacgacggcgagttcttgtttgcggagccgctgcctccacccctggagttttccaatagcttcgaaaagccagagtcgcctctcacacccgggcctccccacccgctgcctgaccctccctccccagctacccctctacccgcagccccacctccggctgtggccgccgcccctcccaccttggactccacagcatccagcctgacctcttatgacagcgaagtggccacgttgacccagggggctcccgcggctcctggggaccctcctgctccaggccctccggccccggcagctccagctcctccagcaccgcagccaggccccgaccctccacctggcacagattctggaattgaggaggtggacagtcggagcagcagcgatcacccgctggagaccatcagcagtgcatccacactcagcagcttgtccgccgaaggaggaggcaacacagggggcgtggctgggggcggggccggggtggccagcgggacggagctcctggacacctacgttgcctacctggatggccaggccttcgggggcagtgggactcctggcccaccatatccccctcagctcatgactccttctaagctccggggcagggcgcttgggactagtggaaatttgagacctggtcccagtgggggacttcgagatcctgtcacccccaccagccccaccgtctctgtgacaggagctggaacagatgggctactggccttgagtgcttgttctggaccctcaacggcaggtgtggcagggggtcccgtggcggttgagccagaagtcccgcctgtacctttgcccactgcctcatccctgcctcggaagctactaccatgggaggagggtccgggaccaccaccaccacccctgccagggcccctgtcccagcctcaggcctctgccttggccacggtcaaagccagcatcatcagcgaactcagctccaagctccagcagtttggtggggcctctaccgcgggaggagctctgccttgggctcggggaggcagcgggggcagcacagacagccaccacggaggagccagttacatcccagagaggacctcctccctgcagcggcagaggctctccgaagactcccagacctctctcctctccaaacccagcagcagcatctttcagaactggcctaaaccccctctgccaccactccccaccggatctggggtctcctcttcaacagctgcagccccaggagctacatccccttcagcctcatctgcctcagcttccaccagacacctgcagggtgtggaatttgagatgcggcctccgctgctccgccgggcacccagcccctcgctgctgcctgcctcggatcacaaggtcagcccagcgcccaggccctcttctttgcccatcctgccttcaggacccctctacccgggcctcttcgacatccgtagctctccgaccggaggggcaggaggctcggctgaccccttcgctcccgtctttgtgccaccacaccccgggatatctgggggtcttggaggagccttgtctggggcctctcgctccctatcacccacccgcctgctctcgctgcccccggacaagccgttcggcgccaagcctctagggttctggaccaagtttgacgtcgctgattggctggagtggctgggcttatcagagcatcgagcccagttcctggaccacgagattgatggctcccatctgcccgccttgaccaaggaggactatgtggacctgggcgtgaccagggtgggccaccgtatgaacattgaccgggctctcaaatttttcctggagaggtgatggctggcctggacggaccagcccgtccataggacccttgagcctgctgacctcttgacctctgacccctctgaccatcattctctcccctctcccctcagggggcc

SEQ ID NO: 414 - protein, 1892 aa, Mus musculus
CCCPPSPRGPTMTHSPATSEDEERHSASECPEGGSESDSSPDGPGRGPQGTRGRGSGAPGNLASTRGLQGRSMSVPDDAHFSMMVFRIGIPDLHQTKCLRFNPDATIWTAKQQVLCALSESLQDVLNYGLFQPATSGRDANFLEEERLLREYPQSFEKGVPYLEFRYKTRVYKQTNLDEKQLAKLHTKTGLKKFLEYVQLGTSDKVARLLDKGLDPNYHDSDSGETPLTLAAQTEGSVEVIRTLCLGGAHIDFRARDGMTALHKAACARHCLALTALLDLGGSPNYKDRRGLTPLFHTAMVGGDPRCCELLLYNRAQLGIADENGWQEIHQACQRGHSQHLEHLLFYGAEPGAQNASGNTALHICALYNKVAVIAGNFELGELIRNHREQDVVPFQESPKYAARRRGPPGAGLTVPPALLRANSDTSMALPDWMVFSAPGASSSGTPGPTSGSQGQSQPSAPSTKLSSGTLRSASSPRGARARSPSRGRHPEDAKRQPRGRPSSSGTPRDGPAGGTGGSGGPGGSLGSRGRRRKKAVPGRSFMAVKSYQAQGEGEISLSKGEKIKVLSIGEGGFWEGQVKGRVGWFPSDCLEEVANRSQEGRQESRSDKAKRLFRHYTVGSYDSFDAPSWPALGPRRRSVWYIYSDYIIKEKTVLLQKKDSEGFGFVLRGAKAQTPIEEFTPTPAFPALQYLESVDEGGVAWRAGLRMGDFLIEVNGQNVVKVGHRQVVNMIRQGGNTLMVKVVMVTRHPDMDEAVHKKASQQAKRLPPPAISLRSKSMTSELEEMEYEQQPAAVPSMEKKRTVYQMALNKLDEILAAAQQTISASESPGPGGLASLGKHRPKGFFATEPSLRGWRGGGPSPTSGAPSPSHHSSSGGSSGPAQAPALRYFQLPPRAASAAMYVPARSGRGRKGPLVKQTKVEGEPQKGSLPPASSPTSPALPRSEPPPAGPSEKNSIPIPTIIIKAPSTSSSGRSSQGSSTEAEPPTQPDGAGGGGSSPSPAPATSPVPPSPSPVPTPDSGPATLDFTSQFGAALPYLRLESGGSSGGYGAYAAGSRAYGGSGSSSAFTSFLPPRPLVHPLTGKALDPDLGLAARERALKESSEGGVTPQPPPRPPSPRYDAPPPTLHHHSPHSPHSPHARHEPVLRLWGDPARRELGYRAGLGSQEKALTDPAARRSLLHRLPPTAPGVGPLLLQLGPEPPTPHPGVSKAWRTAAPEEPERLPLHVRFLENCQARPPPAGTRGSSTEDGPGVPPPSPRRVLPTSPTSPRGNEENGLPLLVLPPPAPSVDVDDGEFLFAEPLPPPLEFSNSFEKPESPLTPGPPHPLPDPPSPATPLPAAPPPAVAAAPPTLDSTASSLTSYDSEVATLTQGAPAAPGDPPAPGPPAPAAPAPPAPQPGPDPPPGTDSGIEEVDSRSSSDHPLETISSASTLSSLSAEGGGNTGGVAGGGAGVASGTELLDTYVAYLDGQAFGGSGTPGPPYPPQLMTPSKLRGRALGTSGNLRPGPSGGLRDPVTPTSPTVSVTGAGTDGLLALSACSGPSTAGVAGGPVAVEPEVPPVPLPTASSLPRKLLPWEEGPGPPPPPLPGPLSQPQASATVKASIISELSSKLQQFGGASTAGGALPWRGSGGSTDSHHGGASYIPERTSSLQRQRLSEDSQTSLLSKPSSSIFQNWPKPPLPPLPTGSGVSSSTAAAPGATSPSASSASASTRHLQGVEFEMRPPLLRRAPSPSLLPASDHKVSPAPRPSSLPILPSGPLYPGLFDIRSSPTGGAGGSADPFAPVFVPPHPGISGGLGGALSGASRSLSPTRLLSLPPDKPFGAKPLGFWTKFDVADWLEWLGLSEHRAQFLDHEIDGSHLPALTKEDYVDLGVTRVGHRMNIDRALKFFLER
